United States Patent Application Publication US 2014/0057251 A1 - sequence listing, part 183

SEQ ID NO: 378427 - DNA, 5114 bp, Cannabis indica
ttaattttggtatcatagattcataaacagttattacaatatgaattctaaaaacaaaaattaacacataactaatttcttataagttcattacatcaattagttcatagctctctatgaactaattaaaaaaaaaaaaatcaccacataatagatgaaaaggaagaacagcatctcctacctctactaacaaccggttccattagaacaatttgaagggaatgtggctattactttagtcatatttccatgaaaatgttatctcaaaagtagacatcaacataagatataagctaaaataaactgttgggagttgtaactaatgtcttagtacatcatataggcttatagtacccataggataaacaagtgatccacttgcatggacatccaagtatggactgccattttcatgtcagtcactctagcgcttatggaagccacagcttgttcaagggcatagacccttttagacagctcaaaaatattatggttatatacttttgtctgctcctctagctgctgttccaaatacgaaattttttaatgcaaggagttgttattgatgtacagttgttctagaaatgaaactttgtgatgcaaggagtttttattgatgagcatctgatgatattcattagcaaacaatgcattttgtgcatgaatggcttgcattgccatttgcaatacataaatgacatcacatggatgtggttgtccccatgtgctagaaccaaaagttggctcattattaccagttgatacttcccattggtttgagaaatgaggtgagtaattcattctcacagtttctgtttgaggtttgtttgaatactaagatactacctctttgtttgtacattgcaggcaagtaaaataaagtgacatataaaatgcataggcaactttatatagaagtagaaaagagtgtggctttatcaaaagaatgtggtatgactttttagtatactattcttactttaatttaacattacaacggctcttgacatgacaattcttaatccagttactaaaacattttactttaatttaacattataatgatcactaccatgtcaagtaaaaacagtggtcattgtaatgtaatcaaagtaaagtgttttagtaattagattaagaattatcatgtcaagagccataccacctaccattgccacctgtataataagaatagtacaatgaagagtcataccacctttatttgataaagccgcactcttttatactcctatataaagctgcctatacattttgtattcactttattatacttgtctgcaaatcacaaacaaagaggtagtatcttaatactcaaagaaacctcaaacaaaaactgtgagaatgaattactcacctcatttctcaaaccaatagaaggtattagctagtagtaatgagccaacttttggctagctctagcacatggagacaaccacatccatgtgatgacatttatgtattgcaaatggcaataaacacaatgcaagccactcatgcacaaaatgcattatttgctaatgaatttcataagatgctcattaataacaactccttgcatcaaagagttttatttctaaaacatcagcacatcaataacaactccttgcatcaaagaatttcatctctagaacagtggctagaagagcagacaaaagtatataaccataacatttttaagcaatctaaaagagtctatgcccttgaacaagttgtggcttccatgagcgctggagtgactgacatgcaaatggcagtccatacttggatgtccatgcaagctgtggcaagtggatcacttgatcatcctatgggtactatagccaatacgatgtactaagacattagtcacaactctcaacagtttattttagcttatatgttatgttgatgtctacttttgagataacattttcatggaaatatgactaaagtagcaaccatattctcttgaaattgttgtagtggagccggttgttagtagaggtaggggatggtattctttcttttcatctattatgtggtgttttattggtaatagttcatagaaagctatgaactaattgatgtaatgaacttgtgagaaattaattatgtattaacttttgtaattagaatcatgtagtaatgactgattatgaatctatgataccaaaattaattttacataaactttgcatggtcttaagtaataattactatattaaaaggctaaacctaatgcttatggatgaaataattgagtttcatatcacggtgtttttatggtggcaatagttaacttataagttcatggcaaccattatattggaaagtacataatattggtgtacaaaactagtaattactcagaaaataaataacaaggagaagggaaaaaaatgaaattaaattcagaatcaattacttacatgattattttaaacttataaacaaactagaaagaaaaataataatcataccatcatttatcttgttcgggatctttattatattgaacttattattttaggagtcacaataataagttatttaaaataaaatgtattacaacataagaacttaaaaaagacaagattagctaaaataactatatgacatgatatgtgaggaaaaaataatgaaataaaagtacggaaagacaacaacattattattttttaattctattgatataaacaatcatagatttatatttgatttaatctactatcaaacttacttatcatacaaaaaactactttattaaattaactatgaataacttttaaagcaattaaaaagttgatttattattacctcaatgtctttgataggcaggatgggaaattaatattgcttaatgcacattttgtatcaatcttagtctgaactatttcccataatctcttcattaacagcatctggaacatcacaatgtatactattaatgaaagtaataactgtcacatataaaacctgtaactaaataaaactatgaatcacatctttactcttgacaaatattttggtttgagtagaatatattttttaacttgcttatgtttgaggaacaaactctttcattcggttatataaacacatcaaaatgtattgtcattattacaaccttcactaattagcatttaatttttataggttggttagtgaacctgcattgactaatgtagttatattggacaatcctattaaatgagttatattattttgagtctttaattgatttcaagaataatatggtggtttaattttaaatttgatacatatttatatactttcaatcgataatattatgtacttaccaataggtactaaacttggatgaacagatgagaaaaaaaaattaaaataagaatatacacacaaaaataaaaaaaaaaaaaatgcattgcatataattgaaggaagttattcagcaatttagtgaaaattttatactgaataaattctctcaattttaaacaaaatgtttatgtatgtgttgaaattaagaaccttaatttccattcaatactttcactatgagaggtatttaaatgagaatgtagtttttatttcttttatttggcaagagaaataagaatggggttgagaggcagttagaaccttgtggctcctttgtcaaaaataagatctataaaggactgcaagggtctaccaatcacagatattcatattcagttgacaggatatatttttcttgttgaatgaggttatccactcctgaatttaaggaaacaataaatacaacatgaactagacccaaacgaaaccattttggttgaacagttaaagaatttagttagtcaaataaaattagaatagtggtgactaacatgaaaaggtaacaatcatttcacaactagagtcagccatgaactaattactaaactgacataatatcaactaaatacaagaaatcatgtacaataactgataattataatggagcactctttcaacatgtgtggagtaagtgaataacacgtggcattatgctatttgtcattggcataaaaataaagtaaaaaaattggtaggagatggaatttatggcttgaaaacaaatataaataggtgttggtgcctcactctactaccacctctaaaaaaccaatttgcattcctaaatagaataaccattaattttcatgcaaaaatatctaacttgttgcgaaacctatttcccccatcaattgttaagcaagagccctctaatttagaggatgttctgcctaatgagtatccaactctgtacccccaatatagaattttgccgagttctaaatctccctccccaataacaccaacttcaaacatttgcaagaaagaaccagattcacctcacccccacaaataacaccaacttcaaccatatacaagaatgaaccagaatcacccacatctgactcctttgtggaaaaggaatcgagttctccaaccttaccgtgagttaggaaatatggaaaaatgaaatctccaaggaaaggcaagtgtaaatcttacctcgctaagtaggctgacaatgtgaaactgaagttcctccgtcgcaatgtgtccacaaaatctgaaaacctccgctgtgctgcacttaattgtagaacagttgtattcaagattcgtcagctcctagatcagctaagcattattcttaatggaatacagagggttgttggagacatctttgtgcaggatgcccatgccaaagaacccaacaaagtgataactattgactaagaaatgcctaagataaataaaaagggctatagtacttaaaaattttgggtatagatattggcaatgcaagttgggtttagataatatttatatgtatatatatagagagagagaatatctgtaaaagtaagctttatactgtatagaaatgtatagaagatcatatatgttgagtgatataaaatataaaataacaagacctacgtacctcagtcgattctccatttcttttaattgtaacctaaagcaaaggattagttgttgaatctcctgcaagtctcttgcaaatgatgaaacttgaaatagttaatgagcaaagccacattaaaccctctcccacgagagagagagagagagag

SEQ ID NO: 378428 - DNA, 4657 bp, Cannabis indica
ttctttttgtgaatttgatatgtttcttgtctgcagttagagagtaccatatccggtagatgggtacatcgtctggctctgacatccaccatcagtcatcatcaaaaatgttacccccgcgccagcagcctcgtcctggaggtttgcaaacctcactatcccttgtttcatcagatgctcggctgtcccctgaggaacccagatcaaactctgatcaaattcgcgagtccccgactgaaagtgccagttctcgtgatacatggcctgctgctgatctagttacggcaaagaagatggagaatggaaaagcagaaaatgattgccctgaacagtcagtcattcgccgtgtttcaagtgcagataagataactcttcgggacatagcaagtgatagggttgaaataatatctgaaaagatgcatcatctgcctgatgagtttctagaagaagtaaaaaataacctccgagttatccttgatgggaatggtggctcacaacatagggaggaattttttaatttgcagaagttggttcaaatgaggtctgatttaacagctaagacattaattagagcacacagggtacagctagaaatcctagttgcaataaacactgggattcttgcatttttgcatccaaatgtcagtctttctcagacctctctcattgaaatttttgtttataaaagatgccgaaacatagcatgccaaaatcagctccctgccgatgaatgtacctgtgatatttgcaccaacagaaacggcttctgtaatctttgcatgtgtgcaatctgtaacaagtttgattttgaggtgaatacttgtcgctggattggctgtgatctgtgttctcactggactcacacagactgtgctattcgtgatggacaaatatgcatgggtccagctaaaaatggggcaggcccaactgaaatgctcttcagatgtcgggcttgtaatcggacatcagagctgttaggttgggttaaggatgtttttcaacactgtgcacctgcttgggaacgcgatgctctaacaagggaacttgactttgtaagcagaatctttcacggaagtgaagaccctcgaggacagaaactcttcttgaagtgtgaggaactcaaaacaaaactaaagaatagtcatgtggattcaacagcagcttgccatgccatattgatgtttttccaaggtacgtattggataaagactcatgttgacttgcaaaagctttattaacttcacaacgctctatagataccccacgtgttgatatatggtcaaacagaatagttcttgaatgcattcccagtataattttttcagtttttgccttcagggttgatgattcttcaatgtgatggatttattagtcttatcaaaaactgtgcaagtattagttaaatatatatatatatatatatatatatattcataaattatctcacctttcagcttccatttgtatcaccacaactggaatggttcctttttttttgggaaatggcctcacaaaggagccaaggaatggtccttttgtacatcagatttcatgttgggaacttttgtttggtgctagacatcatcatgcccttgtgttctaacatagcatgggtgtttggatttatcagacatgaactgtaggattaattagtggacttattccttgaactttgacagtaatgcataaatttgccctttcagtgtgaaattatgtttcattggatgaactgtagaggcaatttctgaccacctcatattttggatgatgtccttgatgtagagcttgaagtggactccccaaagagcttggaaaatggagaaggtggacggttgatagcccctcaagaagcttgtaaccgaattgcggaagtggtgcaggaggccataaggaagatggaaatggttgctgaagagaagatgagaatgtacaagaaagcgcgactggcagttgaggcttgtgaccgcgaactccaggacaaggctaaggaagttaaagaactaaagctggagaggcaaaataagaagttgcaaattgaagagctggagaaaattgtaaggcttaagcacgcagaagctgatatgttccagcacaaggcaaacgaggcgaagcgggaggctgagaggctccagaggattgctcttgcaaagtcggacaaatcagaggaagaatatgctaccagttaccttaagcaacgcatgagtgaggctgaagctgagaaacagtatctcttggagaagatgaagctccaagagagctctcgaacatcgcaaagcagcggcggtggaggtgacccttctcagatgcttatgtattctaaagtgcatgaacttctatacagtggagctccaaagatggaggccctttcaaacgaacgccatccattcaggaagaatccctgaggattctttactagtactgtatgtatttaatttaactaagttgggatgttaaactaatgttaatgaaatgtgatattgcttcatgatgattgtcaaatatttaatttgtattgtgtaacgctaaattttttgcataactttctaagtatgtacatacatactaatgtatgtggacttgaatttgcaaggtatacgtttagctttactaagtgtcatgaactgagtaagaagatcaaagctttcaaatattattattagggttctcttttcttcagcgaaaacgcaaacattagttttacaaatgagcccttttctttggttgatgggctgaaactacaagagtttgaaaggatcattttgctgcaagagtttgaaagggtcattttgcttcttggcataaactcaattctagattattattgttagattagatcatttcacttcaatttcttcatcatttttttaggatgtttggtatgctatgcccttaccaataatctcatgagactgccttcttatgtctgtcactgtgggtattttctttcttttcctaagaagtgtcagtgtttgtgtgggctgggttccaaccataaacaatagaattaattaacaacttaaccaaagccatcttccgatgtaccaacttgttggaaaggggcaaaatacaatataatttgcattttttttcgaaaggatataattagcatttcatgttctctatttactttatgtgataaccaaccatgttctcatttttttggtaagaataaaactgttatagataactaaaaagttgagatacaacaatagacagcggagggtgagtaatctctaaccagatacaatctgtgtcactcgaaaaagtatacttagatagcttatgagtatcaatattcgccgatctataaacatgagagatttgcattcctaagaaatcggacaataaatttctaatataagtaagaatacaatggaagtttgaaactacatctagaggagcctggaatccttttgcaatcacaagggaatcgatttcaatataatgaactgaaaattgcagatccaacagtcattgaaggttgcaatagatggacatagctgtgagaatttctagtttgaaacatcctttaaaaggctttgacatggaaacaacaatatcacctctagagttgtgaaggatagctccaaaaccagctttacgcgtcattgtatttactgcagcgtcagtgttaagtttcagtctgcgtgagggaggaagtaactattgtggaggattgataccaggataggatactgttggtctgttgatcccagtatctcgctgcttgtttattgctttctaaaatttcgagatgtattagagagcaaaacttaacaaaatatcagctggttttgattattttccatgaaactcgttgttctgttcaatctagatactccatatgatacaagccacctttatctaattcttgttttgaaagaatatttgaaatatggaacaaaacagctttgcaagaaccattaatgtcaacaccaggtggaattttgaaatcacaatctccaaaccttttttgctcttttacgttcaaataaagtgtggtaagcatttttcagaatggtagtggtaaagagagcaacaacttgaatggataatatgtttcttatgaagcatggctgcatcaggggtcatgtcatggataacacgtcataaaaatcctcatctttgaaggagtattcaaagactaaaatttagtctactaacgagattcagatgtggagctcgagtcgttatcaatctttgaatgttgagaagcaatttaatatccagacttaacaatataaattccattggtagtgtggctccaaacaagctgatcttggtgagggagaaaactaaggggatatcgagaatacgttgcacatcaaaaggcaagaataggttgggaagaatagtggtattctaacacttatcatgtgtaatcagatttgagactcttgtatataggcttgatcccaagtacgaagacgtgaaagtctaaggttttctgccataaataaaacccatttcaatataatcagattgactaattaataaaagatcataaatcattttatattgcatgtttcacatgatttatttcattattatatttacttaatgtatatattctattaagtccaaaacatatatttattcatgctaatagtgttgtcagcacactggaatataatcatgtttatatgttcaaaaattt

SEQ ID NO: 378429 - DNA, 6250 bp, Cannabis indica
aagaataaatatttatatgcattctataatggttattataaaatgtttatatgtaatttaattaaactaaagaaataaaaaataaatgatttaattttgttgtcacaataatatggtaaaagctttctataatagatttagtcaaaaattaatatttaaccatgatgactaagagtaatccattaataacataataaaatcaatgatataaatataacaagattaaccaattaataacaaggctattaaattaaattagtatacacaaatttattaaccatatatataacttgtacataaagaaaatagttagaaaaatacacaactttttgtaaatacgtttttttttgcacatatagtataataaaatttgataattacctattgcaataaattttctatatttttcattcaacatatgagaaatagctattattcttttttttttttttttttttgatttgtaagaactttcaagaaacgatacaaaaaacaagaaacatagcagccataaatgggggctagctcccagaacaaacaaactaaacaacattagacaggctcaaatgatcgattcttgcttgataagcaagatgatccgccaaagagtttgactcacggttaacaaacttaaactcgccaattaacatagctgacaacttaagacattctttaaaaaccgggtaagagccccaagccaaaggcaattctcccacccgcatagcatcaactgcaatttttgaatcagagtgaattgtgattgagtgaaatttctcctttgtcgcctgttccagagctgtaagaatggccagtaattcggcttcaagaacacttgtgacacaataaaatgattggattttgtgtgcctccccacctcctgaccgatacattacaacgcctatacctgcattcgaacaaaggacagatgcatccacaaagtaactagcatcagcacagttcgctgtatgcaattcagaagttagaagtccgttgacatcagttgtcggagcttcatcattcggggtaagaaattggctgaattccaaggctcttgagcttatgttcttcaaagttaagggaatggcagggcttattccattgaaaatcaagtcattcctgcatttctaaattgcttcaagaatgcaagcactcagttggatcgaccattcactatccgagttacacagccataagaaaaaatattcaaagctgttcaaaaccagtacatcagttttcaaaccccacgggcttaggaaccagatcattcgagcaaaagggcagtgacagaataagtgcaactctgtttcaatagcatctccgcaaaacacacattgtttatcgtccattctggtgaaacccaagcgactcttaagaggtaagcactcgctcaggattctccataagaaaaccagctgtctaggatgaagttttagtgtccacagtctcttccaagcgggcttttcctcatgaaaccgaaagtgttgagagagccagtatgttttcttgaccgaatactttccatcagctccatgcttccagaacagcatatcaacatcatcttccaggggccttattgacaaaattgcagctgcaatgtcaggagcaaaacattgtttaatgaggtcttcatcccaggttctagagccaggttgaaacaagtcagatacgaatgtgaatgagtgagtaacattataggaaaagctctgttggatctcttggggactaaatcctggaacccaaggaaccgtccaaatgtcaatatcccccttcccaaccaagcatccgacaccagcactgcaaatgtttcgagcttcaagaattcctttccaaacaaacgaatctccattacatttttccacttgccagaaattagtatttctgcaatatttagcagtaagaatctgtacccacggtctgtcactattgcacatcaaatgccaagctaactttgaaagcaaggccagattggtgtcatgaagccttcgaatgcccaagcctccattcctcttgggttgacaaatatcagcccagctcttgtatgctaaatatcaattatttgagtgactcccctgagaacctttccaccagaacctggcaagcatactgtcaatgtccaagcaaatagatttgggaatcataaaagtagtcattgtatagcaagggatgctactaagaaccgaattaatgagggttagtcttccagcttgtgacaattgttttgctttccaaccttcaagctgactcagaattttttctttaatgaaactaaaatcctgcctcttcctagccgatatgaagaaaggattgcccaaatatttctcttttttactaaggtaggacattcccagaatactgataatcttccccttgtcttcagccttagtttttggagaaaaaactacgccactcttgttcttgctaatacattggcccgaccatctctcgtatttctcaaaacactaaagtagagttgtcacctccctagtattagctttgcagtagaaaattgcatgatcggcatagaacaaatgggtattaggcattttattctaccaatcctaatcccagataactctttcttaagctccgctttacacaccaacttcgataggacttcactacagagaataaacaggtaaggagatagagggtctccttgcctcaaaccatgttccggatatatagatttaagaggggctccattcagcaaaacagagaatttgaccgaactcacacattgcataatgagcttacacgcctggttcgagaagccatttgcctaaagcaccttaagtaagaaatcccattcaatgcgatcataagctttatgcatatcggtcttaactgccacaaaaccattcttcccttgaattttcttaagagcatgaagagccttcaaagctaggacagagcactccgctatccatcttccctttaaaaaagcagactgaaatggggatacaagcttgtcaaggattggcttcaatctgtcagtgagaatgcgggcgataaccttgtatccgaagttgcataggcttataggcctgaattgttcaaattttgaagggctctcacacttcggaatcaagcatataaaagtatgatttagatcagatgccatgagacccgagagaaagaattcctggatcatactgcaaaaatcttcttcaattatggtctagtatttccgaaagaatatgcctgaataggtcccggcgcttttaaaggatgaaaatgccaaaccgcatccttgatttccagaggagttgggatcctacagaggtccgtattttcttgatcaagcaccttcttctcaaaaaggctatcgaactcttcttgaataatcaaattcgaactcctgtacagatccttaaaattttcattgaagtatcgaccaatctcctctctacttcgtttccaatccccattaattccctggacagcccaaatttgattacgtctccttctgatgatcgtcgaagtgtgaaaaaacttcgaattgcaatccccctgggtaatccaccactccctcgatttttgcttccatatgcgttccatctttttttccagcgagataatctgaagttgaatacttctttcttccccagtgacatcccccagagccgattgtatcatggtaagtctgttgtacaagcttttaagttgtttatcacaaagtccgaaggtgttccaattccactccttgagagcatttcttgttttactctgctttcttatcgccttgaagcttcgatgaacctcacaaggatccttccaaactttttctactaattcgccacacgtttgatcactcgtcgagacttctaaaaacctgaagggatacttcagtttgtgttgccttaaacaagtatcaagaaccaaaggggaatgatcagacccgagaattggatggtgattgaggctagcctttggatattgagtgcaccaatcagaacttcccaaagctctgtcaagacgtttccaaactctgttatgattgtcacgagcattggaccaagtaaaggccagtccaatgaagcctaaatcaatgccccctgtctcgaaaaggaaattctgcaagagcattccttcattcttcccaacttttcgtcctccacgtttctcattgccatcaagaataacattcaagtcaccaattacggcctacaactttccacatctttgaatcgcccttgttaacatctcccaaaaaccagctttctcccgaggataagaagtgccatacacacagtataagtaccaagtttccaagccaaatcttgggttaacagccaagccaaaactcgagtccaaactctcatgtaaacgaatatccactcctcttctccaagcaacacagaatccaccagccaagccacttgtcgggatgcaaacaacatttggaaaccccaaacgattgcaaaacattgtcatgaaccccccatcgactttcgtttcagctagaaacagaacatccacacacgtcccccgagagaaactccaaagagttctctctgccgccgatcttcggagaccgcggcaattccaggataggcacctcataatgatggtgggggcatgctttgggccgcctcctcgccctccccaaaattttggacaaaagtaattggaacatcagtacactgagctaggatttcatcaaggttaccttgtaattctgtgttatgtttctcctcttgtgcccttctcctacgagtcttgacaccaaaactctgttttttcgccatggatcttcgagcacggtcttttttaatttttcttgttgcgcattcatcatgaaggactgtccccggttcaaacttgcgtgcaactcctggattccagctactacaactgcctccatttgtctcctccaacagtcccgactctccattatgaactccaaagggtgagttttcgaatgtatcaggagaggggtgataccacgtatggacctttctcttctttgtcccaagcagatggttaatcaattcagatacagagggtggatttgatattagagaaggttgtgctttgtacaggtcaatggattcaagccccaacagttgtgagtaaattttttggagttctgggtcattactaggccctcttaaatggataggttcatgaaaatgatgatgctgttgggatttacatgtccaaatatggggaattttaaggctttgggtaagagtaggcccaatatcaggaattagactttcagaggttggaagcccaataggataagcgaaatctggtgagggtaattctttgcacatagagaggggaatattcaaattcacctttgtagtactggggtccacagcttttctaattgtgcaacgatcctttctgacatccgtacccaacttttcctttcgtgtgttgccactcttctgcatggtagtggcagtaccatgcatcgtaccctccatagccggagctctgtcaccatgggttatcttttccggcctctgttcttcctctgttaacagatttttttggtctcgagtctgcaaatgcctcttccaggtgcccttcttctttaaaccttgaaaggccaatccttcatcattcaccaatatgtcacgttgaatagaaccagcagtgaaacagtttcctcggggtccttcaacctttatctagggaccatacatccggaccgccggcccagaagtcggggtcacccatgccgttggcttgagacactccctgttgaaatgagcaagcattccacagttgaaacaaaggaaaggcatcttttcatatttgaactgaatccaactccccgggtttgcatcagctttgaaaaagaaaccagcttggaaaggatgttgaatccaaacatcaatcaaacatctcaggaatccccgtcgaacaacatcttcctttttttcttccatccattttcaccaactgaccaaccttcttagcaagaattgggacatttgcttcagaaagacaccttgtggggagtccatggaactcaacccagaatcttgcaacttcgaagtcggccattcgagcttcaccttccactggccagggcttgagattcagctaaactccattgattagccaaggtcttcggttcatgatcatagtgaaatcctcttcagaatcaaagaaaaaacccagaactccttcttcaaatttctttattttccaatggttctttagattccaaatgcccaccagagcctttcagactacagaagtgttaggttttatgccctaaataaaactcttt

SEQ ID NO: 378430 - DNA, 2056 bp, Cannabis indica
aacactgctttctatattctaaactattctgaattttttcaaattttataaaatatcttacataagtataacatacacgaatatgaaaaaaaaaaaatggactaaaaatttcttctaaatgctaaaataggtagagggtgcatcaaggaaatgtattgtcactacaaaaaaagaccacttttattaacaactttttagtcagaacaaaaaaaaaatgtgagcatcaaaaaaagaaaacctttgggtgaggtggatacatagtgtctacctgaagaaaaacaaatttggtgggactataacgcctcaactataagtagttggtattggaaacagattgtgagaatcaaggaaaaaataaatacttccctcaattccagctgcttatggatcgggtttatagtatccaaaaatgctacaaagttctgccagaagatcaaattaaagtgagatggagccgagaggtgtggagcagatataatgtgccaaaacacagctttataacttggctggcaatccagaatcttctccaaacaagagacaagttagtgaactataagatttgctccgaagatacttgtcttctttgtggtgatagcccggagcaagtggatcatattttttttaatgtgagttcaacaagaaatgtcttgataaactcaaggactggctgcaatggaggacaggtacgtgctcaatgaagaagctgctaaggtggatctcgagatgtaaaatatcaaaattcaagaaaaaagtcttttcagccatgcttgtgggtttgatttaccaagtctgcagcaataaaaatgattgcttttgaaattacaaaatgcaaacaattgataggtgtgttcaagaactgaaattcattattaaaaataaaattgtaagtgttagaaaagggaaaattgctcaaatagatatggaatagtttgagtctttgtaattaacaataggagattggtttttttttgtgggggggaaaaggctgctgtagtagtttgttttttggagctgataactttgtgtaattggttattgtaattggtttggtggaatataatttatcctggttcataaaaaaaatgtgactaaatgtaacttttagtcacaacaaaaaaattacttgtgattaaacatagtatttagatacaagttgtcactaatttagttttagtcacaacaaatattgtgactaaaaacatatttagtcacaataaattgtgatttttgtgactaatatttttagtcacagactttctagtcataacgtaagaatgacagtttataaagtcccaagttttgttgtaactaaaattaaaatttcacgaaatattatatatatataacccctacaagtgggctcactacaattaacgatcaatatatacttaatgataggaaaattaatattcgatcaatatatacttaatgataggaaaattaaaatattaattaattattatgtatagtaacacccatatgtacgttcgtgcattcttttaataattttaattatcattaattattagttaattaattaattcattgggtgatgaacattatgtttccaatttctaaattctaagctacactgaccaggctgctaggaaggatctactagctttttttgaaggatctactagcttaattaagtaggttcgtgtatctttggctttaattttgtatgatctctccctacgtaaacacgctcttatataattgggttatattatttataagttaaaaaaatataatattgaagattaaaattgtaatccattacattttattagataggataatataggaattctacaatgtattctttgaaaaggatgtaccgatacattcttatctgttttggcataaggaaaaaaattatagtctgaattttttttatgattttatacgttgtaattatttaagacatcttgcaaaattttgagaaatttaaaaaaatttaacatgctaaaaatatggttcaaagagtctgttgcacgagtaacttttttattttatatgagtgtaaaatagacggtttgaatattgatttcta

SEQ ID NO: 378431 - DNA, 2442 bp, Cannabis indica
aaaaaaaactttacataaatattgtctatgtttctacgaaggcaattttttagtggattatattggtcggaatggtggagttgtattattatggaagactagcgagaaagtgcaattgactttgttttcttcaatcacatcgaatctttgatttttatcgaaggttcaacctttttagaggttggataggttctataggcaaccaaatagaagtttgagagaaatgacttagaattttctttggtagctttggggaggtaggtctttgccttggtgtgtgatcaaggatctaaaaaatatacttaactaagaagacaggtgtggcgagtaaacatatttgagtaggatctttaatgggtttcaacatgtgttttttaagtgtgtcttaatttatatggatatctatggctcttaatttacatgggagaagggtagggggactacttgttgggtgaaggttaggcttgatagaactttggtctttcttgactagttagctctattatcttttgctaacttaattaatttagagttatcttcatctaatcatgggagaagggtaagggaactacttggtgggtaaaggttaggcttgatagaacctttgtcttctctgactagttagctcatttttttttttgctaaattaattaatttaggctagagacttacggtaggtgaccaatcctcttagtgtcgtatttttagagctaaatattttctccggtcaatttttttctggtcaacctctctttccccctacgtctcattgttggtgaagggtatcctttctatgcgtgaattcttgtagaatgaagcttgaaatttgttggcaatggaatgtctgttagcatttggaatgcttcttggattccatagattaattgggagcaatattgggtttcccttaagtcttgagatcagagtgccttgaatatgctccatggtcctttttgatcaagctcattattggaaacatgatgctcttaagacctggttggttcctagtttggctgggttcattaattttgttaagtggttgccactcaggtcttgtgatgaacttattttgaaggactcctgtgatgctaagttcttagttaatattgattatcgcttccttattatatccattggcagttgcacctctcctcattggaaggaaatcatggaatgctccagttcatgagagagtaaagttctttctgtagaaagtgggaaggggcatctttccttttggagctaggctccatttgatctttagaaatgattttagttgttctatttataatggccatgatgactttatcttccatctgttctttctttttcctttggcatctcagtcatggggttagggctggttttatatttctttaccaattttgcctctcttctttgtttctctctttggatggccaggaacaaagcctttcatgatggagttgttccaactgtctttgggattcattgtattgtttctaaggtcgttgtagagagcttgatggtttgtcctaggaaatttctattagcttctcggtgggggtgattgtgtgtatgacgtgatccctcaaggtcccatgtgattgtggttgatacttctcgcctaggtctgaaggcttttggggcagtggtggtgtttgatactattggacggtggttgaagctatttttgttaagcttcttgttgataatgccttgggagctgaggttgtgacccttctccatgtagtttctttagccttgcgtagaggttggtcgtcgcctgggttcctttttgattgtcaagttttgatcaatgactttgtgcacaggtcgtcctcttgttggtgtgagaggagtggctctttttatctttttagttgttttcttatttgatttgttgcctagtgcctctatgtgatgtgcacacctaggtctcttaatattgctgcttgggcaaattttgaaaatttttatggttttctttcgttaaggaagtagaaccctttgtttttactaatgagcttgtttgtttttactcttttgtctagttaaagaagtttttggtttatatatttatttatatttaaatataggctaattaagaattttttctcctaaactttgacatgtactaaattatgttccttaaacttttaagatcgttaaaaattctccccgaactattgagattgttagatttaaggatttttgtctaattttagtaaaaaaattccaacatggatgaaagttcagggagcatgatttagtacatatcaaaatttgaggggcatgatttggtagatataaaagtttggggagcatgatttagtacataaacaatcactgaaacagtaaaattgaatgaaattagacaaatatccttaaatctaacaatctcaatagttcagagaaaatttttaacggctaaaaaagttcaagagacatgatttagtacat

SEQ ID NO: 378432 - DNA, 3521 bp, Cannabis indica
taatgaagataaggtgggccagacccactttcgtaagaccttctaggaacgtacttcagctccgtgatcgaataacgtacctcttgtcagtaatagtccagtctagaaggaggaactgtaccataatgccagaaggattagacagtgtgttccatgaagactagtccagatttccttttattcttgcgcacagataagaaaaaaaattaccttacccaaatcaacgaacaaagattgtatcatgactaaataggtaaaacttaactaaaatagaaattagacaatttaattcaacgatttaattcgacccacaattaccatgtgctttaattgtggcaatcaactgtgaattaattgcttgatattcatttcaataagttttcccatttaatctaatacgattcttagtcgagatttggtagctatgatttccttagtttgtgcgcaagactaaaaaggaaaaatggaagagtctttcatgaacaagttgtctcacccctatggtctcatggtcccaaacttgtttctgggaacgattctccaatggtggatggctctatgatcacagagctgggatacgtttctggaaagactcgtttaaatgggcttggcctactttatcttccttgagggacccactcatgggccttggatgctgacctggattccatgtgtccactactggaagtgtgaataacatttaccaccaagctttcaaaatgttgcgtatggtggaagcttgcttcactccttcaatatggacatgtggaggttgagggataaattcatgaatttctaggtgttactcgatcaccgaaggtgaattttgtctttgatcgtaatacatccacgtgtcaatctcatagtggtcgaggggtgcaactatcgaggagtcgctttccagaaacaactacatttcaatagctattcattttttggtgcaaatattgaaaagtagcatcttcatcattaatttatgcctcgatcttggggaacattgattgcggagatatgtgtggattgtggaactccttggccgttgcatgaaacttatgaatctggagattcgatcacagaccatctgtcttcttttgcgtggattgctctttctatgtataaataccttttgtgaaatcaagttaccacttttctcttgttttcaaatttttacccttcaaagtttataatcttctttgcatcctttaaggttgaaatctgaatttagaacccagtcgtcttcttcaacctgtaacatgccatagacttttaccttcgtctgttgttgaggataaaggcatgagaattcccacatcataagcccccaccgatcaagacttttacagtaggagaaattgcaaacttggatttcatcacagaaattgatttgctaattgaacttcctcaaccagacccagcaatgattaccctgacatctctgctttcgataccaggtacgtggtttcttcatctctaaactgtgtttttgggtttgctgttataagtttggcatgttctgaataaggatgcgattagagttttttatttgtgtgattgtcatcatagatagatttaggcactacaaaccattttattttttgaatttagaatttcttgaaatcaagcattttgtagcaaacatgctagcagaattttccccacatccaaaatccttctagttttgggctttacattaatctctattatgcttttgttctttatcgttcatgacttcatatttagaatgaatgactcttaagagttcttgtttctggatagttagtctagttaggatctctccaagtagttcacgggggaggacccccagctccctttctatgttaggtggttagggtggctgattgcttgaattttcttcttttgtacagaaatcatgcctagacagactcgtcgaaatgaagctaactcataggaggagattatggagcaataaaagctccaaatttgatcctagatgatattccattagagatggaccaacacatgaacaagtttaggatctaaaaaaatttgaggaagtacgagacacaacgggggctcgaaagtgttccagggatgttctagaacaggctctctgttcacagggaaatgcctagtaagtgcgcaaaaggaggccttttcgtttggatctgggctcatgtcaaaatgggtgcatatttccctaaggtgttactttgctaacttctatgctattgccgaagtagcaactttttagttcatttcctaggcataccgtatattgtcggagtggtacgcttactgtgcttagcacaataagcctatgtctgcgccagaggtgatcttatatttctaaaagatcaagtctcaacccatgagaggctacaaggagaaagtaggtttttacaggctggaacgctactttaggagtgttccttgtcctaccagctccacgaaagacatgcataattttagagattactacttctaaacctcgggcttctcgttgaggagggttcacaccctcagtttggatttcaatactgtaattaagtgtcattcccttccttgaactttaggattttgttcctcctcctatttgttgtattctaatacattttttacatctgtcagactcccttcctcggtcccccttgactccagagttggaagagagtgtagctttctataaatccttttttctaaggaattacaagtagaaggactcgtgcccactgagaagttataaaaattaggcctcatcgttccatatcacgatatggaagatctttctgtgaaggaaaatattcaagaatctcttcgaggggatccagaagatgttaaagaggctattacaatcataactactaaggaggcctaaaaggcagtaaaggccgacgagaaatggctggcaaattggaggagacaattcctaaaaaatttgagtaaggctgaggaactcactatcagatttaaggaggtagtgcaaaatgagggtgctatggaagtgagcacttttggtagtggtgagacaccctttcatataatcagggctcctactttagttgacttagataatattgaccaaggttgatttgatccatacttgatggaacttagaccaaagtagatatccttacaatagattcatagataaggtagattatattgtaaggagtcccaaccacttcattccactagtacaccatcattttagaatggacgtgcttagtatgatttgcttcccaggcttcttccagcatgagactaactgaggttgagaagacattgcatcagggaaaagtcaattattctaaagttgacggtttggatctttctaatgtgttgtttgataatttgttgcaaaaatcatatcttttgacattgccttgtgtaatatatattttttttgttctttgcagatcaactggctaccttgtagatgggtatactcaatgggtccttggacaatatcatattcagatctgcagtggttagagatatttctagggaaggcaaggacaagggcaagaaaggccaaactt

SEQ ID NO: 378433 - DNA, 3682 bp, Cannabis indica
atttacatgtagatattgctgtatgatgtcaatcaaattactagccctcttgatacacttgactggtattgattgcgacttagctcttgtagcgttccatactccaaaaagaaacacccgtttggccattaaaatcgtctccaatcgatgagcaatcaccaacacctggttgtgacagtacaaacatatatcagcaatcaagattattctttataactctttctttggtggggttaggttgtactagtaagtgagagctagatcgagatttcctcgtttacttaactgtatgattctccatcaaccgttccaatgcttgtctcactaataactcggacctgctatcaagagcagaagtagcttcatccaatatcagaactgaagatttttgatagagcgctctagcaatagctaatctgcatttggaagtagcatacaaagagatgttagtaaacgatttctgaatcactaatcatggccgattccctagcgattgtgctcaatgttagaaatcaaagagttcgagtttgacttcaacctttgcttctggcctccactcaaggttgagcctcttggtccaatgttggtttcataaccttttggaaggtttcgaataaattcatccgcatttgcaatttgtgctgcatcctttaccatttccatgtcaatctctttcatcaaatcccgatacccaatattttcagcaactgttcctgaaaatagggtctgacacatcaagagatttaaccattagaaattgccatatttggtgcatgggaacatgcaatattaaaccttttcacttattaactaacaaactcgaaagagaatatagatatttcaaaagtaagagttgggactagggaatcactcactatatcctgagaaaccaagccaacatgtctacgcaaactttccaaccgaatgttttggatattctggttatcaataagtacatgacctgttaaaaatgaacaataaataaataaacacctcaacatatgaaacaaggagcttcaatttctttcgaattctacttcacagtgaaatgtgataggtttgaagaatgttttgggatgtgaaaaagtttgaagaatgttggctgttgccctcacattgaaaggtcaagtattagcgagcctcaaggttcaagaaataaataaagaagaaagttatggctcaaaaagtagcagtatttctttccacatagctcaccagataaaggatcataaagtcgaatcagaagctttgcaagagtcgtctttcctcccccagagggcccaacaagagcaactgtttctccagccttgattttcagggacaatccgttcaagacaagaggcatattctctccatacttaaatgatatattacaaaagtgcacctctcccataacattgttcaaatcaactgcatcaggtttttcgactacctgtaatgagtaatcaaaaaagactaataagtgactgctcaaaatgtacaaaatttaccttctactaaaacaaaaataaaatataatttacctttggtttgaacctggtaaggtcaaacaaacgttcaatggccggttctccttgcttcaactcattgtatgcttttccaatgccctgcgtgattctttaattcagattgataacttaagacagctccttaattactggaccataataacaatacagtgtattagcaagatgacctagaaatgacccaaaatggagaggattaaagaaagagctcaataaactactactgtcagtaaggaatggagcagaacaacttaaacacacaaaataaatggtggccaaagagcacaagtccacaactacaaggcttgttaaggcctgaaaacacatgcctaacttcaacatgaaccaaaagaataaaaaacataaggatgtaatgaagtttccagcatgtaacattacctgaattggttcaatcaaaaaaatcaacgacgttacaaaagaaatcatgtcacgcccatcaaaagaacttcttgaaattgccaacgaacaggcacagaagaaaactaaggatccaaaatacataatctgtatgatatgaggaataagagccttcattttcttcttctttaaccgttcagataagtcagctttagcaagcctctgaaacctagcattctcacactgctctgcattacttgctttcacaaaaagaattgccggaagaatctacggaaagagtaatgctatagtttaatacatgcatcttgaaccagacacaaattaacactaccccaacagaaaggcagaagctttgacagttgggtctcaataaatgcaagtcaagattggcgatgattatcattaaaccaaaatagaaacctcatttagataagctgacaaagcggcaacggtaatatttgcgttcttagaaatcatacgaagtttctgaccaagataagcaacaacaaacaccatacaaggtatcacctaaaatttaagaaacataattaataaaacttcataaacacaaaacttgttgatttaaaagaaaaataatactgatacaaatacaatctactagctcttttcctcaccaatgctgatatagaagatagcaaggggcttatagccaacatttgagctaccattgctgacagttgtaaagtacttggtacaatagtctgtcctaaaatcaaacacaaaatcaagtataattcaatagataacaagaaaattaaactcacaaaccgaaaagggtaaccttcatttggcgccatttttatatatatcaaaactcacattgagaagagcatagacagtgtctgcaacatccgaggcctcagcagtaatcctataagcaatatccccggccaaacctccaccaccttcgaaaaaatccatgtccctctgcaaaatcttttggaaaacccgaacccggatttcacaggtggcactcaaggcagcgttccatagaaacgcttgctgcaagtaacaggccacgaaccgcgccaacacgaagagacccaacaacaccaaaccctctgagtctctcaatcgagtgaacccattcaagtttccgagagtagcagggagttgtcctacgcaaggaacgatcctggagagagagtagaccgagacgagactgcagagccagccgaagagaatgggtctgaattggggaagaatgtaaggatggagggaattgagggagttgaaagtttgggagagggaatgaaagtggagggaattgaggggtttagggttttgggttgtggtttggttgggaaggagggagaggagtctggtgcagttacggagcttgggagaagtcgaaagcgaaagattgaaacttgatgaatgggttttggatttggatttggataacatgatcaggtaaaagggtttaggttttggattgaaagtgagagagggttgtggtggagaagttgaggaaggagagtagatcaacaaggacatgtttttttttctctttcttttttgtttgactggtaaagttagggactgtactgtactgtactgtacggacttgagctgaccttgagggagctcagctgagtagtactgagtagctcgctgtgtttgggacttgttctgagctcagcaaccaatcattttcgtaaaaattatctttataaaaaaggtaaatgctgttataaatattaataattatgtgatgtccaaatcttttatttatt

SEQ ID NO: 378434 - DNA, 2864 bp, Cannabis indica
aaaaacaaattttgaagctttaacgagtaaaaacattaaaaaagaaaaaattaagtaataaaaatagaaatgtaaaactttgtttatataaatgtaaaatgtaatgtcccttgctatagtcatatttcttttctctctaacccaataatcaccgaagagagagatatgaagacacaagatactctcccctcatcatcttctcaccgtgaaagcgatagcaatggtaccgaaaaactccatgccaaggtcgttggctgcatgtccggccttttccatctagtctccaattaccacggccgccgaaaattacttacattcggtacttaattaattactctctctttcactacttatttgcttctttccttctttctttctttgttatgtatatttctttctccaggaaaaaggcaagccaaaaacgagcttgttcctactactgctacaaagtcttctaaatccatagataaagaaaagaagcaaatcagctcaacaaacccctcctccacgaaaaaatgtcacccagagacactcctgcgaggtaccgaggagccctactttgcctgcggagattaggcggtactcagttaattcgccgcataacttcaaatcagcctcaccagcaggcctagtagcgaggctaatgggattggaagagccttattcctcaactactaagtccatgatattgtcgaaagctaacactgtgcagcaacagctgtcggaatattcatccgccgccgaaaagcgccggcaacttctgggcgccttggagaaatgtgatcgggacttgcaggctctgaagaaaatcataaacgccgtgcgatcggcggagcaattgcagtcacctaccgcttccgccgctgtgttgagaaactcggatggagttaataaaggtttggaggttcatattaacaacaataataatcataatgctgacaagccgagtcgggtttcagttcttgacgagtccactcggtctcctctgagcaatttatttcaatcaaaacgacagtcgttaagttacggtacgtgtttgattaatcttaatagtatttgcatgaccaaatttttatctttactactgagactactatagagcactaacacaatcacacaataaagagtgcggtctcaataactaagttcaattatatatatttgaaaattttcattaatttttttttcttgtggtattttctatttatggagatatatgtatatatatatataaatatatttgtagataaagaaaaagaatcagaactaaaaaaaaaatattattaataaaataagaaggaaaaaaaatacagagaacgggaatcaacaattaattatctagaactaaataataatgtgtgatttttgcaatattcttatcaatatatttgagtggtaaatcattctatatcatggagtttagttttgtattgtagtagtctctgtgtgtgtgcttcctgaattgtgtgtcaatgggagagtgctcttctactgctctgttaacttattagaaccgtaagctatagaaattaatttcagttagtgttggaatgttcctaatatacaatagaaaagtgttacatttggaagttttagggatgaatgaatccatatccttgtagagaaacgagacagaacaaacttttttcatgtaaaaagtaatgaccctgccccaccacagtctacagtccacagataaagcgattttagtattccaagtaagaaataattgcatgcacttaattttcactcataatcatataacattaacattatttctagttagtgggggacagtgatttttaaattactatttgtaattatatatgctaaaattaacaacataggcaattagtttttgcactaaaaaaattgacaacacttagttattaacataaattatgtataattaaacataatttttagtcacattaaaaaattaattaattgtgactaaaaatataatacttaaaaattattagtaatttaattttatttattataaatattgtgactaaaaatatattttaatcacaacaaattatttttgtgtgattaatatttttttatttttaattataaattttaatatggctaaaagtaaagttttaaaattttgaatagtgttgactaataacagctagaagaataagacataattacatattatacatagagctgtaatgattgatataagatgtgacattattgttaaaaaatttaagttgtgttaagatctgtgtcaaaatgactgtgaactgtttgttcaccacaaacatagtttgctggcattcaaagcaagaaaagaaaaagaaaaaaatgtttttgagtcacactgcagaaatgtttgtcataattatgaaccaaaaagtaagaattaacaatagacgactaattgggtagggttaaattcaggagagccgtttcccaatcgctttatataattaggaaaaatatcagctcagacgattaatcagtagtggacctagattatagattatttgacatgctaattgaggggccggtttgtttgtgttattatctttattacaagttgttggtatttggtaaccactgactccttttattatggagtcaaagattatttcgagagagagagaaagagatgaaggcagctttatatagtggcatgtgtttcatgacccctcagtctctctatcacttagaaaagcaaagtacttgttgtaaggtttccagctgcatgcacttttgtcacatgcctgggctggctgcctgtggttaaaattgagcacactttatatcaatacctataatacccttttctcttcttttctcttctaacttcaccatccatactctctattcccatccataccgatggt

SEQ ID NO: 378435 - DNA, 1220 bp, Cannabis indica
acattattatttttgtgagtacaagtggatacaagcatgtgcccatatttattatgagacaaaaatatagtcaatgtgcatacaataaaaattatgaagttgatttgctatgtttgaatctccaagggccattgatagctaactgggacaagtttaagagcagatttcttaaagattgtaaatccagccccctcctccatttcaatatcggactccttcatcccaactggcaatttccaatcaaagcagcacaagagattggctagtgtgaactccaccatagtcagtcccatagtcatccctgggcaccctcttcgacctgatccaaatggcaagtactcaaagttttgccctttgaaatcaatggagttatcattaaacctttctgggatgaactcttctgggctatgccaatatttaggatcccttcctatggcataaaagtttacttgaatgagtgtttttggattaatttgatagccaccaaccttgaattgagatatgctttttcttagcaaaattggtgatgcagggtgtaacctcagagtctctttcacaaccattttgagataatgaagttggtcaatgtcactttcagtgatcataactttgtttttcttcaaacaataatttctgatttcatcttgtattttcttcatcacccttggatttttagctagctctgccattgcccaagttactgtgatcgaagctgtgtccactccagcaacaaatatatcctaaaacatataacatgaaattattagctcaaaacctattgaagtttaagaaattaggacaaagtttatctatatatgttattaccatgatgagtgccttagtacaatctctagtgaaaggttcttcattggtggagtcatcttcaccagtctccatgctcagcagcaaatcaacaagatcttctctccctttttctggggtccgatttagatgctcagcaataacaatttgaaagaaatcatccaattcacgaaagatattctcacatttggcatgagcaccactcagtctatcaacaatccatcccacatgaggaaacagatcagagaacgcaaaggttccgacgacacccattgcacgatgaatcatttcttcaaactcgtcgctgtcgagtccacactcaggaaatctcttcccaaaggctgtcctgaaagtcatgcttgccataagagtagacatcttgacactgagattaacag

SEQ ID NO: 378436 - DNA, 1895 bp, Cannabis indica
ttttagcatttctcttaagtaaaacacccttaaaaatcatattaaatgtaaattattcaggacagtttattctcatttagcctaaaaatacaaccccttaccagaaaaaaaaatgtagtcagtctttccatctttctctgttctctggctctcccccacactgctgactgctggcatctctgtcttcctctcggcgtcgttctccactcaggcgcatagtgtaaaaatgtttttctctttggtctatacactctgaaaatgtttcttcttcattttagatttacgaatattattagcatttctttctaacctactgatttaatttccttggcttaacacattggctgaaagctttacttatatatgctccatcatgggaataccttatatatatttatattgatttcaggaatggtgtatggctgtatgtctcctctatctatgtagacgtatatatatttttgattgcgcataacatgtttgacaatattcctcactctcatatatgaactcattagtttttattaacattattgtacaggtcgatttccatccaagtttggtttccaagtgtaatatgtcttgtagccataaaacatggctattcgaaagacaaaactttggacatctcttgtacatatttcttatgctctcctgcaatttcgttcagcatactccgtctcttcaatgcaaatggtcctccaagagaaaatcaaacaagcagtgatggtgaaaacctatgagaaaattcctgatctcctcacatcctttgatcaagctcgccaaaacccaaatcctttttctttcctttctgcccttccactgatgtctaggacacagataattgatgaaattttgcagtcattgattcctattagacctcgctccaggccccaaattgcttatgcttgccttctttcctacactttggaaagccccaatcctctccctctttcccttgttgttctccaacgaactcttcgttcaggttgtgtccctgtcccccaaacccatcttgctctttcttctgtgtggctgaaacactaccaccacgaacctcactccatccaggacatcttaaaggagatgaaatcaattggatacaatcctgactgtggtacttgcaactatctcatatcatctctatgtgctgttgatcagttggctgagggagttaaagtcttaaagggtatggctcaagcaggatgtatacctgattcagagagctatgatacagtaataaaagcaatgtgcaaagtcaggaggacagctgaggcactagacatgattaagaaaatggtccagaaagttggattaactccaagacagggaactctagtaaaagtagtagcagcattgcgggcaaacagagaaatgtggagagcagttgatatgatcgagtttttggagaaggcgggtcatgttatcggctttgagagctatgagttggtggttgaaggatgtttagagcgtggtgagtatattttggcaggaaaggtggtcgtagggatgacaaataaaggatttctcccatatattggggtgagacagaagcttgttcaaaggttagcaagtattggtgagtggaagcttgcatgtgatgtgcggcaaaggtttgcagaattgcagtcatagctttttgtatgtgttttccagcttggtctctgcaatggtcactgaatatagtggggacatggaaattaggataatgacatgtaaacaaagcttcagttgaatatgacattgttaatgctgttatagctaaagaaacttgtgtccctaagttaaaatcatgttatttactaaagcacgggtgaaagccacaccagctctttttgtacgccatcttcactatgataatgagtgcttagtattactatgagatggcgtcttat

SEQ ID NO: 378437 - DNA, 2296 bp, Cannabis indica
gtatcgtacacgtcactaggtaaattcttaagcgcgagacgacacgtggaaaatcgtgggtcccccacgactttacaagcctcgtcctcggcgccgatcttcatcaattcatcggcttggtgtaatttagtgtcgtatgccacgtggtacgactctaatcccggaatacgacgtcgtatttgctcaatccaagatttgtcttcttctagaaaaaccgtacggcctccgtggtttaaagcggcccacatgagactgcgtggccgagtccgaagacgaggaaattacacggtgattttttctcgaggattctcattgagactgagatttctttgagggtttgttgtggggttacgtttgtggttacgtagtgaaccagtgctttggccaaaaacgacggcgttttggtgcatgtttgttgtactggagaaatatcgttgggactacaatcattttcattagtggtggtcttttgatttgaattgttatttgagaggtgggtttggatttgtggtggagaatttgagaagtttgatctgattatgaggatgaggaagaagagaaagagtaaggtgaagacgagtttttgagttatggaaagttgagctacattgttcctcatcaacctcattttttttttttttttgaattttggaagaatagtgtaatgggattttgttgtttggtatttttgatgttgatttgaggtttttatttcaatttgatcatctaagaagaagaagaagactttgatgattaaattataggaaagagaaagaaagaaagaagtagtatttttaattagtattttgtttttcacaatttctatgttattttccttttttcagaaccagcaaactgttttttttgtcttaaaaatgaagcaactaccactactactcacaacattttggtataaaagaacaaagggttggtagatgtatctgttgaattaacaatatttattatcatgtggtttgattattattaacattattattaattaaaaacattattaagatggtttaaatgtatgtggaagatgtggtaaggtagttgggattaatgatttggtgtatataaaattgtgcaacgaataagagaaaaaaaaaatattgtgtttgaaggaatatgcatgtatgtattattttagagaagtggcgttgaatcttagaaaggacgaggtgaggagtggttatagcgtcaaattatttgttgttataatattattattacgtgttgtgttgtgtggtgagacagagctattaggtcagatcactatctaaatttaacatctaaaattatttgcatgcaatttcgtactttctttcctttatattatatatggttagttagatttagaagatgacaagtcattttctttggtgaaaaaatccttactgtattattttatagaatatggtagtattgtgtaattaattagtggttttttatacttctttcttttagaaattttttgcaaattattatactcttttaacaattctataaatttgaagagaaaaagatgagttgatattatattaaaaaaagggcatgcaattctgtggagtaggcagaagaattggcgtcaaagccaaacaaacatgagaaatttgatagttaaggatgagtgagctgtgtgcaaaaagttatgagttatgataatgttgcttatttgagaaaagtgcttgtttgatatttgtaaaaaatgtcccaagagattataactggattgtgtaaatagaaagaattctacatacacaatagtcatattaaaaataagttttgtgcatttaagatgattttctttacgagaaatgttaaaagatacttgtagttaattaaatttaagatttcatataatttaatgtattgatttttatagaatcctaaggtgacaccttaggtggtgctagcaagcaatcctctttctttgttttttttttcttgatgagagagagaaagatgaatgagagttagtaagagattgatgtgagaagttgactgcactgttttttaacgagaggggaaaaatcagttaaaggaacaatacatttatttttcgttttcttattacttgtatatatttaactaaaaatgaaaagaataaaactcgtcaatagtaaccaaagtaaacttgtatggtggtgtttggttgggaggaataaaaatataagaataagaatgacaatgaaaataagaatacaaataaaatagaataaaatttaaaatgcattaaaaaaaattgataaaaaaataattaaatttgttttcttattacattggaatgatcttt

SEQ ID NO: 378438 - DNA, 4194 bp, Cannabis indica
aaaaaaaaaaatgattacaattagataaataaacatgtatacatagatgattattaaaagtttctaaaagttgtaaaaataaataataattatttaaatattacttattgacggtaagaactcgtcaacgatgttaatggccaaaaattctatatcatgtgaatatcaaaaaataagaagatagatgaactttttgaaacttaagaaaacttgcagaataacaatagtgaaaagtaagtgtattgtattatcaacttgttagctagggtttcacaaagttttcaacccctttgagtgagggtgagaatcaatttataggggagctcttatgcctcaggctacatgtcgtccccatggggataacttagtacatggtacactagtcagatggaaaaggtcagagtaggggttgcaaggtcgtgcctacaatgtactattggtcgaatgtactaggtgtcccaagtgagtggatccactactcgctcaggccttgcccctacttatttgcaaggcgtcgtggctgagcatgcgcgatggtccccacatagtgaccaagttttcgtggggccaatgtgggtcccaaaattttcccctccaaggtaagtctctagtcattcatatggtcttactaaggatcacgcattcgaatctaatctttcaaaagggagtggtcttcgtctcttgtggtttacaactcatggatcaaaataaccctaggtgcatgggttggtctccggggaccctaagcgcaggggttggactccgagaccctagacacaagggttggacataggcgcaagagttggtctccaaggaccctaagcacagggcttcctgctgtaagggtccttctcgtcattccttttcttgctcgtccttccccaaatctcgacaagtggcggaggaatcatcatatgcgtattctcacgttaacattacttatttcttctctcgtggtttacaactcatggaccgaaacaaccctaggtgcaagggttggtctctggggctaggcgcaggttcttgtcacatgggtcatccttcttgtcatgtctttttcttgctcgtccttccccgattcccaacaagtggtgaaggatttgtcatatgcaaattctcgtgttaacattacttattatcatatttttaaaattaataaataaataaattaaaaaaaagtaattaagatattttaagcaaaatagataataagtttattaaaaagaaattaatcaaatgacataacggatttaattttaattattaattttaaagagaaaataacaaaaacacaataatttatgctaaatacctacactttagatataaaaactttgcatatgtatacgttattaataatgaaaataaaaaatctcaacaatctataaaataaactaattgattaattagtatataagtgcatgtataataaaatcttacttgtagtcccaataaaatttataattaaagataaaaaagttgtgactaattataaatcattattgtgttatgactaaaaaatttatggctaaaatattagtcacaaaaattacaatttgttgtgactaaatatatttttagtcacaatatttgttgtaactaaaactaaattagtgacagcttgtaattaaatactatattttagttacaagtatttttttgttgtgactaaaagtcacatttagtcataaaaatttatattgtgactaaaaaattctcacttaaaaataacatttttttgtagtgggtgttatttgactctctacatactatttgaaaaaaaaaattatgaaaattagtattacatgacgatgtacatcttactagttctctaaaaaaaaaaataatgatttatctaccatttgtcaaacattaaaaaaattatctacccgaaaaaaaaaaaaaaaggtatgcagtgtattacgagtatacaaaaaagatcaaattaacatttaaaaaaaaaaaattaagcatgcaaaaaatttaaactctatttttcagccatgtaaatttttcataattaaaagatgaatagattatctgttatagtatacaacttatttgataatgcttaccaagatttatataattcggattcactttgtaaattgaagaaacaaaaatatatccatttttgtttatttactttgggaaaactgaccagtttataagaaatcatactcatcaatatttatttcaattgatatattctattctatacatgaactcatcaaatatatatatgtggtatatataaaacaaacaaaaaaggaaaaataatataaaaaaaaaaacatcaaattttgtcttgatcatgacctgagaaattatcttcatttggcaaatcaaatgggctccaattattaccagttaagatggctacatcttgatgagcttctgatccgagaaccggtagctgtgttgcttgaatggcttgactaaccatcatctgatgatgttgaagatgatgatgatgatgatgatgagaactacttgaccataaaacctcctgttctggcaatggtggcagcccaaaatgatcacttacacaatgctctgttcggtcaggattattatattgcttgtgatgatcaaacgactccaaaccacagaagttgtaaatctgctcatttccagtgctcaattcttgtgccatttgaatgttaacattagtagtatttgaaatgaactccaaattagattgatcaattaaatgatcatcacaacccaattccgggatttctaatccattaatgttgttattactcttggaattatctggcttttgattcaagaagttggcataaacaagagcaagatcaatatgggaaccatcaggctgcagcattgaattagatgacctattggaatattcatctaagaaactcccattattattattgacaccaccatatgaattatgtccaaccacaccagtactggacacattattagtagttccataattcaaattcttagacaaaagggttcggccgtccgtggctgtcgaaagcctcagagactttcctcttctgttcttcctgcagccacctccaacaggcacattcctgagtgaccctcctttagtccagtatcttctgcagcctttacaaaagtatcgaggttgagttaagctataattgttgtagtaacaaaacttggtgttggaacagccacaccttggacaattgggagatatctcagcattaggcttccatatacctctctccatcatcagtaccattaatgtaagtagttttcttcttcattcagacctttcatcaaacacttaaagatcaaactccctctctctctgtaaacgtttagagagaaaatgaagcagttgggcaaccatgaaatgacctcaaaagggttatatggggtaacagaattgccttctccccatgcacgtgtggagcttttctcctaagctgcacatgacatgatgacactgtgttattattatgatggttaaggtgggtgggggtgggggtggtggtgcatgatcagtctctgccccggcggctgatacaaggtgtcggtgtttgtgacacgtgtcgaaaatgtattggtagggatgatagagttgtaggaagcaaaaccctcgagactctaattttaggtggctttgaggagcagacaaccctctaaatctatttactattaaactatacatattttgggaaccccaaagtgcttcccttcccactcactcacactctccgatccctaagatgttatgtccttaaaaccctccttcttaactgggattatatatttgatattataataataataatcaaccattcagtttcattttcagcccaaagtaatatagctagctacctagcaagctatgtagctatatagtaattaattaaataaatgataatatagtaaaaattgggttgagaatgagaagtagtgtatgaaaagaaagaagaaaatttaataaaaagaagtgggcgtgcgtggaagtagtaatttgttaaaggaggaatgtctcataataagtgggtagtacagtactatcccagctagttaatgtatacgcaacttagaagggatctcttggatcatgggcttctcggatctgtagcctctcaattgaataatatagtcaataaatatatatatatatagaggaaattacacttactatgggattttaggcacatttaagtttggccaatt

SEQ ID NO: 378439 - DNA, 3450 bp, Cannabis indica
cttaaaaaaattatctccaaagttcactatattcaattcacttagtaatagtatagccccttttcttttgaaatggaaaatagtactatagtattgaaccaaaaaaaaaaaaaagtgaattagtttatccataaaacttgctatcaaaactagagttaaaggaattaatgttgaacattattactgccttctaaggctttggtttgttattgggatgctctatttgcagctctctttgtttgtaatctttgttttgtctaaatgaattctttctcttttcttaaaaaaaatgaaacattttcataaatacttaaaaataacaaaaaattataaacatatagatctacaattatttttaatattttttacagattttaactattatttttttacaaaaatataaataattattttttttcgttgttgttacataagcaacatgattgttttatgaaaatatacaaataaaaaacttttaattaaattgtaacaaaaaaaaaattaggtacttgatataaaaatttgtccatcaccaaaatttataattactaaagtgaaaactcttgcatctagcctaccctttctttgctcccagctgtatagcactcctaatttttataaatatcactttacttatattttagaaaaatatcatttttaacaaaaatcatactttctatttattattttgcccacttatttttttaaaaaaagggaatttatatttatatttttttattatttctatgtttttcatttttattttattttctttgtcaaatatacaaagtttatatataattttatagaaaatcttaaatgttaagttgcatatgttagaaatatatgtttatcattactaaaataaaacataaaataaaatttaattttaattaaataaattgaaaaaattacatatacaaaaaaaaatacatattttaatgttaaaccattaaaaacacataaaggccctgtccagcccggaaacctggcgcaatttggcccacatagccggccgacaagcatggaataattgcattaagctgataggcatgacaatgcaaatacaattaattaatttttaaaacaactattaagtataatcaaattacaataatacactaacatatgttaatgcaaaacaaatttaattttatttattgaagcttcaataaactaataaatcactccatacaaaaatattatattgacaatgacaaaatcaaaaaaaatatattttaaagaaaaaatatataacatgttctctagacccatattaaattaattaatttgattggcaattgtaaagctttgtttcattaatataattgtggacatatataatatggtattgttttgcataatgcatagttaaattaatcaaataataagctttaactattttgttcaacattttgttttaactattttgttcaacattttgtgtatgtagaatctgttagtacagccctttgacaaattcaataaattcaatacatatagaatgctcaacatgtatatttgaaattacatactcaaatattttttaaaaattttgttagcggtatttgttatatttgttatagttataatatattttgtaaattttaaaaaattccgaataatttagaataccaaaaacaaaatttataatatacaaatttatcatacgtgtacaaaaatcttcaaatatattttcgatattgcaaattattcaaaagaaattaaaatttacatagataatgttataattataacaaacactatcattaaaaaaaaaaaaaaataatttcaattatatgtttttgagtacaaagattaacaatatcactcctatatatatagatttagaattataacattatatacatgaattatcacatacttggtcttgataaaatggaaaaaatcataaaagttgagattatatcaagagatattgtaaagccatcatctccaactcccactcatcttaaaaattacaacctttgtcttttggatcaattctatcccgaattccattgtggcataatccttttttactcctcaccacaaactaatcaccacaaaaacgacaaccaaaactattgtcgtacactcaagaattcattggctgataccttaaccgacttttaccccatagctggtagattcaaagacacgtcatcaatcgattgcaacgaccaaggcgcttgtgtcgttcaagccaaaatcaactccagcctatctaactttctcggcggcttgagccagccgagctgtagtaataatgtccagaaaaatttgaagatgtttataccgagtttggattctataacaatggaatcggcttcgagttccattcttatcgctcaactcactgagttcgaatgtggtggaatcgcgatctgcttctccctcatgcaccggttctgcgatcttgcatcggtcgtgtttttctcaagagctggagcgctagatccagaggtgaatccggtgaaatcacggtacctgatttttcagcttcctcgttacttccgccgcaagacttacctccacttccggcgatcgataagccgatcgagaatcgcaccacgagaagactcgtcttcgaggcatcgaagatctcagatctgaaaaagaaattcaccgatgaaaataaatcggcgaaaattgaatcaatctcgcgagtagaagtcgttttcgctctgattctgaaatgcgcaatctccgccgctcgatcgatcgataaattgaagaataaaaaatcggcgtttctccacgctgtgaacttgcggaagagaacgacgcctcctttaccggaaaattctatggggaacctaatttgggggattccggtggaaatagaaggcgagattgagtttcaggaaattgtgaacaaaataagatatgaaacgacgtcgttttataacgaaacggtgcgtagaataaaaggagacgaggaaggaacgacgttaattttcgagtcaatgaataagcaaggagagattattaaaacgacaggggatttggacttttattacagctcgagttggtgtcgttttccgttttacgacatcgatttcgggtggggaaaacccgtttgggtgagtagtggaataatgtctcctgagaatttgatagtgattgaagatagtaagtgtgggaatggaatacaagcttgggttactttggatcctaaagttatggaaatttatcaacttgatgaggagttgttgtcgtttgcttccttcaattctaatattcttgcttagctagttatgttcatgtaaaagtttgacatgtcatttgcttaattaaaatattacataggttaataatttaaaatgtataatatttattatctttttgaaagaattattgtaataataacctgtgacagtcagtagtcccgtgatccgtaagaggaaataccgggtaagctgtgcaatcccacaccgcctggggaag

SEQ ID NO: 378440 - DNA, 2765 bp, Cannabis indica
tgcttcacaaaaatttgctttgatccaagtgtcgaagcatcactatcatcagcaacagtagggcgcgtttcacaatccaatatcttatcaatatcactaagagggctaacctgcagagataattattttaattctattatcaccaaagctgtcacttgcaaaatcatttgacattaatgaacaagtgattcagataagaaaccatacacattcaggacatctccagtttccactagtagaagttttaagtggcgaaatcaagcactttgaatgatatgcataattacatgtttcacagcatagcagagacccattctctccacaagcttggcatgagtcctctatctatatggagagcagatagaatacataagcatatacatatacacaaaactaagcaccaaactgttgacaaaaattaaagcactactttccaggaattataacaatgaaaagaaagtacacaaattttcaacaagattcgttttgggtatgaatttgaactatataagaaaagagtgttttccctgatgccatttcagttctgttaaaccttccaactcatgcataaactatatccaagttttttcatgtcaaagaataagaacataatagaattaagagtagaaaaaaacctgatcactcctagctaccttttcaaacttctccccaacagtcccactcttcccaggcacaacataaaaatcttcatctgaatcatcaagattataaataggttttctatctgatctaacacgaaacctctcaatcaaactactcatatcctgtatcacaaaaaaagaaaaaaaaattagagcaaagttaaaaatccggtaatgtatgagggtgcaacttcattgaacgtattaaccattttatcataagaaaatcaataaacttaatttgagccagagaagtagttggttaaaacatgcagtccatatgtccatctataaaaataataaaatcttcttgaaaaacacgtctgaatttagtttggaatatcagccacaaaatgtttaattgtgaaaactaatgatccgggcttagacttctgaaaataccccggcaattcacaacacttgaattcgaatgccacaacccattaacgtgtattgtgaacgcagacacgaacagtataacacagatgtgacgctcgaaagacgacaaattccagagagacccacatgacatcaaaaatatcgatccaatacaacaaggacttggatcccatcccagttcacattcttccccaaatgcacaataaagaatgaattcttatacgcctcgttcaacttctgatcggagacaacaaacccggcggtaaggttttcggcatcgaaaccaattacacctcactagtcgacctccatccccaaaagcataatgaaattaaacaaaaccctaaacgaacaatcgtcgattacctcaagagaacctactacaaattcgtgttgaaccatattgaattcgaattcaaacccagctatgaaactgaccggacccggatccacatcgcagaaaataagaaagatgaattccaataaattaaaacccgagacagaaggaaccgccggcgaggcgtgataataattagaagaatccagatccgatcgggatcgtgaaagggttccgattagtggtttgttacataaaataaagcaatgcatagagagaaagagtgaaagatgattaatttaccttgggtacttcgatcggagaagcagtggcggcgcgtggagagtaggagggggttttggcgcgttattgggaatgagaaatgggggttgggtttgcggatttagagggaaaaatatgattgtgaaagtgaaatgtgaagtagtgcgttaaggagtcaatccattattcgttgaaattcttttgaatggtggcataggcctttgaacccacgtactcactagtcttcccctaagtttcttgttacatttgttttattttataaagtacaatttacaattttaccatatgaactttggatattatagattctgtcctttaaaatgtaaattttattattttttttggattgtttgattaatttctctaatttcattcaatttaattgtttcagtaattatttatgtattaaactatgctctttaaattttaatatatatcaaatcatgactctcgaactttgaaatgtactaaagtattagactcttttattaaaattgaacaacagtccttaaatccaataatctcaatagttcaggaggtatttttaatgactttaaaagttcaagaggcataatttggtacatgtgaaagtttagagagtaaaattactaattagcctaaaataaattattttgtactaaaaatatatttaattatttattatacatataaaaaaaaaatttaaagaaaaaaatatttaaaataaataatatttgaatttttttattttgttttaaaaaatattttatatttatatttttattattaacaatacaagtgataaaaatataatttaaaaatattataatattgggaaattactttatatactatttttttttattttttttttatttttatagtttaagttgctccggttgtttttatgtaggttgttatatgaaattaggttgttctactagttgcgatgtgaatttttgtaaaaatacaaaaaataaataaataaataaataattctttgaagtctaaaaataattaaaaaaagaaaaactcctaaactatttttatcaaatacatataaagttatattatggggaaataat

SEQ ID NO: 378441 - DNA, 1355 bp, Cannabis indica
cgaataagctcaacgaagatgtactcgggcgtctcaaaattctcgacgagctcgatccgatcgagaattggagggatgtggtcgaagcttagaggggtccggattagggttttgatgaggaagtggtaagcttcgggagtggggtggcaattgtaggaattgaaggaatggattagaagggagagaagattgttgtggttgttgttgttgttgtggatgagaaggagtgatcgttttagggtttgtaaagcttgggattgattgaaggtttgatgccatttggttttgtatggtgaaatcggccattttctgtgttttctgaggaatttgttggtgagagctaacggtcgagtggcggccatctttgaaaatctctttaacactaaatttcaaatgctttggtttatataatgagtcaagtgtgtgaaaaggacaaaatgcccaagaacatgggagtgaatttgaggcaatgcattccatttccaatcttccttacaccatctcaatgttaaaatttgtgttaaatttggctaaaaacaatagttttttcaactttgtttttttttactgtaggttgaaatttattttaaaaaagactgtgtactgtgttaaatttttactgttgtttaacggttgtttttagttgttctactgttatttttaatagttctgttttgttgttttagaaaaagataatttttttgttaaaaaattcgtgtaacagtaaaattgtaaattttttaccacaaatccaatatttttataaaaatcccaaaaaaaaaaaatgaatttgtattatatttgacccattatttacttacaggtgtgttttaatgtagaagatgtaaaaataaaaaaaaatataattaataatagagaaatgttaaaaaatactattagtgtctagtacggtgtgatatttctattagtataattaagtatcgagtcacgtataatttaataaaatcactaataaatcgtaaaacaatacctattgaagtaaaacaatacctattgaagtattggacattactggtgttcgaatgcaggcccactataaaaggcccaagagtgaaatatcaacactaaaatattcctttgaaacagcgtgtcccatcaaaaatcgcatacaatacaacatttattagagagggaggaaattataaatttgatgggtttttatatatatatttttatactagtaaaaaagttacgtgcgaggcacgtatactaaattttatgctaggtatttttttattatattaaaaggtaatacacttaaaaaatgtttatctcatctggttcaacccaattttatgttgtcccatggaattgtgtgttagatatgagcttag

SEQ ID NO: 378442 - DNA, 7362 bp, Cannabis indica
gatttctgacaaagatgctcttcatctgcttaattttaattgaaaattttaatactctataaacttcatcgtttcaattgatgtagactaactgtgtaatttacaccagagtttgattgatcactttatttggttaaggggtttggcatatcattcatgatggtccatggttaattttgtgtttattgatattcattgttcctcatatttaggatttaaaaaacttgatttctgacaaaagatgctcttaatctgcggtggaagtaaacatatatattttaattgaaatttttaatatactatgtgtaggtctgcaaatactttttggatgctgtggaaaagaaacagtatggttggttctggtcttgtccaaatggtggcaaagagtgtcactacaggcatgcccttcctcctggctatgtcttgaaatctcaaatgaaggcacttcttgaggaagaggctgacaaaatgccgatcgaggaagaaattgaaaatcaggtgaaaattagaatatgtttcctcatgagatttcttctggcgatccaaacttcaagtaatatatcttgttttacactctgtcttgtgttttaaattctaaactcttaatctactggttgcatcagcgctccaaattaacagcctgcactcccatgacacctgacttgttcttccaatggaagaagaaaaaggtggacgagagagatgctggcttagctgctctccgagctgatagggcaaagaatgaccgaatgaggttttgtatcacactattaaactataaaatattttttcttggtctatttagctataaaatatacttgatatgatagggatttcatctttttgttcttttcagtggtcgtgagctgtttctttcagatgccagcttgtttgtggatgatgctgaggcatatgaaaaatacaatagagaagagcctaacaatgtcgaagaaagggtaatcctgctttcttccttgactgttaaccggataaaaatctgacattcaacacttaaggcttgcttttggaaacaaaatgttacttaaattgtattttctataagttgtgtttgttttgactatatcattgttagttgaaaagatgattccttgattgttataatgctactaattggatctcgtgtgcctgtaactgctggcatttgcactgctgtccttataagcttcttcatcttacatttggatttatgcataatctgcactcaattatatcgtaatggttgactttacatatggtgtttcttattgtcaggacaacaagaatgccgccacagagggtccaagcacctctaatgatgctgtttccaactctgaagaattccctgatattgacgatgatgacgatgatgagctggacttagatgagttgaatgagcttgaagcaagtctgtctaaaacctctattcaaatctgtgagccaggtattgagacatcttgaatgagagggttttcaattagtgctctgtcattttggctgtagaattaatgagggacaaaggggactccaagtcccacaatttttaatgaacttcatgggagttataatctgctctggggtattgtgaaattatgggtactactagttcttgctggtgataggattgtggtttacggtttaatgttatcgaagtaccaaattttgatcaaactttcttttactctttatatatatatatttaggacattgttacaaattaccccaatcttatgtttcgtatggtactatcatcaatattcttccactccattgtggacaataatttcctccatgataacatcctcttttttatgattcttctttatatactccccccatccttccctcgtctctttactatcatcaatattgcccattgggttgtgattatcaacttctgctatgagtcttatttgtgcttgatggtaattggaaaggcgtgcaattgctcgattcagtttcattcttagaggaacttgatgcgtggtatactatcaaatttaataattattttcttcagtattaccattaaatttatcagtaatcaacaatgatcaaccatacaagctgaatacacattcaatgagcaatacaattcgcactgtaaatgaacatagggcagaagcaacttaaactttcagtcttcaataagacattttcatagtgttgcgcaccgcgtggactactaccaaactccattgccaccacgactcattttatcaagcgaggcctagtgcttctgtaatttcaggtgtttttttttttgtcaaagtttgtcaggtgttgtttcacgcctccacaatctgcctattgcaatctcgaactacgcactcaaaggcataccaagacttatctaaacaatttgttggatcaacatttagttttgacattgaaattcatctagtggagtccaaagctcaaacataggaacccatctctatcaaaaatagggttcctaagatgtaaaagtaggcatgtcaaaaaggtcctttcagttgaagtgggtcggagtttcgattcgacagatcacttttgattcgaaacatttggatactgatttgatctcgaatcagatttgctttacctcgcataatttttttttttgaatcagatttgatctgatcagtttaatatattaaaaaaattaattcaagacccggacctaggctctcggactcgagacccgagactggactcggacatgggactagactcgagacccaaacctgaacccgagacctcagctcggacttgggacccagaccttaaaccaaatccgagaccaaattcgagttttgggacccagacccgaactcgggaccatatctgaatccgggacccagacccaaaatcgaattttgggacccagacctaaacccaagacccggactgaaaatcgaacttggacctgaaccccgacctgggacccgagacttggacttgaacctggacccagcccgtgggcctagacccatacccagatccgaacctggaccagaaccaagacctagacatgggcttaggacccgaacacagactcgaaattagacccaggactcggacccagacccgagacaggactcaaacatggacccggacccgcaacccggacccgcgacccggacttggacccagacccaagactcgagacctagaccgaaactcgggactcaggacccgcacccgcgacctagacccagactcgaaccctaaatccagaccccgaccctaacctggaccgagacctagactcgaacccgaagttgatgttggggtcgagtttattgaaatatgttatctttacataatctattaatacaagttaataccaaacatagtattttattaaataatactaatacaaaattaaaattaaaataggtataaaattatatgtttagatataaatttttttttaaaaaaaaaagaagttaggtcggatcagatctgacccgatttattcgggtcgaatctgatccgatccgagtatttgatctagcaggacggggcatggtgaatccgtacatgatctggatcatgtcagatcatagccaatcaaattcgacttgacccatttacactcctatgtaaaagatgtgctatcttgagtttttaaccatgatcaaacatagttctagttgaaacaactccctcagccatagtacacactatatcctccaaaacaaccccattcctagcctttcaaatagccaaataaagcatgaacatcatggtaccaaaattgcagccaaatttttgtgagacctgagatatggctcactacagcttaagaacctaaaggtatttttttccttgtcttttaaagcattcatagtttaaaattacatacataaaagctaaacacaattcaaaacttaaaaaaaaaaaagaataattaacaattttgtcccttaaaatttcaacaatactaatcctgtcccttaaaatatacagcttgttaaaaattctccctaaactttaacatttatagaaatttaatctttctgttaggttctgtcccattattctttttaaatgcagacatgtctgtaaattagcaatcactaaattatgtatatttttatacttttaattggttttatataattttttaacaatattttacacataatcatacagaaaactaattagaatgattataatttgaatacttattagtaaatacatatgtattattattatactaatttttcatgtgttgtgcttttgggcaagtatattcgtgctcacggcttgtcgtaccgtttcgtgcttaagtcctttttttatgtcatgctgtgacgtgccaatttacagtatcgtatcatgttgtgcccaaatttatatttctagttttggatcctgcttatgcctcccgagctcgtatcaatttcatgttgtgtcaaaaagttcagactatatatacaacattactcacaactgatcaacttttttttttgcctttatttggaccatgaaacatccttaagttaacataacaaataataaataattacaataaacatttaaacatgtaagcatccatattagcttttaaactatgttatcattataatcactaaatatgccttaaaatgaaattctcatatattgttatccaacgagtccactatcaaggtagcctcaactttgtaatcagatctaatctaactccacatacagttaatcaaataaagcaatcaccactacttccatcaacttaatcaacaaataaaccctacccatgcctgatgtaacatgtcagctaagatgaaatgatacattttaggtcgatgtccacgaggtggccaaatggtggcacatgttggtggcatgctaatgcctagtttgtacaattatagtattttcgtaaatattttcaatattgtttagatcaaaaagagacttgatatttccatttatttgggctaggaatacaatgtcacaatcgaatttgagtaaagcgaataattgatatatcttgatgatcatatgtctatagagaaaaaattatatatgttcctggtagaaggttagaagcttagaatgctccttaagagaggagctcttggtgtcagctctcgaccactccttgacaccttggtgctaagtgagcactactagtcagtgggactagtagggcggacatgtgaggaccacagggggactcatatgtccccatgagttggagtactcacaaacattatcgaaccgactcagtagtgcgtctaggaatgctgatagaggttagttggcgagttcttattggcttgctagtatgttgtttacatggaatgtggctaaacctccgagagacatcgtggtgcaccttggccatgagtcttaacatgagatgacacaagtagtcattcacggggctagtttgcatatgcacatgggatggatgtaccattctggaagaacagagttcttacatatgctactagtctggttgcttgtcttgagggcctgccaacatgcgtggaagcatggtgcctttgaggattaaatgtatgggtatcattgggccatgagggagactgttcgaacaatattgtatgggtgtcatttggccaaatgcacacttgagagggttgagattcaatctgtagtgtctaagaatgctaaagaactcttccaggtctctctcgtgtacttctatcttcttagacttcactagcatatcatcaatataaacatctatgatgttcccaatgtaaccatgaaacattcatttgactagtctttgatatgtgggcccaacattcttaagaccaaatgacttcaccttgtagcagtagagttcaacatctcatttgaagctagtatgctctttgttaggcagtgcatgctaatttggttgtagctcgagtaagcatctatgaacgtgggcaactcatggccagtagtggcatctaatagttggtcaatgcttggaagcgataatcaatctttcaagcaagttttattcaggtttgtcaagttgatgcaagttctccacttcatatttggttcaggtacaagcacaaggttggatatccatactgtatagaaagcttacatgatgaattttttctcatgtaatttctcaacttcttccttcaaggcctttaatctcactctatcaaaaagtcttctcttctattgaactggcttgaagtttcctttgtcaacgttgagtgtatgaatgaagacatcaggctcaaggccaaccatgtctttatgtgaccaggtgaaaatgtcttggttgcatcgaagggaactaagtaagttcatttgggtctcctccaagttctttcaaatcttcaccattttggttgggtccttttcgtctagtggcacttcttctaactcctcagttggaccaactcctaagacattgccccaaaatgaggagctacatcctcaccttagtgttgggtgtcctttattttcgacctaatgcaacttatgaattggatggtgctgatatcattgatgaagctttttgagctaatgcgagagacatgtttttgcatttttgtgcctgcctctggttgcctctcaagaaagctataccaactatagttggaatgtcattgccaagtgaaaaatagaggttgttgctggcgagtcatacaatgttggtctcccaagtactacattatattgagatagtacatcaattacaaaaacagtggccatcactgtgtttgacattgaaacaactcccattgtcaattccatcttgatcgttccaattggtatggtaccagtaccattgagaccatatgaaaactgaacacatggttctaagtccttcactagaaattccattctctcctaacatttctagtagagaatgttaactaatgatctattgttgattagagtcttcgacactatcatattggcagtctgaactttaaccattagaggatcgtcttgtggataagtgacattagttgcatcctcctacctaaacatgatcggtaaaggttcatatcaaggcaactttggaggcctctccttaactactgatacttcagaagttggctcatggcgtagtgagtacatgtaactctcatgacaatttcttgagttgcttgctagatgtggttcttcgaaaatcccatgtaagtggctttctacaggtgcaacttgaagaggcaaagcttgcccctattgcgctttgctaggtttcctatctttaggtcaaatggatcactgaaatttcacatgcttttgacggatgagaaactcaatctcttctctaagttgattacattttttagtttcatgatctagtctctaagacgtttgtaaggtaatgttggaaatattttaccaggatctagatttactaccaagtatgtttcattaaca

SEQ ID NO: 378443 - DNA, 6949 bp, Cannabis indica
gatgttggatgagtactatagtatgcttagagtcgtcacttgatacttcccactcttcgaagctagaggaggagttaccgtcagaagaatgagactttgcacagacctttggttgatcctcgaagagtagttgtaataggtcattgtcaatacagtttttacctccccaatagtcacccaaattcatctacaaaagaaaagaggaagtaagtaccgaaaaaagtgaagagtctaaatggaaaaaatttgttatttcgtccaaaaaaacccggatcaattgaaagaactctatccaaatgacaaagaacttgatacaaagatattcaaagattggataaaaacccagaatttgttgaaacgacgtacaagcctccatccaacaaattctctcaggaaaaactttataaatgttcgataagttagcaattaagtcctacacgagcatattcaaccacaataatcatagtaaattcaaactgtgaagaacatcaatggaaaaaatctaggtttttctagaaaacatggaaaattgaatgtaaggaagtaaagagaaaatgcatgaagaaatatgatagttactcactattggagttgctagttggaatgtgcaaagccgagattcaagtcaaagattgagtgcttgaagtctccaaatgcgctcttcaaatcataggaaatgcaaaatctttctggtatttaaggggctaagatataaagaatatcaaatgaacctctttttctctatttattagagcttcagggggtataaccataatttgggtacccaaaccaaatgcttgtttccccaaaaaaatttacaatgagtacttataataagtatagtcgtcagtgcatgcccctagggcacgattgtctatattagagcattaaatgcatcaaatatttgaaaagatgctctaaagatttgaagtgacgaacctgttcgccatgcttatccatctaacacgtgtcatcgcatctacctaatacgcgagtcgagcaagtccacgcatcaaccagaaagttcccacgcaaacttggggagaaaatgttatcccgaatcttgcctggttgatgtggcacatcttttgggtgacacgtatcatggttccaatacctgggcagatggtcttccaagtgcccgtacagaataaacaacttgccagatgcaataataaataagcaaagtaaaacttgttgtacggaatgaacaaaggtaacttggaggggataaaagagccagtagttcacacgatctaaccagaggaaaatgcatgaagagaattcattaaatgaagtttcccatttcgcatataatcaaatccctattgagagaattttcatatatatataaaaatatttgtcacagtttaggaaagtcattaactttctatttttatggcttgacaactttttggaaactattttctattgtaattattccctttaaataatcgggccataccattattaagggatccgaaatatactttcaagagagctattatgttgcttaaatatttgtaaaagctttcaagagagatcaagctgcacttgcttctcttctcacaagtcaaatataatcagaaaaaagagtaagctattaccaaataaatgaggctgacctctataaaatctggtgttcttaatttatgttttaattagatatattctcattggatttgatcaatttttaatcgctttctaaactcagtattattggccaaaagtaaagttatcacaaactattaagaattcatatgtaccacattatatttaaatacactttatattttaaaatataatataattactaaactgcataacctaatagtaattacacacatatttttaaagagaaatgctaaagagcactagtggtgcctagtaccttcctatgtgtcagtatcgttattggttcaactaagtatcgggtcctatataatttaatatgataacttttagggagtatcgctagccaattacaacgtaacatgtcaagaaagtgctaggcaccactagtgcctaatataacaatgctcatttttaaacacaccctaattattttgctaaaccaaaacattaaaaattcaaatataattatgattgatatccaaacatgtcttcctaacatgccataaatttatttttttttttttagagtaaaagagtcaaaactcataaaatccacattttctaattttcaaaattttgaggcttctttctcaatttttctgccaatgataatccaacacgtggatcagacagaaaaacaacagtagaacacgtggaaagttggacaagtggaaaagcttgacacgtggacctaccagtatatgatacgttgatcgtccaaaagtttgaacctttttactatcactgttctcttcttcttcttcttctctctgtaatcaaaaaaatctcatttccaattcaaattttcttctccatcgccaatggcgtcttcttcctcaaccacaatcacaatgccttgttcacccaaaaaactacgctcgcccaactggctgaagttgccgggggacttgactgcgtcgattctttttcggctgggcgcgatcgaaatcatgaccagtgttcagatggtctgcaaatcgtggcttgatatctgtaaagaccctctcatgtggcgaaccatcgatatgcgtaacaacggcgatcctgattcggatttggacctcgaacagatgtgttgcgatgttgttgatcgcagctatggccaactccttgatattaacatcgagtactttggaactgatgagcttcttcactatatcactgctaggtattcccttttctgtcaattcatgaaatttacgaaatcaatttggtgatgattctccacttgattacttcaatcaagaatcttagaaaaagtttctggagtgttttgatttttgtgttgtccttgatgagcattgaagctttcatttctatatttgaatagcaaataatgaaatttagtgcagaagtttccatttttctgaattttgattagtgcttacttttattccctttacaacttttcaacagctcaagtcagatcaaacgccttcgactagcttcttgctataatgtctcagatgagggcttgattgatgctattgaaaagcttccattgttggaggagcttgatctgactctatgctcattttcagaaaatcctcttaaagtattggggcgctgttgccctcatttcaaaactttgaaattgaacactcaagcttatagactcacagacatagatcctgatgaagaggaagatgttaactgggatgtgtttatcattggcgaaaacttcccaaaattacgccaccttcagctcatcggaaactccatgaccaacaaaggcttagaagccattcttgatggctgtcctcatctcgaatcacttgacctgcgtcaatgtctcaatatcaatttcaaaggaaagttggcaaaaaggtgtactgaacagattaaagttatacggctacctcaagattcacttgaagggtgtggatttattgttgatcctgatcacgggtttctcggggaaggccatgctttatcctttgcttgttccaatcccgtcttgggtttcaatgatgacagtgattgtggatactcaagcgagtatagaacatggtaactgctcatacgtgtgttccatgtgattttatggccattaactatgatagactcttttctagcatagaaaacaaatatcatatgattatatgatcttacagattgttgaacatcatatggagattggagtgtagattctagctagtttatctatttgttgagcagtttggaatcgagtatggactttaggaaaaaccaagtctactgagtctggtttttctttttgtaatataaacttaagattgactataatcactctttttagctctaaagaaagttttgagattgacttgttaaattaacttgaacatctttgatcaatgaaaagacaaaaataggagtattgaaagtcaattagtagaaatatttgacatttgtcttatttctatacaggtaactaaattatgggctaatgattatctacatgtatataagctttgttggatttttatgataagagaagtcaacagaaaacaatatcccaataaataatcattacaagagcaactcccatcgacaatcagttcttggtaatcctagttgaacttccagctcctggtgtgcttaaaagcccaaatgcaatagccagtcgtaatgattattggtaataaaaataacttacaggttcaaaagccacttgtttaaccaatgtctcagcttcttcaaaacgaacggcttggctcggcttagaagatcgacgaagctggcatagtggttatcaataggcctgagtttgttgtctcttttcatgctacgaaatgaggtttcatttggctcaagtctttctgccatcatttatcaatagagatctgcaacttttttgccatggccatgaatggaacctctacattgagataaccaaagaaaacaaaacaatttctcaattcctttttttttcatatataaaaaatacaaagaagctcaacaacaaaaatcctaagcttgaaattgcatgaaacatttcacatatttaacaccatctaactaaaaaagaatcaatttcaaacaatcacactaagtgctggaatttttcgaatactagcatgtaacatcattcttctaaaaccagcagcatgatcccatttctgcatattagcatttatatttgacaaatttatgtatggttcagaatgttgttgtggctgcatacaaagcaatcttttttgtacatcattttccaactcactgattccatgaatagcataagctccaaaaagagcccccaaaacagaagcatctggttcaaaaggcatattttttacaaacatagttgcctccctcaaaaatcctgctttacccaagagatcaacaatgcatccatagtgttccataactggcacaactccaaagtcagctgacattgattgaaacaccttcaagccatactccacaaatttaccccgagcacaagcagcaagaatcgtaacaaaagttacacaatttggtgtaaatccttccttctccaaattctgaaacaagtccaaagcttgtttcacctgaccatttgtagaaagagcagaaatcattgcattccaagtgcaaatcttcttaactgtcatttgattaaatacattagttgcagcattaagtaaaccacacttgccataaaaatctatcagtgaagtgcccatgaacacagtcaactcaatctcattccttactacatgaccatgtatttcctttcccagataaagagctccccaaccattcaaggttgaacacaaagaaaacaaactaacatacgtggcttcattcggtttcaccgagcaactaatcatcttcttgaaaaatcgaatcccctcatgaaactgctgattaattctaaacccgtgaacaacactcgtccacgaaaccacatccctttcagacatgcgttcaaagagggaaatagcagaacccatatccccattcttgcaataagcatcaatcatagcattgcacccaacaatgcacggttcagacatttcatcaaacaccttgcgtgcataacttagttcaccataatctgcataaaaactcacaaacgatgttggcacaaatggatcatacatagtcccacgcttgtaagcttgggcatggagggcttttcccatacaaggcaaggaacataaagaagcagctttgacaagagaaggaaaagtgtgactgttgggttgagtttggtggaaaagcatttgggtaaagaggattaaggagttgtgagtttgcccaaaactcaaatgggctctgatcaaagcattgtaaagaagagtaattttccattttgagttgaagtgatgattggttttggagagaaaaagatgaccatttatgataaggagtgagtgaatttgttgaactttgttttggtgtttagggaagcattggaggagttgcagtaaacactctggtgaataatatggcatgatatcatttatcaacaaaagatggcaagatcaatgtgattttattttattgattttgtttggattttgactagttgaagttgaaccaataactttggaacaaaatattgtcttaaatttaataatatgtaattgattgattgtgtcttagttcttgaatttgattttctttggaggtaaaagaccaaggttgaggatttgagtagaatctctaattcttagttggttattatgtaattagtaatatatacatatgtattcttagtagtaatctcatgaaaagaacaaacttaatatagtgaagaaattttatttatcacaaaaaaaaaaaaaacttaattacaaaaaatatatccctaataaatttagaaatttttacatgaaaaattaattttacacaatttattacaaaaatactcctacacgcctatatcaacttttttacttaccatgtttgttttattataaaaataccacttagtcatcatttcatgcacatacacgtgtgctgtaaagactgcttatggttaataccttgaactattaaataattaagatttaagtataagattaattaataattatgaaatgtatatcttggaaatatatttaatatcatttatgttattatgctatttaatataaattacccaattcctgtttttgtgttcggaagctgtggaaagcgacgttgggcctttagagagtcgtactttgggtattaaagtaatttattatttaatttcggggtgttattgttagatttaatagtgttggatttttgtcgggtttagttcttaattaaaatgcccttgttaattattaacttattttatttaagaatctttgatttttaattaaaggaaaaaaaaggaaatttgatttattaaaaggaa

SEQ ID NO: 378444 - DNA, 3874 bp, Cannabis indica
tgacaaataactgaaaaagggtcagagataatatattaaagtcacaagtttttaaaatgcttctaatttgtaccatgagttaacaatttaacttaaggtaaaagaagttctaatacacaaaagcagttgatcaattcaacaatctctacactgagagtccaaaattttagaaatggcatgttagaaaacttataaactattatgactttcgcgaccttccgcttttgccttttccagttttcccccgagctgcaggtgctttcgagcttttgtttgctgaaaccttcccacccgttttcctttatgcccattttcggccaaatcatcgtcgtcattgtcttcctcgtcttttgcattcttcctcttctttttcgtagctggctgagtttggttcgcaggctcttcttcagtcccttcttcgaaagccttgccatcataaatatcgagctgagaaagttggtcggcgacatttgttctatcaactacaaccattgagtggctcaaaccacatgcaacactgataacatacataccctcaagaatatccacttttttcgggatagcagaagatttctgacccattggaccatatcccagctcaccattctgagcttgaccccaacttatacatgactgatcagctccaacaaaatggtgcatgttacctgaatccatacaacgtaaattccaaccgcttagatccaagaccggtttaggatacatccaatcgtcgcctgtattctttaatttcccccacatgtataactggcctccagcagcagtacaagcagaattaacagaaccagcagatatgactgcgtcagaaggtaaaacattttgcctctggaaaacatcaacacggcgaggttcccactcatccttctgctccctatgtccaagtcttccataaccaccaaatccccatgagtaaacatgaccatttgcatccacagcaattgtatggtttgttccacacgcaactttaacaattgtttccccgaaagggaagctattggtttggggcgaggttgagcttcgtaagcaagcttcaccgagccatctttagtattgtactcgttgtcagtcccgtgcccaagttgcccatattgtgggagacccgcggtcagtatagaagctccttcaaccgaagataaccaaacggtgaaatcagccccacatgcagtagttttcacatcagacacaagacaactaactggagatggttcaaattcattttttgtcgagcctgttcccagttgtccatgtttgttccaaccaaaggctagggactctccattttcggcaactacaactgtgtgattcctcccagctgaagcttgaacgattttgtacctataacgcatcaaacacaaaaagccaataatacaaaagtctcattaaggtaagcttgaactatacaaggtgacatacagttaccagtctaaattttaaatttttatttaataaatacaaaaaaccgctaatcaattatcggttggtgttcaaataacaatacctccaaccaaacgccaccttataaaaaactaagccaaaacaaactataagaggtgagataccattaacagtgcaatgtcaatatcgaatcccacaaattttaaatttttatttaatatataatatgagaaactatcagttggtgttcaaatagcaatacatccaaccaaacatcacattataaaactaagccaaaccgaatcataagaggtgacataccgttaacaatacaatgttcaatgttgaatcctacaaattttaaatttttatttaattaaattagtacaaaaaaaccgctaaatcaattatcggttggagttcatatagcaatacttccaaccaaacgccaccttataaaactaagccaaaccgaaccataagaggtgacataccattaacagtacaatgtcaatatcgaatcctacaaattttaaatttttatttaatacataataaaaaaaaaccgctaatcaattattggttggtgttcaaatagcaacacctccaaccaaacaccaccttataaaaactaatccaaaccgaaccataataagaggtaacataccattaacactaacagtccaatgtgaatatcagatcctataaattttaaatttttatttaatatataatacaaaaaaccactaatcaattatcaagtgttgttcaaatatactcactgagacatttatcttgggtcaaatttagtacaacttaacactctattagggatgctcttatagaaactaagccaaaccgaaccacaatccaatgtgaatatcaaatcctataaattttaaatttttatttaataaataatataaaaaactgttaacccaatagttgttcaaaaatcaatactcaaaaattaaacatctttgatagaccagagaatgttatgttagggttccaaatgtagatagataatactcactttgatagttgagacacaagagtgggtctatcacgttgaatcttatcaccaacacccaattgccccttctcattacgtccccaagtaaagcaacgtccttcaacatccaacgccacacaatgacacgaagcacaaccagacgcaacgaaacgaatgtcgacattgagaagagatctgagtcgagttggggaaaccaaattgccttcgacgggtccctttttccgaccgatcgtttcccatgacgttccgccgcagaacaaaatctctccacctttcttctcgtctgtgtcgttctcaacgttcgacattgctgagaagggaagatccaacggctagtttttctggttttttcaaaatctgagagtgaaaggtttttctgtgggtaaagaaatgaaaaaggtgaaagctttaaatccaaaccctaatttattttatcgatcattttctttttgaagaaattcttatttattcttattattatttttttattacacttcttattattacaataaatttatagttttccactaaaaaaattgtaattaatgttatttttgtagggtttaatttaggaataattatttaaaagactaatttatatcataaataattaagtttaattatcagttgtaaataaatacttaagcttaattttttgcgttaataataactaagttatatttttgcggtaataatacgtaagtttaattaagttatatttacttaacacttaacatgcaaatacttaaataagtttcagaaatataacttatgtattattatcgcaaaaaattaaagttaagtatttatttacaactgagaattaaacttatgtatttttatcgcaaatttctcttatttaaaatactctgctaatctcgatttggtctaaatatattttgatataatttattttcgttaggtatttattttcaacaagaaattaaacttaaatatttatactgtaaattaatttttttattattggtaaaaatagcaatactagtgggatcatatatagaatgaaaaataatctatttaaatatttccacatgtccacatgagatgtaatatttctactcaccatgactagtgagaattgatatctaaatagtcaagaattgagtcttggtaggtcactttttgccaatgtgtcaccaacattagtggtctattagtattagtatgtggtgttgcttactaatcaaattccatataactattctaatgatggctaaccaactcaattacaataaaaactcactaacacaaattagatttaggtttattaatcaaacctaaatcgctaaccaaatgtacaatatagtgagaacacttggtttattatgtggtgtttatttatttattttatgtttatttttattttttaaaattaaataataatttggactaataatattttga

SEQ ID NO: 378445 - DNA, 3358 bp, Cannabis indica
ttattataaaaaaaaattttcacataactaacaacgaaaaaagttaaattattgttgttctatgtctccaacaacaaattaatataaataaaacaaaagtaaaaaattcaaattattgttgttgtttcacataagtattttatgaacaaccctatataatacaattagattttttttttttttagcattaataccaagcaatgacaccagataagttggtatttcaagaggctttaattggaatcaaaactggtggtgaccgtgattaacaacgagaaaaaagaaaaaggtactatcatgtcgggtgaattcaataataaacttttgttggaattctaacttcctttctcctttcaaagcctatctagctgatggtgatgtcaaatattatgttcactagcatatccttcgttttgaccctggttcatttaaggatgtgcacataatttaccttccaccacttattgtagttcaagctcttataattttaatttttttcctaggtgtatcattgttatttatatacttagcaagttttgccttcttcttctgttaacccctctccctttagaacaaaatgaggagctcatcatggtggaacgcatatttagttctcaccaaaaatccgcacaagagcaatgcccatctttaaagcaatggaacctgtgggcatctctcacagtgatttttctcccagaaatggctgagataaatttgatagcattgtggcaatccccacatattcgtaggttcttcaccacaagaataggctctccttctctagttgaaatgagcccaaatgcaactgcaagcttctcactatgatgtcctagtttaatctctcgttctccatccactacttcatcttcctttaccaaagaccatcttacatctggtacatagccgacttgcctaatctttattaacatctcttccaaataagaacaaatttctttgatcattgggtgggaactatcttcagccacaaaaacatgtatttgcttattcatctcaatccaactacatcctggtttcttcctcacacctctgtcccgcataagctttctaatagttgctacttcctcccattttcctacactagcatacatatttgccagcacgacatagggaacagcattcaaaggttccagctgaagaacttgattggccgccttcagtgctaatgccatgtttccgtgttttctactagcaccgagtaatgaagcccaaccaatagaaccagggctaaatggcattgtctcaatgaacttctccacttcatccagtttgcctgctcgacccaacatgtctatcatgcatgaataatgttctacttcaggttctataccaaatttgtccttcatcatataaaatacttcttaccttcctcaacgtttccattgtgagcacaagcagaaagtactgagataaatgttatacttgtaggtttgatactagtttggagcatttgctcaaaaagacggagtgattccatcccaataccatgctgagcatatcctgcaatcatcgaattcaaggagacagagttgtgttctggcattctatcaaacaaccttcttgcatcatgaagattcccacattttgagtacattgtgataagagcattattcactgaaataatatttgaaggaatctcagatttgattgccaaagaatgaatttgtttcccttgagagggtgatgacaagttggagcacgcactaatcacacaaacaaagctacaatcgtcagggttgtgaccaacacgctgcatatgtctgaaacaatatagagcgtcttcagaaaattcatcatgttgagaatacccagaaaccattgtgttccaaagaaccagatccggtgaaggaatctcttcaaaaattttcctgcaatctaacataccaccaccacacttggaatataaatcaatcaagccactcccaacatgagagttttggttaaaacctgccttgattaacttagcatgaaactgaagcccacctatcaaatcctccacacatgtgaatgcagttaaaacactggccaaagtaaacatgtcaacatacaatcccctgctaaccaattcctgaaacaagttcagggctttagacccttcgcgatgctggccatatgccacaatcatcgaattccatgacacctcattcctcacctcctcacccattccattgaaaactttcttagcctcttccaagagcccatttttaccataatacgttaccagagaattgttgacagaagcaaaaaaaacaaacccacccgaaactgccagtgaatgcagctgcctaaccaaaccaacatccttaccagcagctgttattgcggctgacaaagtgaaaccatccatgtcaagatccatctttctcatctcctcaaacaagaacaaagcttgttgtgtctcacctcgatcagcataagcagaaatgagagtgttataagacactaaatctgggtgaggaatttgatcgaacaggtggtgggcaatatggcttaatgattctttggcatatgcggcgactatggcgttgaaggagaagacattagggtctgggatgtggtcgaaggcgtgtcgagcagaggaaaggtggccgcatttggagtacaatagaataaaatgattggagagataggtggagggaggtagaagggacttgacgtatatggtgtgaagagatttttcctgtgaacaggtctctctcggctatgcaggccttcaagagatggcgaaagctttgaagagtccataagatttggctcatgacttgttctttgatatctctgcaatccgtagttgacagggtagttaataaaccacaaagaatcataaaattcacttgagctattatgaaatgcatagactaattcactaaactggaccaacatagtccttctgctcctcaaaaactaattcaagaaactttgagatgaataaaaatatacactttctttctcatttctagcaacgagaagatttatccttaaaaagggcccaaccataataacaaagcaagacatatcatttaattgttttcatcaaaaaaattatgttgtacaattttaaaaacatcctggaaaacaaattaaagcaatgatagaaagaataaatgaacacaaaaacactttaaaattgagagataattttatctagaacacaattttcaacctattggctaaaagtttgaaaataaccttataaaaggtaagttaatcttaaaagcatggtttggtggtatcagattgccctgactttccccttattataataaccagatataccaacttctctccatgcaaacttgaaacttatacaataagccaaaatatatctatatataaatat

SEQ ID NO: 378446 - DNA, 3262 bp, Cannabis indica
tcagtttcggtttctctgtctttttttctttataatattttaaattaaaatttttaatattataaaaaacggagattcaggtttctgggtatttgaattcccatgtattttattgaaacatatatagggtcagactacattgactttattacatttctttctctcaatctttcacataaaacccacaagttcaggttcaagttcaaggtttagaacaccccactccaatttgagttttcttattctttcgtcttcttcgatgggagctagtttttcatcctcaatggcggacgatgacggtcaggatcagcatgggcttgatgatttaccggagaactgcgtggcaatgattttgatgaacttggagccgccagatgtttgtaaatatgcccgattgagtagagtatttcgtgcggcttcgtctgcgaatttcatctgggaatctaagttaccctgcaactatttgtatgttatggatagagttctcgagaattcggccatggcaaaggacaagttagagaagagggagatctattccaggctttgcaggcgaaacttgtttgataatggcactaaggtaaactcttaactctttttctctctctttatcccgatttatctctctctttgtttgtttggattcattaattgatttctttatggaaaattaggaattttggctggataaaactacgggtaatagctttttgtcgatttcttcaaaagccttgaggattaccgggattgatgatcggagatattggaatttcatttcgactgaggaatctaggtgagcttgttatactactttcaatgcaattcttttgttttcaaacttatatgttctttctgggtatacgcctaagcttttatcttgtttttggaccgtagggatgttcatcatgttttgatttgtttagaaaattattttccttttctttttattctattttggaacttatatatacatgctatctagaattttcttgttctagtacacgtttgttagatagaatttgcaatatatattgataagaaaccattttcttgccataagtaggatggaagtttttctttgtatgtcttctatgtaaagttatttactttccatataagtctttaggcaccagttatcaatttcattttgaattgagtcattttgaggggcgaacatcttgaaatttactgctgtcagagtctgataacttgtaatatattaccttctacttacactctgactttctatgctcttgtacttaaaatatccgattcaacataagaacctgaaccttattcattttccttcaatttcagattccagacagttgcttatctccaacaaacctggtggtttgaagtggaaggagagattgactttcaattccccaagggaaaatatagcatcttcattcgactccagcttggccggtcctctaagagactggggcgtcgggtttcaaactgtgaacacgttcatggttggggcataaagcctgtaaagtttcagctcaatacttctgatggtcaacgtgatgtatcacagtgttttttggagagtccgggaaactgggtcaactaccatgtgggaagttttgttgtagagaatcccacagctttgatgaagatcaaattttcagtaacccagattgattgtactcacaccaaagggggtgtttgtgtggactctgtatttatacggcccagtaggtaggaaaagaggcttagtcattgttgtaaacactgggcagggcaagcgactgagctgtatataaaggaagtttgcttacagttaggaagaatttttgccgcccaaccagaagaaggtttgtctaaatatggtcaaaatgggagagctactgtgtttttgaggaggtaattgtgtatataatgcaaatggctttcactttagagttttttctcctcaaaaataatagatcttatgcactttgtaccatatgagaaatgcaatgcatatttctttcttgtgcttctagactagtagagcgcatttactggaaactatggtaatttacaaaatctctgttgacaagtcagcaagataaaaatacagatagatacacaaacattaggttagatggcaataatagaggataattttgaaagaaacttgtacaactaaaatctaaaatctgtagcatagtctggtaaacccaatagtcttacacgttttaatgaagtgcctcctaccttggtatttcccaggcatatcttggtcacaaagttaccaagagccagtccaacgactactccacttatctatgtagcccatcatagcagatcatcacaactgctgtcaaaggtgttagagttggtttccctgcggtataagctccgagagatcgttgagagagaggttaaagcttgctaggtaagtaggttgcagagttcattcctcaggaattcaaatttggaagaaatttgaagaggattgatctcagtagttattggatttcaagggcaacttctatgatctttggaagcatgcaagatgcttgagtttcttcatctctcaaagaaatcaacatttgatgtcttccccactcggttagggactcttccctctgtaactactgacattcagattcagaactgttaaaatcatggaacacttcaccaatcactaaggtagttctccagtgaagttgcttttatacaaatcaatgatcaagagaactcgtttcatatcaacagagaaatttcttttgtcagtctgttgtttgaaacatcataaaactctgttgatggttgtggagtcagcagtgatccttgagttgagctggtagagaaatgtctttaagatggcccaaaagcgccaatatctccacgtcaattgcacaaaggaaaaatactaaccccttgaacttcaattgcaaccgtgcaatttattttgatgtagctcaatatggcatagttgggaaagtatttttaaccaggaagagattggacgagtgattaaatttagtaaagtttagctgggtgaggttttgaatagaacatggtacgtcgcccctaaaattgctgaactggctaaggtttcctatagccaacatggcatctgaccaattgggtgaggtttttcaaggtctagcaaaataagtttgccaattgaagacggaatatgtgctaaaaattttgcactatgtaaggttctacacatgaaaagattaagttttagcaagtagcaaaaaagggaacagcttcattccacaaagcacttgatttacaaatcaaagcatcattg

SEQ ID NO: 378447 - DNA, 4204 bp, Cannabis indica
ctctctctctctctctctctctctctctctctctctctctctctctctctctctctctctctctctctctctctctctctctctctctctctctctctctcctctcttcggctcaagaaaaaagcccataagaaatcaagcttcttatcccaaatcccagtccaattgttgctagaaatcaacactaggtgctaaccaaaatcttgaggtaattttccccactacttcttaatggttttttagggttttaggttattttttttaggattatgtttgattttggatttgtagattatattcagttcagagcatgttcttaggtttagttcaaatttatttgagtgttaatttcatgattcttgagatgttaggccttgagttgggtgagttgagttcaagaactcaaaaactcactcaacaatggtgagtttataattttagtttatttctaagttttgaatgatgaaatatgttttatttatggtattaaactattctagaaagtttcattaggttttgagaagttttgaagggctttgaagtgaaaaactcgagtttgggatgttctataggaaaaacagcctaccatttttatagtccagagaaacggtagactgtttctggaaaatggtggaccattttgggatgtttccagcagctaggttttgtgtttaattgataggagttcgtcgagttttgagtttaggtcttggttcaagattgattagattatttaccaaattattattttcgtgacataggccctcatatcgtcgagcatcattccattcaggtcggtccgcacacctgactttggacttgaggtaagaaaagtcaattgcactgcttagcatgtcgaaataagatacaatactgttgttaagaatgagttattactcttttttgaaactgctgttatgtttcttacttattgattgctttattaagcaatgatagtacattagagactcgttagaaatgagggttaaggatgatttataaagtaattggtttgtcttataagataaatagttgtttttgaacatttgattacgctttgaatatttgcttaagctatatgttgcaatgtatgttctgtgatactaaaaatattgtgctatatgtgatgttgtgtgttacctgcttttcttgttgaatctttatgactcacaggtactctgtggtgcaggtaaggaaaggggaaactggaccagttgtgagtcagaggtctcccagaaatgtacatatcaacctgccatgttttggtttcagttaacaggatcttccttttattgtgttttgaatatgtaacaatattttgtaataagcttattttgtagtatttagtaaagtttgtaactaaggggatccccaaatctagtggtattttgaaagaaaagtttaagttatgatttaaataattttattaaaagctttaattaaaccacatttttcttaaactgtcagtttattattctaaattattaaaggcacacacgtggcacccttgctgattaggacattacaattatacactacttgtggagcttcgtcttctttgtgctccagaatctccacctcgttattttgagcatcattggccatgatcacaactggaaaatagtaagaaaaaaaccgagcagttaatacccatattaacaaatataacaaggatacaagagattcctcccctgacactacttagagaggtccccccggaccctacatttggaagcaagatcctcaaggaacattgcttcaggatgatcagatcgggaatacagaagattaattgaaaattcacaggatatttcattcgaatccataaggatctcagacagaggatttaaattcagctatgcttcaatgcattttgccaaagtttggctacccaacaagaaattcattaaagaagatagagtttcacaaaagctaatattgacaacagatagtacacaaaaataaatcaacatcttagtttcaaaaggtgtctagaaccgatctgaaagcataaattctactcactaccattcacaacagagatgaaagcatcaaaaagaaaaatcaaaatcaactagatacactatcctgcaagatgtttgtcctaccaaaaatctaaatacatttaagaattccagaagtgtaagagattacttatgtattgaaggtgaggaacttggggaaggaattcggacgtcatgtgttggtggcagtaaaagtcctgcagttgaaggatgatcgagatgcacaacccttgactgaagagcacaagtttgatttataagtgcttcagtttttcttgaatatccattggatctaatggatttgaggaatcaatcgttagaactgggggtggtgctactaattttaatcttgaacgaatctgaagaagaagatgaaggcactcgtcaaaataattggacattcaccataaataatttttgtatttttgtgagattcaagctcagaaagtaaaatgtgcaaaagtggcaaatagatgtttttcactttacttatggattatatatggcgatttgggtgctcctgcatcaatggtttagattacattcaagaaaatacaaatcacatctaacgatttggaaagtagaagggttagcattaaatgactcatatagatttgggataattcgaatgatgatattagcctgatacacccgctgacatgatcagctgtcattttataaattcagacttcacacgttttctcaatgtgagtaaccttcacgagccaagagaacaatgccacgtgtaaattatatttcgaaaggggcaagttgtcatccattatttgttggcttggaatttgaaagcgtccaatattctttctaaaacatccacgtgtcttcatactatctggaaggaagattacaagcctccacaactcaaatgttctggaagcttgggggtaaatgttatctgtattttcgaaagagggacacatgtacttctaagatccaaattcaattaataaaaggcccagtttatagacccgatcaagataatagaccgaatttacttattcgagccatcaaggttctggaaagacatctcgtctagatgataagaagggtccaacgaagaagagcatctggatacctaccagcgatgcttctagaaaggtaattaattcgcctccagatgtcaaggttgattcgatataagaaatcacatcacatcaaaactttatttccaaagtgaactccagaaatcaagcattccatataagaaaatatggtgattgtcaatcattcattaaattacatttattacacgcaaaaaatgacatatgttttctacccatcatcaagcaaattcttcgtaagcatataacaatagcctcacgggctaagccttatcaaaccggcctaacatcaatatattatttttatttatcccattagtgggccacgtttatatggaaaactctagcatataaatagaacaaggattcttcatacaaagggttcgaatttttttttttacaagttaatgctaaaaatagggttcataaaccatggacaaaaacacttgcgaaatattgaaaaagattttttagctatataatattgactcgtagactaaagtttgttaatatcgaatcacgcaaaaattttcgtctaaatttctatattctacttattttctttagctttattatatttttatattttgtttcaaaaaaattggtaaacatgaatatttttattagattcttttttaattttttaaaattaatagaaaattataatttttaaatttgactttttttttaataaagttactttgacatctatttctctgtccacgtggattttgaggtgatttctatcgtattaaatattattgttctttatttatataataaaaaacaaaatcatacttacacagttgtttaaaaatttttatcttgaagaaactttgtttataatagatattgtgattattttcaacttacaaatgacaatgttaatcaataaaataatgctagttttaagtttaatacatatattaaaaattattatctttgttttatattatattatacaaatactttcatatctatatatatatataaaaatatatatatatatttctgcattacatattgaggagtgataattataactttatacttaacttctacatttgaagtcacatgctaaaatattttttttctaatttt

SEQ ID NO: 378448 - DNA, 5390 bp, Cannabis indica
gagatggaaatagattattattggagattaagaaacaatagtctttttttaatttttttctatgaaatattaaataatttattattaaaaaaataaccgatccaaaataaccgatccaatccgcactattgcggattggattggattggatttaaactcttatgcggatcggattggatacaaaatatgaaatccgcacttagtgcggattggatgttgtttgaccaaaaaagtgcggattggatcggatgaacacccctactctcgatttttattctggtcgtagcattcttgaggataatgttttggttcatcttcaggccatttgtattctgaatgaagttgatatttcattttacaaaaaaataaaataatttaaatgtgttttattatatatatagaatattataaaaatattatataaattataaaagaaaaagatattttaatttttaaagataaataaataaatagaaagatatattttatattaagttttagagtaccaatattgtcgtatgagaataaaaagggcccacccgagtcccggtcacagtgagggcttccgtagccgccacgtggcaccgcgttttccttttctctcctactatcttcgacggcgtttaccagtctctcaaagtctcactctcctttctccccttcaaaccgtttcctcctaatctctctttctctactattgaacaacaaaaccccagaatcccaattttcctatccattttctcgggaatgtttcagaaaatcatcagcccagaaaaatgaacaactagtccgtaaaaagatattttcactggattttatttttaggggtttccgttcgaagctctgtgtttggaggatttagatggatttagttctctatgcagcatatacctcgatttttcaccaatagaaaggtaaacaaagacatggattcgaagaagggctcgaggaagccgcgcttggagcgccgcaatgctgcaaagcacattgactacaacgcgacctcgtcgtcttcgtcgattgaatcttcgccgtctccgtcgcttcatactcgctccctcgatttgtcggaaaagatgagttttcgagtcgagggcaccgacggcgagtttgatcggatttgccggagtttggggctttccggtcctgaagactttgctatttcgctggcggcgtgggaggctcggaaggtccgatcgtcttctgatcttttgcccaggtctaagctttaccctttggatagcttcagtgattcgaagagggagcaagacgaggatagtggagcagcgattgccaaattgtctgataggtttacggatgctgcaattagggatgttactgagtcgactcgggctcatccagctgagtctagtgggtgttgtactgctgacgacagtttttgtgctggtggcggtactgccgttgttgccgttggaggaggaattaagggtgtccggccaccgttgctaaagccaccgccttcgatgaggcttcccgaggttgatctcacgagctcgacctgggaccttttaagggattttgcgcccgacgacaaccaagattcttcacgaatgcccgttgaagattatgcttcttcggacgaagaacgcacagaagaggaggaagaacaagaagacaaagtaaaacaagtgcagacggaagtcgttgaggatcgaaacacagatatctcagcagggaggcccgccgtcgtttctgagaatgtgccgccctctgaaacgtgttcgttcacaacgtctaacgatgacgactcttctagcagcaccacagagccctcaaacatttctccgaatgggagatttaagcgtaatatttccaattggctaaagggtgagcttctggggcgcgggtcattcggttctgtatatgaaggaattgcagagtaagtattggaatgttgtgttcaattgttttccgtcatattttctgagattatcttcatttatttcatttcagttgtttattgtcgccccttattaaccctacctaccgttcattcattagtccagaagtttcatttttctttggaatcttaccaaattgataatttttcttttgagataaccaaattgataattgaagattgaagattttagagttttattagatagaaatagggatatattctcttacagaattgatggttaaagattctagggatggcattgttttattagataaaaattagcaattttgtggctttccatatcggtgatggaagcaacgtgtatatccatgtaggaattatagtaccatgttgtctgtcttgtcacttaattttaacacttgttttttggcactagctcgactttgactggtaaatattattagttaaaattaatgctgcactccttgcagactgccagaagaattagaactaattactgcctggtgccaatgtgttgaggtgctttgtagataaatatcaaactctaaaaattaactgaaataaaaagaaaagaaaattcttatttacagaaagtatgacaaaagtaggtagagagttaattttggtaggtttttttggttctgtagaataagtagttattattataatgacaagtcaagaatttagtttaaacgcagatatttagaatgtaaaggttaacaattgtgatatagtgttttttttcttttggtgtgtgtgtgtttggtggtgaaatgtcatacaattcatttcaagtttgttttttctgtttcctttttttatttgtctcatattgttgacaatttatatgccttagctgatcttcattgattttccattttttttcccagtgatggtttcttttttgccgtgaaggaagtttccttgcttgatcaaggagatcaaggaaaacaaagtatttatcagcttgagcaggttagacttaagggttgcttgtttgctggcttcatgtagcattctgtgtattttatgtctatgctatactatttgatcttggtgaatgcgtgcttcttctaatcccgtgcttattattttcaggagattgctcttctaagtcagtttgaacatgaaaacatagttcaatatcatggcacggataaggtatagtaattgcagatctctttgtacatattcttgtcacttttaacttatacaacaattaagttttcatttttagagtcaaaatcaactttattgcgtactaagcaaatactgattgatgactcttacatggttcataacttttagtcttgttagtaattttgcaaaccaagccgggtgagggaggatgaatgcctttggtactgaagcgtattctgaatctccgatagtagaaaaataaatgtttaaaaggttatagagtttaaaaaatgattagttattaaaaaaatcacagggaggttacttgcgaaggttgtatgcaatctgttatttgaaactaggtttcacatcctacaagactgtacagtaggtttctcggagttttggtactattagaggtggcggttagggctggcaatttgtgtattcgtgtcttgttttgggtcaactggattttgataagacacgattatgcttaacacgaacacgacacgacacgattaaataacgtgtcataaaatgtaaacaggaacacgtcacagtcataaataggtaaacccgtgacacgacaaaattaatacgatatttaaacatgccatattcaagtcatgttaatcttacatgacacatcaacatttttgataagtttaatacctatttttcccacataaatagaaaataaacaaataggttcaaatttgtcattttaacatgtataatctattatggtttcattaatagattaatacattggctaatttcatgtcatattaatatgtactgaatcgtgttaaacatgtcaatttcaggtttagtaggttaacctgtgttcaactagaaatttaatcgtgtctaatcgtgtgtaacttattttgacctatgcgtgtttatgctaaacccaaacctgctaatttcatgccgtcttcgaaccattttatcatatcatgacctatattgccacccttttacgggaatgtaaagataaggtagtaaattaggtttttgcagtggtaagtctaaagtaaataggtgcctagtatgaaaatgatgtgaattgaatatatcatgttgcttgtagtctctcctaatttgtttcatttctgatcatcaatttttttctaatgatcactgcaggatgactcaaagctttatatttttcttgagctagtaaccaagggatccttgcaaagactttatcagagatataatcttcgagattctcaagtctctgcctacacaagacaaattttgcttggtttaaagtatcttcatgatcgaaatgtggttcacaggtaagagaagtatatataaatgtaactactatgtttcgtgcgaaacatttgttcactaatgttctcaggtattttgggcttgtttggttaggtttgtgctttcggctttggcttctcaagaagctctttctgaagaagctataaagattagcttcttctcaaagagctttttatcgttttaatatgccaaagggcaaccaaacccttaaattgcttttgattttaagctttaaaagcccaaaagtggaaaagtggcttttgagtgcctagccaaccaaggcgtgaatcttggtgacgcattgatgcttatctctttctgtttttaatttattcaagggacattaaatgtgcaaatatactggtagatgcaagtggatctgtgaagcttgcagattttgggttggcaaaggttttatttctgatttctaattttctttctggttacttctgaaatgagtttgaatgtgtttcgtcccttactttgctgcatgtactattattccaggcaaccaaatttaatgacgtcaaatctaccaaggggactgcttgctggatggctcctgaggtttgtccttgccattttatattaaattaaccaaaaaatggtaccattttatggatcaaaatggatcaattgattaatggcagtctcagttactggtggagataattattaggattctaagtattagttctctttcctgtaatggaccaaacacatatacaccaatatggtactatttcaaatatgtagaaattcattgcctaacctggccaattcagaatctggctagcagcagaacacattttcttggtttgaaaatttttctccgaactatttttagtgtagaaatatatggcttttttaagttttatctcatgtggttaacggaatgctgaaatgactgatgtgtcattgttacatcagtagtacatgtgtaatttaaaatgaaattgttataagtataactatgaatttatatatatgcaatgtttaaaaaaatgcaaatgagccttgaggcgtttttttt

SEQ ID NO: 378449 - DNA, 2057 bp, Cannabis indica
ttctgatacttgtagtgcagtttgatgtttgagttcaattctaattttttttttccatttgtactacctcgagcaggacatatccaatagggaaggtttggcttcagagagtgactggtatgatagatgttacacctctaggtaattcctctttgattttattggattgggaaggatgcttagaacattatttatttcacaatgaaaatatttgatctctgcctcctttgctttatcttcagactgttttcaaggctagtcttaccagtaataatatattttttccccttcaacatcatgcagtgtaatcccaataaagcagatgttggatgcaagacctgatatctgtttgttggctgagtttccatcagaaggaaggttggtttattcttcagtaattgttgttggttttggaactacaaaaatttcacttaggatgataaaaacaattagtagtaggagatatatttaccgatctcatattgggtgtggattgttttgcagttacattgagattgatcaaatgtttgagagtgagctaaatagtgatatcagtctgccatcacaactgagtagtcatacttcagatggatcaatgtttatgagtttttctgaaagcagttacaatagtgaccatggtagtggcaatgaggatggtcgagatgcaggttttgttgtttttgaggaaagctcagatgaggttgactttattgttgtgtgaaataagtatctagtatggcaaggattgaaatttgtggaacaattggattaggtactccctcacaccctcataattacaaacacatattcttgcaggttgcaggttgtttctactgattgcatcatcatgtggatttcagcttcataacttgtgtttgtgtcactttacattacatttgttgctaattgcacgtgcattacaaagactggtcaaagttttcaattcctattttctacacagataaacacagttttcagtacattcttatacccctaaaagaaagaagggaagaaggagcgtgctgcatttttcagaatatatagttaaattatctgttcataaacttgtattgctgcattttgtacaaggtaacagtactcttattaccctgtgcacatgttttgacaaacagcgtagaggtgctacagaatttggaggctctatctaacacagcttgatcaagtgtggttggcaaaattgagtcacataacagtgattatggcatctcatccttgcccctgtgccactttggaagctgtacaagcatttcagcttatggttgtttgagttctcatgcttgagagcaagatgtagtcatttgaagggccttccaaatgtttttctttggcttcatttccattgttaatcatatcattcagaggtcgatagttatctttttttaactccctttcaatttgcatcgaaagagctcttcacaaattcattatggtttgtcgttaatatcttagctcagaaacgggcaaaacatgttgcagggtcataacattatttacgaaccaaaaagaaaagaagacaataaaaggggacatcgcaagtgactgactacatgtatgtatagtactagtttttccttggtttttctggttaaatggaattttggcgttagattgtaagttttttgttatgattagtgttgttatataggcgggtaatccctgcatattttccattggagacgaggttgtgaatggggcgggtaatattcaaagtggacccaattatttaaaaataagataaataaaatcggtaaattacataaaaattcaatattacacatgataataatttgaaatatatgatattatttaaaataaaatgaaaatatttaaaaatttaccagtaaactatcatacatataaagatactaggtatggggccggcacgtgctttcacaatttatttattttcactatatttttatatattaaaagtgtctatctaacggtagtttaacgattcttggtttaacgattcttttttttttcatttagccttagattaacaaataaataaagccaataattaaacccaaaaa

SEQ ID NO: 378450 - DNA, 1774 bp, Cannabis indica
tattattttttgtttttttttgaaagaacagagagttcattaagaagagaaaaacagatgggttacacagggggtaatccctccccaaaataggtaccaacaataaggtcagagactctaacctttttggctagcccatcagcaaaggaatttaaattccgattaacatatctaaaaacacaactattaaactgcttaattaaatccaaaacagaaacagaaatatggtaaatagaccaatctggtatactcctcttcttctccaaggcttggaccactatctgtgagtcggaaaccaccgtaacatcaatccaagcattctgaagagcccataccagagccgatttaacagcctgcaattcggcttccaaagctgaaaaacaggggccccttgagatgttgtattgccacgtactattttcccaattgatcattacagttgctatgcccatggttccctccttccaggaagcatccacaagcaacaccctattgtgctccagatctctcaaattgagattattagcggcagtactggactatatagatccacatatataccatatatatccagaaaggtaaataaatcaactaattaaaaataattgaaggtatatatatagatagatagatatatagtaccaagaagaagccccattcctggcaagctttttggaggtcatgaagaatcttggaacgttgttgaggtgagtcagaggtgaggagtgagaaatcaatgatgggaattgaatggtcaggatcattcaagtcagcttcatcatcattatttgggttcctaataaatgtgtattctgaaggaactgatctaacatctcttgattctaccaatgctttgataccgttggtaattgatccaatattatcatcatcacatctctgctttaatgaagccattgaaaaaactatacaaaatatattaaagagacagagagagagaaagagagagagacaaaattatggttatggttgagagagtagaaagctataggtttctatatttaaagagatgtacgtacatgaatcatgattgatgatgaatataattaatgtgtataattagtagaatgctaagtctccaaaacagactataggtggagttttttttactaaaagtaaaataaggtaatttcttctctgtagtgtaaaccactaaaccagtcggacccacgtcaccggccaacacagaaatgctttaaaacttgagaatagtctttctttttgactacaaaaaagctaaaaattacttgttaaaaaatttaaaaagttgtcacaaaaaaaaaaagtttggtaagcatttaaaaaacaatttattgaataatttatgaaaaaagatataattaaaagttaaattgttttgattaaaagactctataataaattatttttactaaaaatttatttaattatttattatatattataaaaaataaaaatattttttaaatgaaaaaatatttagaaataaataatatttaaatttctaattttttattttattttaaaaaatattttatatttatattttatttattaacaaacaatatcaatttatgatttttataaactacaattttatcttttacaagtgataaaaatacaatttaaaaataataaaaaaaattaatttttaatcaaatgcatataaatttatactatagaaaaaataaattaaaaaataatataaaaaaataaaaattttaatataacatatttttatatatatatttgtgattataatgaattagattaaaat

SEQ ID NO: 378451 - DNA, 6368 bp, Cannabis indica
gaatcgatgtgttgcgaggttgattaagagtaaatttagctttagagtttaaatgttttgtctcgtttactgtgccgtctaattgttctctttccgattaatcgcgttttaaacaacctaacgtagcttcaagaactatgtcgaattcgttatttttcttacagtagtttacactttgatatacatatattgaactagcttcttcttgctgtatcgaaatttttaccgattatgctccaaacctttttgcgaaactaattatgatacaatctttgatatgagttcacaaattgtgaatcctgttgtttttttttttaattttttttttggtttcatttgttttgtttttattgagttttttctttctgttattagttcatcggatttacaaacaccgaggggtgaaaagcttgcggattcgccgtcttcattggcattgatggaatcaaatgtaggtggtaatgtcagagctggaccgtcctatcagggtccagagtgtaggccatgggaccgtggagatcttatgcggagattagccacattcaaatcgatgacatggtttgctaaacccgaggtatggttcttctacttctgtcatccaatttgatagccttttgcctttttctgtttttagtttctagtcaggaataaatttctgaatttgtacctttagtatgttggtgctggaactgtaaatgttctttttattgtagcttctcgaataagcttgcatggcatacctttattctgaagttcttcattcagttctagagtggtatgaagtaggagcatatcacaagtaggaaagagttcggtttaagtattgcttttgtggcaagtactcatagaagataaacgtgattagaaaaatgcaaccttttaatgttgtgtgtttacttctgtgctctggaagttgacagtcatggaagcatataattcttgcaaacgttacttcgaataatgctctcatttaatcttttcttgtatgaaaagatagtctgtttctcttgagaaaattttaggaacatctatgtaggtttttgaatggtagaaggccgttcttttttatattgtgttgggaacactaatgtccttatcaagctcatttcattgctgcaattaaccctcaagctgtgctgataaccttactgaatagtttcatttatccggcttggttaaaaaaattctaatttttctaacttctctgtttactatcaggtagtaagtgccttaaattgtgctagaagaggttggatcaatgtagacatggacaccgtagcttgtgaaacatgtggggctcgtttccttctttctacaccttcagcttggaatcagcagcaaggtatgcttggtttatcttctaccaagttcggatttatcctaagtattccaaataatggtctagttgcctatattttgctatatttgtaaatggagtggaatcaccataatttgttattggtttcattagtatgacatttatttgttttctccataattttctgtcagttgagaagtcggctgcagtattcagcttaaaactggacaaagggcacaaattacactgcccttggattgataatgtctgtgctgagaagttggttcaatttccaccaacaccacctccaattttagttgataaatttaaagaacgttgctctgctctcatgcaactctctgctcttcctgttatttcatcgtcagcctttgagtacatgacaagtcctcaacttgagcaaattattgaacaatctttagtgctggagtgtgagaatggttgtgcagacatgtcaagagtagagtacctcagagatgaacatgatgtggattctgagaagaaatattatcaggttcaagtcctacacatgttttcatttgtaactgtcattacaggcaaatgattgctttcttcgcatatgatattttattagcatgttgatgaatgtgaactcactgactgtaacagtaaacacattctcaattgttcttctcttgattgttggtatgtgtgcaacttgagtattttaattttaatgttaatttttaatttttattaatataattttcaggcacagaagcttataagtttatgtggctgggaaccacgcgtactgccttacacagtggatactgggaataaatcaagtcaaccctcaaaagaaaatgtgccagagtcacctaattcagctgctcatgatctgaataccgaaatccatgtgctatctactagaattaatgagcctacagaggcaaatgagaattccaacagtccttatatgccacgatctgatccaaattcggctgctctagattgcaggctctgtggagctagtgtaggattatgggctttctgtacagtaccaaggcctatgcctatggaactgatccagctggtaggatatggagaaataaatggtggaaaccattctgaaatcaatgattctcgcaccgaaactaattccataaaaaggggagagattatacttgctgattcagatattacaacattgactaaagagagacatcaaagtttaaatctgactattgcagggggtcctccaccaacaaaacagaactttaaagctacagtttccttgcctgttattggtcggaatcttagggctcgatttttttctgattctaaatcgagggatcctgtagtctctgatcaagaaaaagaacatgtcaatgaaaatggtgatgaccaaaacacatcaggtgtaacaggtaacagtggggatggtgaaggcgagttgcatattcctgtaaacaacggtcttgtttctcatgatactggtaagcaatattatcattttgttcttttcttttgatcatgaatggctgacttgaaatgtcatgcttgtctgtgtggtttattgaagttctccaatttttggcatctggttttcttcgaaatatgtaaatatgtgttcatattgccttgtttctgtgcaaagttcctctgtgataatcattaaattttaattgattagtgtgtctgctcataagtttcatatatgacacctatcgagccatttttaggcaagtggttgttgaattctacaaacgttggagaaactctcatggtttttaaaagaaagggtttcgttgtttctggtcacttctgtgatgtattctttgtttcatttttatttcaatttatttaactagaggtaatatctaattatatgttatcttgtgggcatcaaaaagataaacaattggtttttaggagttctttggcaaacccaattttgacctctcgggtctattaatgtagtggctcttattttatgagttcttttgatagtgatgactgcattataatgaatcagagctttgatagatattcaatttgtcagtcttttaagagctcttctttcaagaagcttcctggtctttttttgcctcaatgaaactgagaaaacatttttgacaatccttctccgtcttccttctcagggagcaatctaataaaacaagtgtcatcagataataaaatggagcttgatcccgtcaggcagcacagacatttttgcccctggattgcatcaacaggcaaggggacacctggatggaaacagactttatctgctttacaacgtcagcaaaggagttcaccaccttcatctgagagatctccattgtcatctattattaaggtatttcttgaccttcattcttgctagcgtaagtgaagtgctaggttgtcgaagataaaacatctcatacttgcacttgattaattcactgccataaattacattcggccatgttcaaacctgttctgagtatgataaacgcacaaacactattaagatatctgctcacgctatgtgcttgctttctcctttgcatgtcatttttagtatattgttatggaactgttatttgaccaactgttcctttgcattataacatttctgcaggtagacgatccccttgcatctgttagaaatatttttatgtctccatctgccaaaaaaaggaagtgtgatgttttatcaaccccaactactgagaaataggcaaggattggagatctcatgtttggtgaaatgatcagatgaaagttaatttctctgatcattgatctcttatcttcagttaatttatctgcatttgctgccaaactactgcttggatgaacatggtgaaacttccattggagaatgacacattacctgctaggcttcgaaattcaagaatttggtatcgagaggttctttaaagcaagataagcggataattgtactacattattgtgttgctcaaaaacaaaaagagatgcaaatatcattgtgttactccagcaagccacaatttttcactaccacctttgagtaagggcgattgaaacctctttctgcaacaacggctctcttgtcacctatgagcttggccacccttcacaagtggacaaaattgttgttagtgcatttattgagaggctaaaaaggagtgtctgaaaatttgtgctgtcatggtttgtaagaaaataatcgagactttgaattatacatttttaatcctttccatattaatatcacacaattttgattgctttaattaatatgatatgcaagagcaagcagctcttacaggcgctagtatttaacaatgaggagtgtattatgacaatgtgcagagacagagaactcatttaaaaatataagacttgaagcaattaacttacctaaaataaggggagctggtgttctcctgcacagtcttgaccttgctgatcttctccacgacttccatcccttccaagactttccccaccaccaaagccgagtcatccagctccggtgagtctttcatggtgatgatgaactctgtcccattcggagcggccttgacctcctcctcatcaatctcaagcttccctcctcttgcaaccaacttctgtttcggaggtggcctcgaaggatctctgacaacaaggctcactgtcccagccaagtttttgattccagagcatttttccttggctctttcccactcttcaagaagattttgggcctctaaattgcttccagttctgctcgccatctctgcgtcaacaccataggatctcaccccgccatgctgaacataaccaggcatgattttgacaaactccttccttctgtagctgattccagctgaaccactaacaaggttagctaatctagtagctccaagtggagtgtcgtttccgtacatcccaatcacaatccgacccactggttctccatcaatggatatatctagaaacgctctctttgttaagttcttgtcaccacaaatagaagcagagttggtatcattctcattttcttctgcttttgcttcggacgatctgaatggctctacgccaccttgaaatcccaagaggaaaagcaagagagaattggtacggattgtgagctcccgccgtgagaatttgcagcattgtttaaactttgaataagattgggaagtgggtaactcttggacttgtggattagccaatgttgatggtgttggaggaggaaggaactgcgttgagggctgcaagaactttgggctctgtagcatcttttttcgtttggcttcttttctttctctcttcagtgaatatccctttcctttcctttactctgtttttctggttgattttttctgttctttttcctccttttttcttcttgggttcttagcatgtaaagagattttcgtggataagaaagttccaaaatccaatccataattgctttataaatgtctatattatgtggcacttagtattacttgccatcaatacccataaataaatgcgcaaaaaattattttccttaatggaataaaaacaagtattagtaaatctgtttttctccatcaaaaaataaaataaaattgctttgatctatgtttataaaattttattttccacatgtttggtaaatccaaagtaaaaataattaaaattgttcatttttttttttaaattataaaacaaaataaattcaaaatcttaaaattcatgcaaaaaaaaaacttatcagggaaatcaaattttaacatgtattttttatttttagtctttattttcgattgagtatttaagggaagagtaatttgcaagcgataataccaaatattgttataatatataatatgaaaatacagtatatatgaacgatatgtaatgcgaaataaactaaaaacatattgaaatgtatatgcaatgaaagatcgaaatacttccagctattgatctttgagcttcaatccctgtaatagcttcggtattggagttcgggcttcctcgctctctcaaatctctttagatggaattttactgtataaacagaatgagtgaggagctcggggaccgagaccct

SEQ ID NO: 378452 - DNA, 4352 bp, Cannabis indica
tttattattttactgctttaatatgatttttaataatttgttcattcttattttctccgattaccattctgctcattactaactgatcggtgattaaaattttagtacactttagtcaattttctcacacacctatataaatatatgtaatgatttgatatcagtcagattcaacatgatatcgagcaagatcgcactaagtaaatgaacaaattaaagtacataaattgaaattaaattaaaactgggagaaattaaagctaatcaaactagaaacacatcagattgagaacagtcttagaggatctttattaatcataaactaatatcgacatataagggagttacaatcaaaacaaaattataaatttctcacttagacacataagatcaaattatgcactgaacaaccctcattttctctcttcgtatgatctctcctttacatgtcaagtcgatcacccacactggctgacttagactaagttccctttttatagagttagtgagctataaggcaaaccaactaacttaacgtcagccttataacaatcttagtggctgaggctgagctgtacataacaatataagatgttgatccccaaactcattaattactcatattccttatttcaaaaactacactaattaaaaagaatgctagtgagagtttgaaagatttataactactaatttctttatcttttatttaacaaatctaaaagatcaatatgttagttggattttacataagtaaatatggctacaagtatacaatctccttccgtttatataaatattgtaacaattggagaagaaaaagaaaatcgttataggtcggttataacctaaataggttgtcgttgcaaataataaaaccaaattaaataattaaaatatatataattaatgcatttcttattataattaattaaaatacatctgcaattaaaattaatgatgttacgtaaaatacatgcatacatatatatatcatgaccaagtaaaagcaataggactcccaacaatatgtttcccatctgaccattccaggtgaccaaattgggaagttctcttcctcacgacagtactagtaaacgtcactgtgtaagccagcttctgttttttatgtgtgaaggttagtgaacttggattcaccacaattttcactgactcaactttcgatactttcactttatatgttgctggggttcccacatttgtcaaacttcttgtgtgcgtaataatggtacttgtagaaccattaataatattagtatttgcattaataatatcgaaaggaactgcaaaagatggatagttaaactgaccaaggtggtcatttgttccccttaagtaatcctcgcagttaatatctctattagtaaccagcttaatctgtctctgcgtgtagtccgacacacacaaaaaccacacgtagtcttcaggagtaaggtcgtaaacaagtcctggatcgacggcagccacgggatccacgtgtccagatccgtaatcaaacggcgtggcatcgttctctgtagtgatgtcttgaatgggtctaccgttctttcgatcagtcctataagaggtagtcatcaaagcagacttaatagcagctgggctccaatctggatgtacggatttgatgagtgccgcaattccagagacgtgtgggcaagccatggacgtacctgatatgatgttgaagtcaacgactcttttgtcactactcaactcggttggcccacttgttccgctccacgcggctaggatattcactcctggtgctattacatctggcttcacaatctcgggggtgataggatttggacctcttgagctaaaatctgggacgattggtgaaggtttaactccaaatccaatctctgttccctttatcatcattgtagcagtaggattaaccactgaattgagatatctcttgatttcgtttatattttctaccccaatagaaattgtaggaacgaaatcggcatccgctactatcttatcaaaataattagattttttgtagatgtaaaccattgctgcaccaccagcgtcttttagggccaaacttttttgggttcttgcggttcttccttcgtagcaaataactattttcccggccacctcatggggagtaagtgtgccagctaaacaataaccaccgtacacagatctactgactctcttggcttctacgattggaaaccacttattattgttcaaatgtttgggttgagcgaaggaggaaaggcctttgaattgtcttccgttgccgagtctgatgtaggctgtgaaatcgcggtctattgtgcccgcgccgactgtcatgatccacggcgcaatgttggagacgctcttggtttcgggacccttgttcccggccgatgcagatacgaagataccgcgttgcatggcagcgaatgtggctattgctgaagcatcgtcgtagtaatcagttggggttctcccgaaagacatggacagaatatggactccatcttcgatagccttgtccactgcggctattacatcgctaccgaaacatccagaaatccaacaaaccttgtaagaggctattcttgcggtgggagccatcccgcgcgctgtccccgaggcgaaacccttgagattagccccaaggacagcggatccggctgcagtggcggaggtgtgagtcccgtggccttcgttgtctctgggtgatttggattccagtgtttggttaattggaccggcacttgcttcgtagcctttactgaagaaccttgccccaatcagctttctgttacacccgaagttgttgttgaagaacaagtttagatcatcgtcatcatcatggcagctgcctttccaggctgctggtattgggggaaggcctttgtcgttgtagctttggctctcgggccatacaccagtgtccaaaactccaatcacaacgtcactcactagcttattgttagtatgtgaagtaaacgccgtcgtattgtagaggccaaggaagttgggagtcctagttgtgtggagcttgtatgtgacttcgggtaagacgtagcgcacacctctctgtttcctaagcaactcagcttggttttgagtgagtctggtggagaatccatggacgacgtggctgtaggtgtagagaatgttactgttggatactgattttaaagatgattgaaaccagttgatgtgttcgttgaaaactgctggcttgttggtcttgtccatgtggactatataagtctgtttattcatcatcatcatatcattactactactactactactaatagtgttattcactagtagcaatagtagtagcagtagtagtactactggccttgataattgagaaactaaaatcttcatctcaatcgatatatctcttcccaatattaattattagatgccaatttatacttatagatagaaattaatacacacgtaatagtaatagtgtgtgggacgttgagtaagatatataacaagtgtagtagctgatctaagatagaggtgcatggcaaaagttgaggcagataatccgacggttttggcggcggcaacagcggggtcgcctctagatcgaccgagccgactcatattatatatatatagtctcgtggccggctgcatggaccaaatgtggtgggcccaattatctttactattttaatcataaaaatgtcttctctcattcccagactcaatttgaattttaaatttaaatttgaaattaattaatttcttctcttatgcattcattaattaattttatatttccccaagactatacctgccaagaaaacaatgaaagcactaaaagtaaaaacattttttttttgttttcattttgaggaggctcttttcttacactactctctctatcatttaacacaaatatcaactatctacattattatcttattacaattatgccattacaataaaattatcttactaattttttacttaattggtacatatcttacttattatataagtgtttatttaacacatcttaacgatttttgttgtatcttaatggaatattttttttttttgtattttcttaacaaagtgttggctttaagagaaatataacatttgcaaatcctcctacagaaatggtaatcgttcacaaaagagatgcatccattcggctctacatcggtttgtttgggcggtttatcctatatattttctaactcaatctaaagttcgggttgctaaaatttaagtgcacccgcccattttttttaaaaaatatacgtactaacactagtgtacgtacgtaccgtaccgaccgtacctttacgtttttttacgtttacgttacgtactaa

SEQ ID NO: 378453 - DNA, 6398 bp, Cannabis indica
gtcatattgctattggcgtaattaaatagcgggctccatataacttaagaaaatatgttttagagaatatcgctaaccaatcatatagtgacatctatggaaggtgctaggcaccactagtgcccaataacaatgctcaataacattttatgatgcaaattatatataacaaaaagtaaaataacattactgattattaataaattaaacatttaaaaaataactaaaaataatattataattaaaaaagagaatatcacccacaatacagtgccttatactcttacttagttacaaccttttagttaaaacataaattttttgtgactaattgtgacttacaacaaaaagtttctcatgataaaaatatagtatttagataaaaattattgttaatttagttttagtcacaataagtattgtgactaaaaatacatttagtcacaataaattgtgatttttgtgatacttttagtcacaaacattttagtcataatataagaataatgatttataattagtcacaactttttttacattaatcattagttttgtttcgactaaaaataaattcttttcagtgatttttttcattcacttttacgttctttattttgttttcatttttatatattctattttttggtttaaacataaaattcccttcatttttaagtttttcttacaacttttttcttttctttcccaaattgttttaatttttcttcttttccttcgatgatttttatctcctttgacgtgaatgtgagattatcatcaaattgcttgtactcttttcggttctctaggctcatgtcatttctgattctccctctttgatttacgtacattgaaactttatttgcatttcaatctctactgacatgaagatgcagatgaagactattctgaaattattctcacttgtgtggattacaagctttagtcatggtttcccacttgttcttcagtatttagtatttatatttaagtagttcaaattttagtttgagtatttatgaataactacatttacttgcaagccatttgccatgaatatgtgtttatgcaattttatgcaatagttagtttgattgaatgactgatgagtttatacagatatatctataacattgaaaattttatttgagtttattcatttgtattttttttttggtcttatttttaaatatccatctactctaatattaatgtggaaacatctctaaaagttattttcttctctagagactattaacaattaaagacaaataaagtatagtcatgtttgataatcaatggcttaattatattatagattgttaggagtgtttattaagttagttagttggtagagttagttagtactgtttcgttagttattatttttttttaactaattcgattgtatccaattaactccagctgtaatctttggctatatatagtcaatgttcatcactgaataatagattgctctttgattcaatatcctttttttactgtctttccttttctttttatctttcgcttcgtctctgtttctctctgtttcttgttcttccttcctttttgttattcatcaatggcgcaaagattcaacatggtatcagagttctttcttccattatcatctaacaaagcgaacattggagctagcaccaatgctactcagaacaactcgaacaccagcagaccaatcaaccagcctaatggagcttcgaatctctgtcaaccaagaaataactcagatgagttcaatccagtgtacttcaatcacaatacgtcaattagactaaatgatcacaattttctcttgtggaaacaattggtccttgctccaatttgaggaaataggttgcaaaatgttcatccaagatcgaacccgtccacctcagttcttgaatgatgctgatcatgcttcgaacaatttgaacccaacttttcttgaatgagaggttcaagatcagcttttagtttcctggttgttttcttcaatgacagatagccttctcacatgcatggaaggatgcaatacagcgagacaaatttggagtgctctcgaaaagcactttacactgtaggtttcctctaaaatcttggagtttcaaaccaaattgcagaaacttcaaaaaggttccatgtcattgaatgactatttgttgaaagtcaagcaacatgtagatctccttgccttagttggaggggttttgagttccaaggatcatattgtagctatctttaagggtatacccactgaatatgacacattcatcatttcaaccaatacttggattgaagagtattctatttctgagattgaagctattctgttagcttcagaatcttgaataaaaaagactgatctagaataagaagctaatttgagtgtgaatcttgctactactgatgtagatcaatactctaaagtcaacattgcctaacaaaactaccccaattgcatcagtagattctccaatcaaagtcaaatcaatccttcttcatcaagaccaagagaacaagagaaggcacccatcctagaataaaacctaaatgtagaaccagtagagattgtggctatcatgaaaggaatggggaacaaaatcaagtagcccgaaaagaccaagaagccaacagatcaaagagataaaacaaaatggtgtgaattccacgatgatcattgtcacacaacgacgaaatgcatagctttgcattttaaagttgctggggtctttcaacggggacatcttaaagaattcttaactgacaaggggaagagtgtcatagctaaaggggacactaggcatgttacaccacctaaacctccacaacacactagaacttgcagtgtaacatcttgagggtttgaagttagcaggggattcaaccgttaaaaggcatgcaagagaagttataggaatggacggaaggccacagaggccagcaatgagttacaccagacaaaccataagcttcgtagacgataaagcctcagatttgctcaatccccatcatgatgctttagtcatttctttgcttatattaaattgtttaactaaatgtatattgatagaaaatggaagttctactaacatattgtttttacatgctgtcatgtggatggggattgacgaatctgccatcatccgtaaatcaacaatgcttgtggggttcagtggtgaacagaagcattctattggtgaggtaacattacacatatatgcagaaaaagtcaacctccagaccagattcttggtaaacgactcagccttaggccacaatgccatcctaggccatccttggatccatgctatgaaagtcgtaccatcaacataccatcaggttatttgttttccaactaagtggggaatgaaggagatttggggagcccaaaagatggcgttagattgttatcaaacaacattggaagacaaacaagcctcagcatggcagctacagcaccccacatcgtcaagtgtacctagagagcctgaaatggaagatctcaacgatgtgtgcatcaacaaagactttccagaacatattgtccagataggatcaaagctaacacctgagtcttgtgttcggctcattaagttcctaaagaagtaccaccacatctttgtgtggtctcacgaggacatgacaggtattgatcctaatattattgttcataagttgcaggtagaccctaatcatcctccattcaaacaaaaacaggagaaaatttgctccggaacacgaccgggttattaacgatgaaagctaaaagttgatagacataggatctatgagagaagtagactaccccgactggttggctaacgttgttgtggtaaaaaaaaatggtaagtggcatgtctatatcgactttactaagctaaacaaggtgtgccccaaggattctttcccattaccacacatagacatgatggtggatgcaatagctagacacgagttacttagtttcatggatgccttctcaggatacaaccagatactcaagcacccaaatgaccaggagaagacaaaattcatcactgaacgaggaaccttctgctacagagtcatgccctttgggctcaagaatgcaggagccatgtaccataggcgagtgaactggatgttcacggatatgtttggtgatacaaatgaagtttacatagatgatatgttagttaaatccttggttgaccaagaccatcttgatcatctgcagcaagcttttgaggtacttcaaaaatataatatgaaattaaatcatgcaaaatgttcttttgatgtgtttcaggaaaattcgtaagctacatggtaagtaagagtggaatagaagcaaacactaaacaaataagatcaattcaaaatattcaaccaccgaagaacatcaaagacatacaatgcctaaatggaaggatagctacactaatccgattcatatcaaagtcatcagaatgttgtagtatcttcttttaaaaactcaggaaaacaaaacacttcatatggatcgaggaatgtcagaatgcactcgacaagctcaaggcgtatctttcatccccaccactaatggtgaagtctaaaggcagagagatgctttacaattgcctaacagtattagcagcagctgttagcacggttctcgtcagagaagtaaatcgtaagcaacaaccagtctattatgtgtctaaaactcttttggatgcaaaaactaggtacagccaactagagaagctttccttggcactcgttacagaaagaagaaagctcagacaatacttccaatgccaccctatagtggttcaccaagtatccactccgttccatactacataagctagagctatccggaagattatagaagtgggttgtagaactcagtgaatacaacatcacattccaaccaaggactccgatcaaatcataggtattggctaactttattgcagacttctctagtaatacataggtacaagcagagaaggaattactttgtctagaacaacaactaaattcaaaatggaagttgtcagtcgacggattgagtaattgtaaatgatgtggactcgggatagtactcacaaccccaactggagacatgattcaatgatccatcaaatgcaacttcaaagctacaaataatgaagcagagtacgaggctttgatagctggacttgacctagcaaaggagctcaatgtaaagaatattaaagtcaccttaaactttcaattgtggtcaactagttcagtggatcataccaagcaaaagactccaagatgacgatgtacttagagatagtcaaagaaagactaaaatacttcactgaattttcaattatccaagttcctagattagaaaataaccatgtagatgcacttgcaaacttgggctcggaaattcaaaccaagaatgggataacagtcccagtagtgtacatacaatgaccagccgtatggaagcaactagaacaatcaatgaatgtggtcaaaaatcaatcttgggtgacaccaatcaaagaatacctgctccatggcaccttacctacatgcaagtatggatcaaggaggttgaggaccaaagcctcgaggttcaccttgtacaatgatcaattatgtaagagatcattctcggggcccctcctcagatgtctaagttcattcaaagcaaagtacatactggcagaattacacgaaggtgaatgtggcaaccactcgggaccaagaagcttatgtaacaaggctcttacaattagatactactaatcgacaatgaggacaaattcgtatgaattcatcaaaagatgcgacaaatgccagaggttcgctcaagtatcacacatgccaccagaaaagctccattcaacactaactacttggcctttcatgaaatggggagtggacatcatcgggaagatgcctatagctccaagacatagagtcttcatgttggcggcaaccgactacttcaccaaatgggttaaagtagaagcctacgcacaagttagggattgagaagtcaaaagctttatttggaagaatgtcatatgcagatttggtgtggcaaaagaaatagtgactgacaatgactcacagttcataagcctagaatttcaaaacttttgtaataaatggggaatagtactctcattctcaacacctagatacccacaatcgaatggaaaagtagaatcaataaacaagacagtggtagcatctttatgttagaaatattttaccaggacctagatttactaacaagaatgtttcattaacatcctactctatcactcaaggttcgaaattattgaagaagaaaagagaagaagaggtttcggctatagagaatagaaagaggctcaaatttcatctgacaaagttaagtgtgaatgagagccatcactatc

SEQ ID NO: 378454 - DNA, 3773 bp, Cannabis indica
ttgaagtgtaaaagtaaaaaaactcctttttatttttcaaactttattttgtaaaatagaaattttaagtcgtgaaattataaataaaaaataaataataatattttcaaaaatttctcttaacaaaattctcatactacaattatacatagtacagttgaatatgcatattttgcattgattactattgttcaacaatttatttttcacaaaattaaatattagaggacaaaactgaaaaatcaaaatttgaaaataaaaaacttactcattttatttttcttaggaagaacatacaaagttacaatatatataagataatagtactttattatttggaaaatacatgaaagaacatcatcaaaaactaagtaattaaaatcattcaagactatgattattctttgtttaaacaagggacattagggtaagtagaaatgagtcttccatctgcatttttacaaaacgacgtcacattcttccccggcaaggctgaaatcaaattaacactttccattactatgccactgcaacccaacttggcacaatccaatgtgattgcctcctcacttagtgatgttcccacaaaccctctataagttacatcacttattttgatcgaactaccctgcattataaaatggggttatttcaaaaatacacacaaaaattataaaattacggcgtaaaaatgtaaaaaaatattctttaaacgtgaaaatataattatttttacaaaaaatagtaccttatgtaatcatcccttattaaaaatacgaaaaatacaaatttataatttttttttcaaaaattttacgaatttaaatattttcttcgcaaaaatacacatggttgttttcacaacaatattataatatattgatttcaagttgtttatattttactttatattcgtattatgttgtttgtatattatttttatagcttacaaaatagtattagtttaataatttcttatacaataacttttttgacacactatagataaatactcaattaatacactctctctattagtagaatatacaaaatattatgtcattttgaaaaataactccaaaaaattatcaatttcactaactaatattaataataataataatagcaataaattattacctccaagtaggcatagtcttgatcaatgatgattggattttcggaatttaggagtgttatgtgctcaaatgtgatgtttcttgcatatccaactcccgacttaagatataaaataaattagttacaaaatatgtatcaacatttttgcttaatatttgtaagaatattattatatagacaccatatagttaacaatatcctacaaatgaaaggaattaaagtttaacaagtattaaatttaggtaaatgccaaaggttattaatgatacgtatccaacactgcaatgaaatatcatatttatattagtgtaattaaatatcgagtcatacttacgtattcaacaatactattaaattcaacatataaaatagtatcacataacatttactattccttttatataatacttacattccatgttttgattcgagcaccatttaaagttcccttaaatgtgcaatttttaacatgcacatgttccaccgtgctaggggttgttccaactcctaagcttcccacactggttttttatcattacattagtacataaattataattattaattataataatgtttatattataggggaggaagacaccaagtgcccaaaactactttgattgtaattcatccaattaggtatcaagtcttacatatggttcaaagtttaagatctacgacaagagcagggccggccctgtatatttttaaaaaggtttttctttatttgagctcctgaattaggtgggcccaaaacacgagcctaattcgctttaacctaagttggccctctcggaactttcaaatgatgagtatttttgagagtaagtgaatatcgagcactaattttatagatgatattaaataccttataccatgacctggtccacatgctatatgtgttatattgatgtaagaggagccactcttaatagaaatacagtcatcacctgtatatatataaaaaatgtaataatatttattacaatttatataatatggaattaataaattataataaaaaatgaattatatgtaaattaaattacgaaccagtagcaataaaacaatcatgtatattaagttgagaagagtaagagatcatgattccatcagtgttgggactggttttaggtgctaatatatgaacattagagatagtcactccaatgcaaccttgaatggtgatgtgtttgtttggactgttcttagaagcaaatccatttaatttaagattgttacaatggtgaaatcctaaaccctgcaatcatcatcatcatcatcatatataatcaaatgcttctccttttcaaaagtatcatgatttatatagatttttatagtatgaatgttacacttgtctttattgataatgacatctttcttttttagtacgtaaataaaatattactattaggcattctgcctaccactatggtggcgtgatataaatagttagcgatattttataaaaattattatattaaattatatgagatttgatacataaaaaaaattgcatcttctttaaaaaagtaaaaaaaaattatatgtattttttaaaaagaatttttttaggcccttaaattaggtgggccctaggtgcaggcctggcctacctatactaagatcgggcctaattaagtattacttgtgtcttttagcatttatcgtaaaaaaaattatatgacttaattttacttttttgagcattgatattagacactagtagtgtatgtcactttacaatcggttagcgatagtctctaaaagttattaataaaattatataaaatctgatatttaattgcaccatcaataataataggtaagaaaaatttagacattttttagcatttctattactttttatgtatgtaatccatcaatttatatgcacacttacgtatgtatgtatttcttttctttgtctattatacacgtacatttataaataaatatgagttataattttggtactatattatgtagtttataaattatagtcgaatatttattaataactatttaggaaatttaacacgtaccgcaggtgcttggacaccacctccctacaagaaaaaattagcttatcataaatatacacataatattaaatctatataaaaaaaaatgtatagaattgttatatatatacatgtttggcaatgttccaccaaatatctccataaccatcaaaaatgccatttccagtaacaatgagaccattaacgtttaagaaatgaagccaacttccacgctcatatccttcccactctgaaatatttgatggtgccaccacatatccatccatctaattaaacacaaaattaaaagtaaatcaataattacccaaaaatatatattacatattcgaaaaataaaaattatctggggccgtaattgtaagaccctacagggacgagagtctcgtccctaataatgtgttagagattgagacgagaattagactcgacttaagctaattgaggttcttaagctaaaagagttcaattaggttaagaataattagttctttttctaattaaaatttaaaatctaaaatataaatatatatatatagggaaatttacatgttatactaatttttaccatttttttacaaaaat

SEQ ID NO: 378455 - DNA, 3566 bp, Cannabis indica
ttaaaaaaaaaaataaaaaaagacatcaatatacgtaagaccaaaatattaaataaaaatttagtattaaaaaacaaaaggatattttcgtaaatatttttcaaacttagtggcccaagataattttctcaatttaataatatactatatttttgtattccattaaagatgctctaatagtaaactttataatttaccagcacctaataagatcatcactacttataacaccttacagtgataatttatgataattattaaattaaatacacatataagacataatatttaattacactattaataatatgacagattgtaatgttatcccaaattttgtccacctgacgtggcatgtccacataagccaagactgaggactcgtggaatacagccttgtcaatagcaggataaagtctccttataaggcatggtaaaaccatcaagcaacaagtgaaaggagttaagcaagccgtcaagaagttgcacaaccatgtttggccggcgaaagagagtacataagccggctaggagaagtttgtatggccagccagggtttgagcacaagctggtcggccaatgggtgatagttagactaaaaaagggcatgttcgaccaacgaagctagcctttgcgaagaaagttgtacaaaggttggccaacacctattaaggttggctaacacatgcaaaggctaactaacacttgccaaggcaggcacttgacttactaggccttgaaaagcacttgacctgccagaccctagtaggcacttgatcgaccagaccttagcaggcacttggccagctagaccctggcatacacttggccagtcagaccccagcctgcacctggtaggcacttagtgtgcagccttcattcgggacaataagccaagatgtgatttaggcttcaacaatccacaaaaataagggagaaatatcagctattctcttattcttggggaataattaacctatttgttatttattatttaattatgtcacaaatattttatattttctattttttttagggataattggttattaatctcttgtaagctctcatatataaagagcattaacctaaccctaatttctctaagtctcaagctctcaagttctatgtctaaaatcttaattctctatatccctctcttctacatgccctaggctttgtagaagagactaagtctctttcattcttcttacttgagattttcctactaattttcatattgtaattttaagagagccactttagattccataatccttatgatttgagtggtattatctctggtattaatacaaccataatgtcattacccgctaactagggatcaaacctctataaaagtattgtgtgtcttttacttttctattcttattgtgtacacgtggtagcatcagtaataaatacgaatctattgtcggttggccgaaattgagatcaacagtttggtgctttaattgagatcattgtcgatttatctgatctaacaccatggataagacaaggagaacttcaactacaacttctgcctcatcaggtcttcctcaagaccctatgactgttgatcttaatgtttgtgttccagacacaactagaatctccacgaatctgatggatgtgtccaacctatccaacccggtaggtacaacaaacttgaccaccacaactggttaggtcaacacttccaacccagttagtcttaatggccaacctttgccaccgaaggcaaatccaccattggcacctcgtactaagggtttggctaatgtggagcaacccccgggcaagtaatcggcaagcctcatgtggacctgggagaagatctcgagttgaccaaacttagagaggtcgtctgccaagtcgaccaaactaaagaaccatgcgctattggctacgatgcaatcacacaatagagatgcaaatttctaagatgggtggatgactaggattacatccttcgatcttaccaggcagagctagactgttgtaacagagaagctaagacctaataaggcggatcaatgaaagaactaccgagagaggtcaagatctcaccaaagatcctctctaatgtagactagtcgataaatcgagcagggtctataaataaacaatccaaccaggttctttaagaaccaggacagaccttctcttgcccgaaggtggacaattgctgccacgaagattcagttgcgagaatagcaagactctagcaaccagcagcctgggaggcaagccagggatttttggcacaacaacacccccacttggccaacctttggtcggctagccccttagtggtgcaccaatggtcggccaacaaggtgaacgtcctccctagagaatttgggagcaagtcaccccaaatgccaatctttaactagctaggtctaggaacgggtggaaacacccaagacaacaacaacttgagaagtgaatacaaccacttcagataattaggtccacttgactgcaacaattggtgtgatttacccctatcaacacacaggttgtgccagcatattaggggagaacgagctgccagaccctatccaacatagggctggcccgccaagaacagctgcctagagtagggttggccagccatggccagttcccatacccaaggctggctggccatagccagctgccaggcttagggctggccgaccttgaacataccctctctcggggtatggtcggccaggctctagccaatccaaggctgcaacccaatcaagaagggccaatcaactaggctcgtggtgtagcagatccttctgtgcaagcatagttggatcaaatatgagacatgatcaaaggtttggttgtccaccatcagaccttgagatggataagttaaggggctcacctttctccgcatacatcgatgccttacccttgcccatgttcaagatgccaacttgaaagatgtacatggggaaagaagatcccctaatacacataaaatactttcagatccaaataaatctctaacaagtatttagaaatgtgtgatgtcgagtctttccaacaaccctggctaaaatagcccaatcgtattttaagctggccccagaaagattaaattcttgagaagaattctcttgaaaatctgtcgggggggtttattacgcaaaaatgccgggacgtaagctcccaaagagggaagcccaacgaatgtcaaatgcaaagctccgcacctcattaagatcatattagcatactctcccaaaaaaagagcataccccattgaagacgagagtgaggtacaacaaggccatttatgtccaccacccttctcacagagtcgtacatggacgttaccgctcatacagctcctagccaccaagcagttagccttcctctataaggaatggaagtgtggatgaatcgacatcaaatagaggaattcaatttttctcattccttctcttctcttcctattctatttttatgggtttattatagcttagtaggaatttcttacttttgaggtataattcccgtttcttttgttggaagttattttaccatgaacttagatc

SEQ ID NO: 378456 - DNA, 1521 bp, Cannabis indica
aaaaaaaaaaaaaagcaaaaacttgctcaaacaaatggaactctgctttgatagtttcaagtaaggccaatttttcatattttagccataaattttacctcgatcttcatttagaaagcttttgaaaagctctacaacatgattcataatttagagtgaaaaatatgttttttattttagggtattttcaccatgtagtttgataggaaaaccctagattgtatacaagtattagagatgttttagaatagacacttacaaagtttactgctaatgtgacttaggccatcactccctgacatgaattttcactaagattgactggcacactcgagtctggatttgaggtaagaaaagtattcagatgcacatatacacatgtttcagttatgcatgtattatgatactatttacctagtatactagagatagcagtatggatatacatagagttgtatttagataccaatatctagtcctagagggtatcgaatagtataaattaatgctactaacattatgattggagtgttgggattagtttggtattatggttaatcatactataaacacgagcgtatggatctcaatatatgcattgaatgcaattagtagacttatggtaactgagtgtatggatatatgttgtatttatatgtatgctttcttactgagtctgttgactcacatatacattgttatgtgtaggtaagggaaaatccaaagttgaatagcactgagttgggagattggtgaagattgtacatatctacttgtctagacctggagggttgcgtttctcgaaacaaccactagcatacttgtgtaaatgtcattagacaatactttttctatcttatgatgtaaaatattttgtaactagatttatgtgatcccagattataagtatttgttaaaagtgtttgtttttagtaaagttttaactatcacgaaaagttaggagacaatatcttgatagtacgttgttggtcagcatggcagtgggtagtggaagtagtagtagttgagtgtcagtcaatactgacagtcggtaggcagtgtctctactatttgtactcgttgtaccatcgtgtacaaccactactcatcctcaggctttgcaaatgtgtgcttgcttggacggaattttcctttgtcataccgtcctagggtattctccttttgtccacaaggctaacctgacactttgagaatttgaaaaatgttgggttaagactaagctcatgaatgagagtgtggggtgcatagtccccatggagtacaagaggaaggggcagggagcaaagctcctcgtggtgaagagagagagggctagggaactggtagtgaaggagggggcaggtgttagactttttatttgggcttacattaagttttattggttttattaaaacttgggttgattggatagttctttgctgtgttagcccatgttgttggtgatcaattgttaatgggcttagcatctgtgtgtaaagtctaggtgaagcagaagtgtgg

SEQ ID NO: 378457 - DNA, 5767 bp, Cannabis indica
aaaaaaaaaaaaaaactgggggtgagaaattattcaaagataacatatgctattaacatattttgaatacaattgaaatttcttggccaccaaatgacactactacttgccgaccaagcaagtttggccaaagtataagcaacaccattacaaggtctaggacaatggacaattctaacagcatagatcttattacaaagcttagcaatatcatataatacaagacccgaaaaagtaatgatagaaacattgtttttaatttcaagcatacatttagacaatcagactcaacaacgatgttgtcatacccaaaggagagacattgagtcaaagcatttcggatagccaaaactttagcaacgtcaggatcataaaaaccttccacataccaaatagtcaaagctttagccacacccaaaacatcacgaatcaccatactcagatcactgtaatgattagacgaattaagagcaacatttgtattaactttcaaaaaactaagagggggaggaacccatttgggcattggcagaatagtccctctccgttgtgacgggaaagtagtcaacacctgttgtttgttgtgaaagtttccaagatagtccttagcccaattaatgttgagttcaggagtcaactcaatattgttgtgaacttttctgttacgtcgaaactaaattcgccacaaaataaccaaaaccaattcaatcaactctttgggaagggaaccaacaaatctatgaataaagtcaagaaaatccacacaattgatccacaagtcacccaacaaaaacttacaaatcttcctacagtgaagcaaagaaagacagccccaaagggcatgatgagtagttttttcttccaccccacataagggacataaatcatcatataagagaccatgacgagccaagttaactttagtaggaatgcaattatgggatatttgccacactaaaagtcttaccatagagggaaggttaagggaccaaatcttctttcactacccaaaaaagccattaaacagtgaggcattattcaaagccaagttatgacgagccagccaatagccactcttgacagtaaaccatctagagttcacaaaattccaaataagtttgtctaaaatatcgttcgcggaccaaggaatagaggatagcctcaacttcattagccaaaaaactagaccgagtaagctctttattccaaacacctgaagtgtcacgaagcaaagagacctttacaaacccatcaagtcggtgaggagttgacacaatatctggcggaactaaaggaatctagttgtcagagtaaattttgatgtccatacctttcccaacacgccaaaccatcactgtatcaaagagttcctttccccacaaaatattttttcgaagaaaataccctcactcggacttagtaatttcagcaaatgacctctttctgaagtacaaacatttagaacacgaccagccaaagagtttgggacattataaatgcaagaagcttgtttgccaaaaaaactcagttaaacaaatgaaggtctcgaaagcccataccaccatcttctgcatgcaaagtttctcccaggtataccaatgcctctttctttaacatcattatctctccactaaaagcaaacacacatacaatgaatatttttaacaaatactttcgaaagcttaaaaagattcatcgtataagtagggatagaatatctaaccaaaagtaacaatataattactacttaataattacatattagattagaataactatactctattttaaaatataatatatgttataaactttattatatctctttcatatcatttaaacaatatatttctataataatatacataatacatattaataagacaagaataaaatttattcaaaaaaataaacataagaataaaataatacttttgaagaaagaatatagcactctttaattggatctccaaaatacatcatgtaaaatggactataattttaccactttttttttttactttttcctttttcttttagaaaataactcctttcatgagaaatttacataaatataagaaaaataaagctaatgtagataaataaggtaagaaaacttaataggaaaaagtacaagagacaggcttcacttagggttatgttttgctagtacctacatagctcatacacctgtatttgacagccttcttaatatccatgctaatacaagagacagatttgcaactatgctcaaaaatataattatttctattaatcgaaatgttatagacaatagccaagcaaacaacattgagcaatttttcttgcaagtttttgaggggtttagaaaaccaatcataccagtccttggagttcttcggcagtctaatctccctaaccatttgctaacttcagccacaaccttcaaagtgttcgggcaatccatgaagatgtgagcatgagtctttgtcatctatacacactgaacaaagatcatctggaatcagcatgatcttgctaatgtggtctcttgtcaagagctgattattgatcgcttgccaaccaatgaatctatcttgctaatgtggtctcttgtcaagagctgattattgatcgcttgccaaccaatgaatctatgtttcaggatgcacatcttatgccaaattcggttagcataattaactttttgcatggggttagctgatatgtaaaacaaattggttttgaacttaccattcttaatagaattgaccatatctaacatgtcaatagtgtttctcagccgcaatagtttcttgaaataccagctcgcatcaagtttaaactcaacctgccaaaaatcttttccctttaagtaaataacatttatccacttaacccacaagttatcttgtttgctcgagatggcccaaacaaatttttccatcaaggttgtattccattttctcccctcacgaaagccaatgcctccatacttcttcagaaggcaaaatttttcccaagaggacaagtgcaacttgctacggttacctttagacccccagagaaagtccctccaacacttgtcaatagctgcagtgattttttgaggaagaataaacaagctcatccagaagttcctaattcctaatagaactaagtgaatcgattgtgcccttccaacaaaggacaagtttctactagccctgttgtgtagctttttgtgaatcttatcaataataactccacaattagaggcacgccacttagtcaacccaagttggacgcccaaatagttaagggggaagcttccctcttctatttgcatcatcctcaagattctttctttatgtatctcactcacaccaccaaaataagccagagacttattgttgttagctgtaaggcccgtagtttcactaaaagttttaaaagcttcatgaatatgcctgaccgatctttcatttcccttacaaaaaataatcaagtcatccgcaaagcaaagattcacaagttttaaggacttacatagagggtgaaacccaaatcctttcaagctggatctcagaatcagcagtctagtcacgtattccatggtcaacacaaagagaagcagggacattggatccccttggcgaagacctttctcccctttaaaggatccatgggtgtgaccattcatcattagggaataggaagcaccatgggggcaacgtgaaatccaatcaatgaacttggcagggaaacaaaggccctttaaaaggtcaaaaataaatctccaatcaacaacaagatcaatcttgaagatgctttgagctgagacattcttcctggtgtaccctataagaagatcttgaaagatcaagatattatgggccagctgcctattcttgataaaggctccatagttatcatgaatcaggttaggaagcacttctaagaaccgagcacagatcatcttagagatacacttgtagagggtattgcagtaggcgatcgacctataatcactcgcattcttagggttatcaatcttggggataagggagatcgtagtctcattgagttctgttggcaggtttcctaattgaaagtaaccaaaaatggcttgagaaacatcctcaccaatttcattccacaaccctttgaagaaacctgagccaaaaccatccggacccaagcttttggtggagtggatatcgaataacactttcttgacattagacttactgaaaggccgaatcaagcagatttgttgaggaatgtcaagcttggtctcaaaccccaggctttcctcatatatccttcttgtagctgagcttttctttcccataaatttacggaaattttgaagaaagtgatcaactactttgggatagtcctcaacaatagtgtcccccttccagtatgaaacaatcctattttctgcttttctcttcttcttgatggcatgggagtagcttgagttctcatcaccaaacctcaaccaattgatttttgagttctgatgtaaatagctatcatactattttcaagtagctagataactttgatgcacttctttctcattttgcataagaatagggcaagaaagattgccagcaagatgctcttgagctcttatgaacttctcttttgcctccatatacaaagttttagagattagagcctctagagtccttccatcctttaagcacaacctctttgaacccctttttaagcatccataaattacaaaatctgaacggtctgttaccatagttaccaacctcaataggtttaataaggcaataactatggtccgagatcgtcccccatctacagttggctttagtatttggaaattggtctatctaagcttcattagcaaagaccctatctagctttgagtatattctcactccctcatcatgtttattagaccaagtgaataatgccccaaaacttttcaactcatcaacctgacccatggcgagccagtcttgagcatcttgaattttagagtgtttgacttgtcttccaccacttttatccttataaaagaacatagcattgaagtcaccaataatgatctatggctctttcaaattgccaaggcctgccagtttgccccaaagatctttcctttcattaagagatctgccataaaccgccgtaacaaaaaactcgtctttgaatccaaccattttgatcttgcaatggacaagttgactatcttccataatcaccttcatttgaactagcttgtcgatccatatcaacattatgctataggacatattctgactagaaaagaaattccaattacacaagttcttcctcacatcatctattttatcatggctgattttggtctcaaagagagcaccaaaaccaactttattattcttgcaatgtcaatcaaatcaagctgcttctcttttttattcagccctctaacattccaccccaatacattgtaactatccatcattaaagagaattctgaatagtactaacaacctcttcctctaccttatttaacacctcatatctgttacttatgctggctttagtactcgaattttgcacactttttgagccttttttctaggagtaatccattgatttttgtcattgttcctgtctgaagtaaccccgctgctggtctctattttttcctcttcaatcatcttttgtatcactttaacctcattcaatgtccctgtagagtttgcatcaatattgtgctattgatcatcaccattctactgattttcctactgcaaaatgttggaaatttatttta

SEQ ID NO: 378458 - DNA, 6436 bp, Cannabis indica
actatattgtggacaattttttaagcagaggaaaagattagtgacctaatctacaatgtgcctcgaagggagattgtatactagaacaaacaactgatttaggtattgttctatcaagaatgtaaaggcatctaagttcatgtcctttactaatagtttgcttcgtcataaaatcctgaagtaagcaatgatcaagaaaaaaaaagatacaatagttaagatcacgagtaaattgactgagatgcaaattattagtaaaggacatgaacttagatgcaattactcttacattcttagatgcaaatttactaatagtgtacaatatcccttgtactgataggtaaatgtaaaacgaacgacaaaggaagcattggagtaagagtaattgtactagacccaagaacacgagctaatgacccatcgactaagcgtgaggttgaagattagaaaataagctatatctgtcatatggtctttagcaccagaatcaatgacccatttggtgcttgaagaaagaagcccacacacgggatatcgatcgtcagacggtggggtttggcttttgaatggttaggcaatcgtctggtgctagcggtgagaacaacgaaccactccaagtaagggtttcgaaaaagaaaccctaaaatttaaaaaaaaaaaaatatcaaaccctaattaaaaaaattccaattttgtgataaacattaattttgaattttgaatttcaatcttaagagatgctctgatatcatgtagaaagttgtgaatgaaattgtgtttattattcatgtaaataacatatatttatacaaccttagagaaactaaattaggaaagttggagagaaaataggaaatgaaataattacagttgaccctattttctagctaatttaccgctaatattctgacacttttgaaatttttaattaatttttataatagttaaaattatgtggacaaatttaaacattacacgtgtacaattttgtacacatagacaatggtaaaatcacaacgaaagtaaagtttggaagattttaccctcaaagaattaatttgtgggattaagtgtaacaaaatgtatagttctattagtttgcagccaatatgccattatctaataatacacgtaaaaccaaacacaataatattgtattattttttattaaaatgcaatatgattaccaaacatggcctataaagaatgtagttcttgttgttgcattgttgcagtgctgtttccttgtgttatgaaccttctcatttctttgttgttaatatgcataattgaggatggtcatggtcatgtggaaattgttcaaattgttctaaattttgatgcatgagtgcaatgaggtcctgcgtattgtatgctcccttttggttattattaataacaaaaatgttttgcctacttgtgtagtattttagttagtgctcacagttttttaactgcatgaaatgttattattgtataggttctcatcaaatggagcttgccttgaaacttgtgcaactcctaatatctaagctgtctctggatactgtttttcctggcaaccttaaagagttctccttgattgtgagatatacttgtggccttgcagttctgttctcaatgttgaatgtcacacacccacacattaattttattgttaaagctatgtgcttaattttaaagttgtggtaaatgtttctgtttaatgttttcttttcaatttaggtggccacaatatcaaggcaattttctgtcttgcatgatgccatcaaatttgaagcattgcacctactgtcagctattctctcctcaaatcattcggtatgcagttatgctccatatattcatatctggaaagcttgctttgtttatgcaagtttttagcaactcttgactatgtggctggttatgcttgtacacattggggttcaggagcttgaccgacattcaaatcaatgagctggttgtgttgagatgctatgcttcttactcatgtagcatttgggaattgactgtgatgaactttatttaattcaggtaccactttatgatgctcttcaagtattgccagacaagaattggccaaattatatgcgtgatggcattgtggctattctacaaagccgtgttggtatgtggaatatataggattggtgttaagataggattgtaagtgtttaaagactacttcccctctttttttcctcgtcgagaagtcggaccaggggtttttcatagtacttttcttccaaactttctcagtgtttaatcttcctggactacatgttcatttttcttaagccatgattttataccatattatacaattcaaattttactttttttcttctggtaatggatgtacttgatgtgaatgaacaataaaatgcaacctaattagtgtttctaaaaacaaaacagccaaattaccatttttagacttaatttttggtctatgttttgttcagaatgtaatatcctgacttttcttagtggcctttttacttgtatattattttttccagtgcccgctgaaaagcttcaggcactaattttggctgagtctttggtttccatacttggggaaaggtggttgataggcaggaccaacttagcaaatacagaggatcctctgcctgccgataggtaagatgagagatgctatagctggttgttgcctgtgattttgacatgttttgatgtagatttaagcatatgtttgcttggtttatatacttatatgcttgtgtcaggtgtttgttgcttgttctagagcaatcacgggttgaagttgcggttcttctgaatgagctggcttatttgaagtatgaagcatcaaagtcttcttcatcacttgatgagacagttcgtctgaagcaacaaaatgttgctgtttccttttccttggtagaaaaggttattaaattaatatctagcttgggtgaaaatgaaggtatgacatgctttgcaattatacgagtgtcatttataggtttcatgaagtaacaaaaagcataacttgtttgagaggacccgtatttctgaagtatgtttaagctggttatttggttgatatcattttcaggggaccttattgctgatagcgctctcatgaaagtgatcgccggactgaatgaaacagttggtatagtttttgaatacttacgagatgcaaaggtagtaaagtggtgtattaaagattatgtaaatacacatatatttatatttattgaccaagtgattcttcaggagcatggccaaaggaaaggagatgatcttcttgcttcagtccgtgttattgggaggtaggcttgtcttttgttggtgggagagtgaaatgatgagctagcatttgacatcgtttctattaaaatagtttagcaagtaatagtttaaaacaccttaccttcacagcacttattttcttaagatggtttctaaaataatacattcatatgccattacaatgctaataatgctcgttattaatagtgtcgtgctatgcattcttttgagctgtgtttaccattgagctatagtgagttcttgaagtttcttttagttgacaatgagttttataggatattttttccattgccttagaaattacccttatgaaatattcattttacatgagaaagataattagcggatacattgtctggcacgtgctctccctttatgtaacaaaaatagagggtgagatagtgattctagtgtatgcacattgtcttttttgtttatataaatgaagagtttagagataaagaaagaacttaaaggatagtgtgtttgtttcagttatctcgcggaaacacctctcgcgtgcaaagagaaggttggagaattattggagtatatgctctccattgaaggtgctgaggagcccaggttcataatgatattctgtttgtgtgatggaaaaataataatttccccaattctcagggggagttttgtacatgatgtatgaccttggtttgaattaatcttatatcacagccctttctactcgatatgctttttgcttccgttgctgtgtcaactaacaatgaatgtcgaaggatgcaaaactgttgtttcatctggaggacacaaagctgtaagtgtgcatgagagatactcttaatttcaatttttgttatgcataggtgcattatttttgtcatggtccactcctgacaagtttaatcctgatccattacatatttagttgtgaagcataataagtagatctggattcttttaatatctgtaaattatagcggtctcaatatgttttccagttgttttgacaccttttgttcttgggtttgtgtttactctacttgcaggctattgattgcctcataaaattgattggaccaaattgttgcatggttgaggattctagtcgaatttttttggcatgtgacacaatccttaatcttcttttgaaggtattgccacattatatgcagccaaatctctcttttctttttctttttttgaaacctatgggtatctatatctaggacccaccccaactaaccccacagggggatacccgtatgccccaccgccaggtcccaggaggacaacagaaccttagcgcatctgctggggtttgaacttgagatgtctcgtgtactcaaggaacccttgccactacaccgatgtcctgggggaattatatactgtatctgatcatttttgttttggtcatctgttgatattttattgtttctcttcgtgagcagagagagcaactgcaaatctctttggatgaatcaactgttatcaatctcttgaaagcaatgacatcttggacgggtaccaaccaataactttttgcgtttacttttcggggtgcactttcttgctgaatcaatgtctagctaaatggaaatatttcttgtgatattcatccattaagcctgatttttccaaggaagtagatgctcaaacttctcttgctttcatgcatttaaaagagagaaaaaaaggatattgtcagttccaaatcttattgaactttgctaacatgttttgcagagggccttgatgacccatctgtcattatgatggcttcaagcatttgctcattggtattggacttcacctcagaggacgctcttctagctgactccaactttgatgaaaacactcttaataatctctcgcggctgattgctacgagtctggcttcttggagacaggtatcgtgatgatgttgaacattttgctttttctctacaaagtgctgtctactgaaaataatgagtggattttatcttgattagcatattttctttcacatctgcagcatttgtttatgaaggctaatgtcacaaaaattaaaattttgtttattatcattattgccaaaatgggagaaattgtcatcgttcttcagtcccttaattttacacttgagaattgactcagttcatttcaaattttatttgcaggataagtccaatgatgccgaagacaacatggatcttgttgagattatcacctcaggtttgtccaaattgaatcacatataattgtgcattttattggctcttacatccaatctataacaatgaaggtagctcctcatcccatgatatttttgcgttgtcaatgtgtttcaggatattctcaatgggcttctcggttccctcgtgttagaaatgcagtcgagagataactctagtactctcatcccatgcaacccgacttcgacaatggtttcctcgtgcaggcagctaagtagccatggattctattgtaagtggatcaaattctgacaagggaatctgaatgatatatttctgggattattcagatggacaatgagaatgggaagagaaccattcttgtgtttcaactacattacatgcaaatgcaatggctcataaggatcataaggatcaggggttatttaactaagctcatcctttcggtttttacatggctgcagtgcagccagctactatgctctctcttgatatttgaatcgtactatggtttggttgtatttatatatttttatagtttttttaataaaatatatttttatagttaatttgtaatacaaaatctactctatacagctgaccttttctttttttaataataatttttcatcttttccgatccacctatctctctaaattcatcataccacccaatcacatcagccaccaaggcagacgaccacccatatatttaggcaactctaacttagttttattgtaagttggtagaataactgtaaaatatagtataaaattaaatacataaaaatgattgtagtttatttttggaaacttaaatagttgaaaaatatgaagaaattgttataaatattattaattatgtggatgtccaaatattttatttattaccattaattgtaatcgacattcatctttttcttagtttccctttttcttagtttcttaat

SEQ ID NO: 378459 - DNA, 1277 bp, Cannabis indica
acaacatagcattgaccctagacaattttttctacctatctcttcttttactaacttttagtcagaatcatatttcaaaattcagctcaaatggattcccttccatcattagtaaggatggctgtgcatattatggaattagctaaacttaacaccaatttttcacccatattcatcccccatttcccaacattcaaacctggaatctgtataaaaacatctaatatataaaaaaggtgtcatctgcaaattgtgaatgagaaatttaacacactacctcatgagaaaccttcaaacagacttctagcttttttgtcttatccaatcaccttcccaacaataaaagacccctgatctcagccatttcgaactttcaattatgctgccaggacttttattgatcatcaccaagtatggaagtcacgaaagacacctcattacccaagacctgtattttatttaaagttttcttctcctgaacaaaatctagaattggccattccacattgtcaatgttttttcaaaattttgtttttttcaaagtcaattttgaaaaccactcccttcttgccagtgctcggtactagctgacatttctagaatatatcttcttgttataaaggcgttatttgattctgaaatagtattcccagaactcctcatagtttttaggggagaactttgaccaaatcagtggtgtaaactagtgaataagctgattggcctgaatttatataatgtatttgtttttagttactttattgtgctctagttaacatctttgcttcatatcttaatttcgcactaaaacaggataacaaggatcatgaaagaaatggtgacaacttcttttttggggatggtgattttggcctcaatcctattagaactgggtcctccccaaaagccaatgctttctcacagaacagccggcctttcagttttgacgattctgttccgagcacacccctctacaatctaggcaattcaccaccaggattcaaggagagttcagaaccatcttttgacagcttctcaaggttcgactctttcaggagcaccaatgacagtggattctttcctccaccaagtgatacattctcaagatttgattcaatgcgcgggagtagagacttcgaccaaagtcatggattcccatctttcgatgagccagatccttttggatcatccgggccgttcaggacttcactggatagtcaaactccaagatcagacccttttggttcttcaggaccgtttaggacatcactggatag

SEQ ID NO: 378460 - DNA, 2768 bp, Cannabis indica
aaaaatagagaaaaaagacaaaatagaagaggttgtttatctattgtcaatattgtaatattgttttgtccttgttcaactttgctaaattaccagtgtgacttgcaattgacccttcaagtcaaattaatggtaattgttataaggtaagatttttcttcttaataaatttgactattaacttgtcaagaagttgagaatcctaaatgttaaaactgttttaattaatgttcagatatcaataaaataataataaaaaaatatagataataatttgatgagaaaggtacttcatacccttacgaacgtgtgttccaaatctggacctatgacaacttcactctttcgacaatatagattaacaaaataatgactcaaaagtgtagatagttactgaaaaaaaacatcgaaagaaaggccaatcaatagtatctttggaactacaacaagttccaaaacggtctcccactctattaatacgagcgagttttagttatatgcctgatatagttagttagttatgttcggtactcttatcacactctacctatgtgtataaatagggctccatataccaaatgtaacaactgattcatcatttgtgagaaacacattaataaagctactattctctctctaatttacctaagttttattgagttttaatgacaaggttcaatagagttgaacctgttttgctttggattaaagaaagtttggtgtgtcgtgtctgtgatcgaaaaaattggcttaacaacgagaaataacagtatggcgaagctgatgagaaagagaaatggtaaggcaacttaaagtacctttaagagatgataatgtattttaatattgaatcatattattttggtttaataaataatataaaaagtcgctaattaattgtataatatcactttggtatgatgctaaataccttatcgtgctaaatagtgatgctcgagagcttattcatgcctataacgtttgtctcgtttcttctttatggctagcaatttttctgttctttatttttcagccatacgcacactattttgactcatttttttatttttcattttagaaattttaggaagttgtttggttgtggttttagtttttagaattatatttttaaagcaagaatagaaaatagctttttgttattttaaaaattatatggtgtttggctaatattttctaaaataatttttatacttttttataaaaaaaatttaatattttatatcgtaccacgacatgaacccaaggccaccccgaactggactcaaaccaggatcgagaccaggacccagactaggcactgcattcggatccggaccctaatcgagccccaagacctaaacatggacgcgaacccagtgtcaggacacaaccagaattagaacccaaacccagcctcaggacacggaccaagattaggacctagatccaaacccaaacctacacctacacccagacctggacccgacccaggtctcgaagggtccaactcccgaccccagtcttggtccaggtttggttccaagcctagggttcggtccaggttaaaggtctgggtgcaggtccaagtttaagttcgagtctgggtccttgggcccgatctaggttcgtatccgagtctgggtctgtgtctcggtcttggggttcagatttgagtcctagtcttggggtcaggtccgagtaggggtgtacattggttagtttggtcagtttatgctacattttattcaaccaatgtaaaaatcgagttacgaaaatctaaatgtaacccagtaaactgcccagtaaaattggtcggttaagtcgggctaacaagcacaaatcgaccgctaatgttttttttcttttaattttttttacatttgattgttatattttagttaattgtaataatgagagaaatatatagaaagattaaattcaaaattcaaatcaaccaccataaaagaaacatattagtttgaactttatattttttaaatagtcatataaaatatatgatatacataaaccctcttaatcgtattggtcgagttagttcgagttgattggacgggttagtattatttttaactcgcccaatattattttcattgggctatttggtttacattttttgtttggttatctgggtttggtttggacggattattcatgttggacggtttacaaaagtttatgtacaactctaggtccaagttcaggtcccaatcccgagtccatgtcttgggtttggtaactagggttaggtccagttctgggtcttatggtttgggccgggttcgggtctgtgtcgcgatagtctccgtcccagggtccaggtacgggttcaagtcccgaagtcgggaccaagttcgagtttgagtccgggtgcgagcttgggacctgggtatgtaagttgttaaacccaaaatttgactaagtataaatttggagatatctaagctaatcgggaaaaaatccccacaatacactttgaaagtatatggacaagaaaatgggaggccaactaccaaggtgaaacaccacacgagaggaagagccaacacaaggagggtcgaagcacaagtttatctccctgtgccatgttgcctactcctcactctttctttcccccattctcactccctctcccccgctctccctctactcatcctcactctctctctccccactctcactctctctctcgtcgttcctctcttctctctccatctcctctcccactctcactctctctcctcgttctt

SEQ ID NO: 378461 - DNA, 2638 bp, Cannabis indica
gttttttttttaagatgcttgtttttcttttttcttttttgatcaatttatttttttttcttttggtattgagtaatgacaaaacacgtactaaaatactataatatggttaattagaattcccacctttaaattttagtatatactaaattattatttttttaaaatttttaggttattgaaaattttcattaaactattgaaattgtttaattcaatgaaaagtatataaaaaatttttaaaaaaataataatttaatacatattaaaatttaaataatataatttaaaataataaaatttcagagtacaatttaatacataaacaaaggctgagatatttcaaaaattagttacaaaaatcctatttataaatttttttaatcagatttgttaacaaaaacactagtaaactacttaatctagtatttagttaaaaaatttgtaagtataaactttaggacaagcaaatagtacataagatagcaaccttcacatcttttatagctccaaattcccgagtttcattagaatacaaccaaatatggatcatggatttgtaaacctttacttaaaaaaagctacttcttctgacaccttcccgtgaagccactcataaaatataaacaaataaataaataaataaaaatctctgacattaaaagcatcataataaagacacagctactactactcaatctgaatatatatcttcttctcctaccaatgtcatcatctttattcttctctttctcatttttaaacaaatccaacggctctgatcaactgggtttcctttaaagtcatcaaaatccaaaagtggaaataataacaaaacacaaatgggttcatgcattttctttgttgtttgtaatctgattcttgtgattacaatcacaagactgtcacttagaggagaatcaaagacagattggggagacataacagtactcaaacaactaaagaatgagttagatcctaactcagtgagtccaggctcgtgtgttaactcgtgggatttcaccttcgacccatgtgacaaccttttcagcgaacgattcacttgtggtttcaggtgcgatttcactgacgagtcaggaacgagtcgactcaccgaactcagtctcgaccaagctggttactccggttcactcacttcaatctcattcaacctcccttacctacaaatcctcgacctttcaaacaacttcttttccggctcaatacccaactcgctctctaacttgactcgtctccaacgactcggtctctccaccaactcgttctccggcgaaatcccatcttccatcggcgaatcactctctaatctcgaggaactctcactcgacaacaaccaacttcagggaaaaatcccagcaagcttaaacaatctcgtgagcttaaaaagactggaaattcagtcaaacaaattctccggcgaatttcccgatatgggttcacttgaaaatctaatctttttagacgcaagcaacaataacatttctggtaaagttccgggcaatctaccaccatctctggtggaaatctcattaaggaacaacagcttagaaggttcgattcctggagagattaaaaagttaagatttttacaggtaatggatttgagtcacaaccgattgagtgggtcagtaccttccattctcttcaaccacccatcgcttcaacagttaactctttcgttcaaccaattgtcgtccgtacagtcccctgaatcttacggcgatctcatagctctggacttaaacgacaatcaaattcagggctttttaccgtcgttttttgcaataatgccgaaactgtcagctctgtcgttggagaataacaagttcagcggaatgattccgactcagtacgccattaaaacggttttaccagaaacaggggtttccccatttgagagactcttattgggccggaattacttgtttgggcccatacccggcccattaatgggactgaaacccggttcagctaatgtggagctcactggaaactgcttgttccggtgtcctgacttgttcttcttttgccaaggtgatgatcaaaaatcgttgatggaatgtaaagcttttagtcctacaattccatgaaagctttaataaaaaaataaataattattagtagtataatatttttgatgtcattaatcagaaaaaggggaaatctgattgtttgttattagtattaaaaattattgttctttgtataaaaaaaatgtttgttgttaattgttattaagttttgtttttttattagatgaaatatctatttgttaaatacgaagaagactgttgattcgaacttactttggcagtttggcttagatttgtttaatgttttttatctgactgacacacgaacgttacttcccacgtgatgtttcttatccgtggtgcagacgcgcctccataaattatgtctagttgactctcttcttcacgtgccactattgtaggaaaccttattttgggcttcttaacattatgggtttctcttggacctaatttatggatcttatatggcccaactcttgtaaggacaacttgttttcttgcctaggatttttatagggaaacttacaaaaatactagaatttgagttaacttttacaaaaata

SEQ ID NO: 378462 - DNA, 2096 bp, Cannabis indica
accatttctcggtcttcttctccatactcaaccggtcaaaaaactcacgacgacgaagaaaacgaaaacgattagggaaaaagaacgataacaaaattcattcatttcctcacacacacaaaaaaagtaatcaaatcttcttctttcttaccgttacagttttttgaaattttcaaaaaaattgtaactgaaaaacaaaaaaaaattacatttatgtctattcaaattcattactctgtttatatatataaataaataattattagtcaaacggtaaaatcacgcctgattttcatgtgatttttcattttgtatttttcaatctatttatatatatatatttttgatttatgaatttctgtttaggttttttatttgagagaatcaacaatggcagcgaagcttatgaagaaggaatcggcgaaatctatggcggagctacaattaccggctcaggcaacagcggcggtgactggtggtggtggtggtgacgtggagtttgcgaggtgcgattgctgtggattaacagaggagtgtactcaagcttacattgctcgaattagggaaagacatcagggccgttggatctgtggactttgttctgaagcggtcaaatacgaagttttcagatctcagagaaggattagtactgatgaagctatgaaacgacatatcaaaatctgtgaagagtttaaatcttcaactcctccgactcatacaggtgaggatttgatttcagctatgaaacatgttctccggcgaactttggattcgccgagaagaggcgacggcgacggcgccggcgccggttgtggtcttatgaggcctctcagtcgatccaaaagttgctttgcaactattccagattcgaagaaataataataattaacaaaataaattttattttattttagaatttaaatttagattatattaatgatttgatgattgattttaaataactattttgtgaatgaatgattgatttatatgtgaatgaatgattgaatattttctgaagtagtttttttttacttgtaagataagtttggtgattttattttatttttgttatggtgaaaatgggttttattagagtaataaatttttgtccttatccttattattataattttggttttgattttgtgtgataagaagaaaataatggtatgactatgatatgtataatttatggtatcatttgggtcctatagtgatagtgattacaatggaaagtgactaaaaataggcaagtcttaaaaagaaaaaaaaaatatcttggtgtgtatggtatgaatcgattaattgtagaagttcgaattgaaaaagagcgagtaattactagtgtacccttttattagcggtagtaaggtggacccacatataagtgaggccgagtaaaaaaattaaagaaaaatatatatgtattttagttcgttacgataaataatatttatagatataatattaattttagtataataaataaagtagattgtatattaatataggataaaggtctaactctgttcgaatgcttgaatgggaaaagaggagagaataattagtgtgcctattattactagacgtagacgtgattatagaagttttaatttggctccaatgaaggaacgaactatttgtgctcattattactagtccaaattatggagaagttttaattctgctcgattgctcgaattgaaaaagtagaaggaacaattagtgtgcctagtattactagtttagtgtgtttattatatattattagtcgtaattagagaagttttaactttgctcaaaatgatcattaccgttgaataattagtaaaattgtatcttcaagtacgtaaagcacaatgattgataagtgcaaaccatcacacatgattttgaaagaaactatttatggttgcaatggcctataaataaattttgtatagcaaagattgttaatagatacttgtttagtagttatttactctctttatgtgtataaataaattttttagttagaagaaatgacatgtttactaataagtaatgagaatgaatagtaaaggtaattattttttatatttgtttacttatat

SEQ ID NO: 378463 - DNA, 4713 bp, Cannabis indica
ggaggattgcttattttatcaggaaaaaattgctgttttcattatgacaaatcctatacgattgcccctttgtagcatccccttgagtctttcccctttattcttacctatcaatatcatcggttcaacattcaagcatcataataataattatattaataataataataacaacaacaataataataataataataataatttaatttattatatggaaacagaagagatcacacattaatgagaatgagaacaacaaatagttaggggtaggtttgtcttttgatgtaataatcgacttgtttatgtcgttgtttgggtcatttccattgtgagactgttgtttggatcatcttcgtttttgtgtagcttgttttgcctgacttttgggacttttgtccgtctaaccatttaataaaaatctgtccttcaaaaaaaaaaccaaatagttattttatttctcttccttgcatcaaagagtgacccaaaagaataggagcaaattaatcacgataatcatcctattactattattattggtacacctatagtcagactataaactaaacgacaactacaccatttttcatattagggttcaaattctacctcgcttacaggctcatattagaatttgactatttgagcccaaatcacctcatctctttgtagatactacgctaatgtacaactttttattaaatatcaaaacttacattttgaacttgttttctcacttttttaacaatattaatgtacactaattaaaacttataattagaataaacccactccacacttccatcttcacacactagcattgatttggtaaagtgactgataaataaataaaagattaacgctaaggggggcaccttaaggtgcacaactgcccaacaatacataatatgacatacccttatcactataggtgcaattggatatcaagtctcacactttttaatattattaggtaatgttggtaattggtatcgttaatcactaatgaagtaattggccaaaaaaaaaatctactaataaagtgtcacttcgtgtggtatttagatactttaaagatacctaataacagctctatatataaaaccagcccctttttattccaaatttccttttgtagctgtctgtttatcagttaatattaacacctaactatagtggcagcagaattttttgtgacgacttttaaaacatcaacaatctccttcaaaaatgcaaaataagagtgaatgacaaaataaagatgccatcggaataaaattcaaggttaaaagctgagactcaaataaaaacctgacctaataccatagaaaccaactcctatacccaatacttgcagcacagagccaaatgcatttgcaaataaatagttatttagttagtgagaatttaacactttgttgtagttttttcagctataatggaggcacagtgtaagtttgtaacagatgcatcgtttcaaattaataattagtagcacatagagaataccatttggagtctcaatcacatactcaggcactcggcatttgcttcacaagtacaagaaggaaacgcttgagagatcttctagcgagcagaatcgcggcatctatttcccccttattttcctcaacagcattcttgagcttttcttgagattcgtggactcttctaacaagtttacgcaattcctgtgtacaaactggtaatataagtaacagagtgcatgaaataaataattaatctttctcacgaatcactcgaaaagaccaatgaaaaatagaaattatctaccacaaagaaccagtgagaagaacctccaaactcagacagaagaaaaggaggaaacaatggaacacagaaatatacatcctttctacatacaaggcaggacaaaccctagtctaattccctataagttgcttaatacactctcaaagctctctcacccaagaagggtagtccaaatagtcaaacatgtggtttgccccacaaggtctgaggttcgagtcgctcctgaatacttatatagaaattgctatagtttcatggtcccaaatattgtaggggtttggtggggatcctaatttccaaaaagaaaaagctctcacaaataacaagaaactcaccaaacaaaatgattcagttttcaacaagttttcccaggaaacaatcaatccccaagtcccagatcaaaccctgttcacaatctaacgaatacagagctctcaagtatgactaacttacaatatacaactcaatcagcaagctagctattattgcaaaatgtcaaactgcagcctttaaactaaaacaatttacaaacagatcctatctaatctaattccagatacttgttccttggatgaggtcccctaaacatccaaaaataaatacacaagataaaaattttacattactaaccaaccagcatatgcttattaacttcaaatttagatagttatcaatgatgcagaagatacttttatcacatgaaaatcatatcatattatacaactcacctgacgatcaaaatcaacactgtgaattgagtaaacctcatttgttatctcaatgtctttattgactaagccatccaaccatctggttgctatatcaatgtgaaattcctgcaccagtgcttgaaaaatcaaatgaaaagttttgtttttgcaaccctaatgctggaaataaaataatatagaatagtatatagcccacctccacgtcctcttcactatcagtttcttcatacacttcatcactatcttcatcgttcattgtccttgaaccaactaatatctgtagcttactatggtcaccatcttttgtagcctgaattaatgtatccatcaactctggttctacctcgcgtagtagttttcctaaatccgtacattagattataagtattgagattggtatggttaagtggtattacaaatgtaaaatatatattgatttcacataatggtgagtgaaatttgaccttttgttgtaggaatttgaaaaaaaaaaattaggatcagaagtgatacaataaaggattgaagcatgcccaaaaagttcgggagcattggaagtgtttaaagtcactttttgagaaatggatggctctagaggcctgtcgtttcctagaaggaaacgcgtcgcacacacgcaaagaaggcatgagaagcgcgtcacctgtcgtaggacaacgcattgcctggcatacgacgtgttgcctgctgcgttcgtacagcttgaggtttttgccccaaaaagtgcctttaagaggtctaatcctattggttggatctaatgaacatatattacaacgtaaaaatggcttttagagttgagaaccttgatcacacatttcaattctcactctctagccttctaagatcaacattttctccaagaactcatcaagaagtatttgaatcggtgagttcaaagacttgtggtatcccacttctgaagtctaaagcatcaccctaggatttgtaatggaaatttaggacaacgaaatttacttaatgtgcaaacataaggtcgtatctctccaaaccccagcttataatttagttgataaaatttgtgttagcaaattcaatgatataatgcatactttataactcaatttaagacagagtgatgataatactacgataatcttagttttaaattcctaacttctcaattaatgttctgctaaaacaatgtcacctggaacattctgtatgcacaaatcaaaattcaagaaggaaaatgaataccaacgtaattgaactgccttcgctttccttctcggacatcaggacccaatttctgagacaaaacatcaaacaccttagctacaaactaaaaccgctacaaaagctatccaaattctctattaaaactaatagactaatccaaaaaagaaaacagcttataaacgcaccttggccagctttagggcttcaaacacatcgttatcaagagaagccagactgcaatcccgattaaggtaaaagtaaaaaactcaaatgcaccaaaaaaaaaaaacgcatgcaatataataaagtttttcggagatttcagatagaaacagaagcttgaatcacctcaggatacgtttaatttgaggtgtggagaaggaagcgagctccattccccaacgcacagcgcgctgagcttcgcgcttcaactggttccggctcttggaaccatcggattccgaaccgctttcgtctttttcaacctgaagatcagacggtgccggggacttgggcaatataaggccgcctgatcgacggaggttgttgcggcgagcggaacgcactctagttgatgcgaaacgatgaagtgttgttttggtgttgggcggtagtgaatgtgagaatggagaacgatggtaagccgcaaaagcacagtaatggtccttgaaaatcggccattgtcgtacgatcctacccagttgaagcatactcaacctcaactctctctacttactcactactccccccgtttcgctctcttttgtcgcgctctttttatttctcgtttttatttttcttttctttttaatggaatcctatctccgttgaagataaaatttacagaaagaaaatatttgggcctgggttgtatatagcatttgaagttagtggaccttgtacggccctggacttctttctacgttatttttttttttacttttatactgttaggcggtataattta

SEQ ID NO: 378464 - DNA, 3738 bp, Cannabis indica
agcttcaagggccctggcaactttacacggaagatttccacctccttatttaactgctgatcaaacttcaccagaacagaataatattctttaccatctcttccagttgagacctcatcaacataggcaactcgaagagcttcattggttttcattagatacaaaatctcctcagcattaggatcttttcttgctttctgtgttccgtatatctggcaagcaaccacatacgtaaatttcatcaaagcagtcccatactcatggcctttaaataacaaactcacagagctgtttgttctacttaaactcctagctgaaggtgacctttctgagttgaaactctctcgcctcattgaaccaagttctcgtgctccttcccgaatgtccatctctgatgcagagtccagaaaagccagcatcttaagagctcgatagtaatacatcattcccctaacagttcgcgaaagtgtctggcctctgtttgatgcccagagcctaagctctctcaacttagttgtccacaattctttgtcatccaccattccttctcgacgcatcctctcaacaaaatttttccagtcatcatgataaattgtctgcaaatataaaggatagaaatcccatcttcattctcagtcctagttgctctttgctgtataccacttcttcagtatagtacggagtcagaacactaaaagccatcattttctcaacttggggggcatggggcatattcataaagagagagttgctaaagaaagcaattctgcgccttgcctcaagattaactgggatattctgcattgagtctcgagaaatgagaatagtgtgcaagcgcctaacctgtctgtaaaaggtttcatcatcatggtctggtaattgaacagcattttcaaaaagtaaccctgccattgaatcaggattttgaggggccaaaccctcctccctcaactgatcagtgctcctcttctccttgaaaaaatctctaacaacaatctcatagagtgcctgtagagtatttaccatctggttaggatctttctttggcttgttcaacaattcaacaagtttaattaacttcgaatggagcaggggaagtgcagttgttttaaatgttttggtgaacctctcactctgaacagactgatcaatctcttgaaataaaactgtcactattgcatgctcttcactgttacgcttaagaatggcccgaaccaagtgcttaagacaatcataagcttctatgacagcacaacgcctgtattcattcttgcatatcttataccagagccacttatctgaagcatctaccaactctttggcttgactaagggcaagcagtagctcattgcagagaagaaaacaaggccatcgaataaccctgacattccaagaattctggggcagctccaataactcaagctctcggtcagaaataatatcttcttctctgaaaatcataattatctcattccatatcagagcaaacttatttgcctcaacctgattggattcgagtttcctgtacggctggccaaatccatacctcagcttcaaccggttaatagcatcattgaacttattccttaatgtccccctagcatttaagagttgttcctctggcatgagattgaattgaattgcacttgcaaagaattggaacctgagtctcaattgctggatgttcctaatctcacccaagtgtgcaaacaaacccactcctgccccaacaaaagaggagtaaatggaataccatatctgcaaatccatgaggtaaatcaaaacaacaggaatccagagtaacccaactgcaaatctgttactgctaccaaagaactgatgccattcatacttcaagttcttaaggtccaagagtgtttttgatggagcaaccatgggttttatctgcataaaataactgaagcaaaattttgtagccagcaccacaacccaaaacaaagtgtactttatattgtccacaagaccttccctcagcccccgaccaacaaagattctactctgaaaccaccatgataacatgcgaaaaatcctccagttagtctgctcaacaaaatttcgaatccatggaataatgaaaagagcaagtgctagaagctcgggaagaataaaaaccagaaccacctcaagaaaagtgaccaccctccgatttgcctcaggtgaccaacgtctatcttgatttctctgcgtccatatcctaccatagaacaccccaaacactacaatccatccagcagcaacaatacttttcaacaccaacctcaccccaagccccaaagtctctcttgacaccaaagtgtattgcattgctgcatcaagcaacgactgaaagaacctcaaaccactccaagtaaagaacacggtcaagatacggacctgtacttcgcgatgtttcagagcctgccaagggtaatcagttccttcccacgcaacaataatggcagcctgaagaaacaaaatgagcataatccaaagcctgtcaaagctcctgtacaagttccaaaacgacctttgctccacaaacccagtcttacccacatgccttttcctagttgaggtcacgaagaagttgctccccacatcaataggccatttcaacttctcaaaacacctcttactccagaagtactcatttatatcatcataattcctccaaacactatgcgcggcagtcccattcctactactctcaacttcagccttaatcgtctcatatattggtgtcacaacaaagttcaagaaagcgttctcacccgaaatcgaaggcatcacgggctggcccgtattctcatcaatataatcctccaaaatcttattcaactccatggccatattatgaaatatgtaacacaaacactcaggaacaaatctgaggttagcagactcaccccatatgagaagatacagcgaaacgtaaagaagctcccgccgttgatccgcagcagcttctcgccggtccgagatccaaatgttggacttcttcccaagataatagcaccattcggtgtaattcttgagaagcttcctgcgaaagcgtctcaaaacggcagcgtccagggtatcgatgttgtccggaggcggcgtgaggcgcatctgagcattggccaggtgaagaaccaggtgctccctctggttccgaacgttgtccttctggaacccaaagaagagtgccagccaatcgagcaggtccatctggggaagccattgggcgaaaggcggcttacgaagattcccaacagcccgtagagcggccgcagcagcgcgtacctcggggaagcggagggacgggtggtcagcaagaagattgttcaccggaattatgttatacggttccgactccagctcggtctgggccggaggtccaggccggtggggcgagtcggataccgttggacggtggcggtggctcatgaaaaagttgcagctcaaaacctccgaatactcgaaggtatattatctttttttgttgaagaaaaacaagattagggatttgaaaccccaaacaatccaatcagtttcagagggagagagaagagagagagagactgagattgtgctcagatgcagaaataggggaagatgacgagggaaggagaagaagaatgaaacgaaacaaggcgcgtttcttacaaaccaaaaagcgcgttgttaagttctttttcttttcttttcttacatttattattattattatttaattttttttttttttactttcct

SEQ ID NO: 378465 - DNA, 3237 bp, Cannabis indica
ctattaaaatctcccataagaagtcaaggtaggaaaaataagaaagacttattccattatgaatttaccaagtacgataacgattagtgggataaggagtaccataaaaatcaataaaattaaaatcaaaaaattgacaccaaagacaaagcaatgaacatgattaacagaaaatttagttaaaaatacatcaacatccaaattcctaaaaaaaggaggtcccctccaaaaccaaccaacacgggggacctcaacaccatgagtaaagcccaacttaactataaaactatcaacaacacccttacataacctagactctattacgaaaaccaaagaaagcttatacaacttaactaacagggaaaattttaagaatactcgatcactcccgcaacctcaagcattctaacttaaagacattcatttttgaagacaggcgtgttcttccacgagaccatacatttaatttaagcatgggatgtcaaatttccattatacaatcggtgtgtgtaggagtgagagtgaatacgcggctgtatagtgaaaaagtcgttgaaagccgcgtttaagattgtagggcccaagaaagggcggcagttaggtgagtctcgatgaagattcattttgacattattatggtcacatcacacataatgctataaatttcatacattcaatttctcaaaacccaaaaatattacatacatttaatttattgccataataattgattgcccaccaaacccactcactcactcacttcacttaattattaccatacatacttgatctctcaagtctctcaggcaagatcatctctttctcttcgatcaaccatgaaagatactgattcacaatcactgcccatggttactaggagagaaagccctagaccacccgttacccgtttcttcggtaagagttcgtacaagttctgggttatagctgcggttcttctactagctttttggtccatgtttactggttccgttactctcaagtggtcaaccggtaacctctctaggatctatgatgactttaactcacctacttacgacgacgatctagacattctggttcgttttcccctcttacctctctctggttttggtgtttgggagtttgattaattgtttgctgtgtgggtttatatttaatctcaattaataggaagtggaggagcgagtgaaggtagtgaggcacatgtgggatttgtatactcagagtagaagaactcaattgcctcgattttggcaagaggctttcgaagctgcttacgaaaatttggtcagtgatgtccctgctctccgagactctgccttctctgagattgccaagatctccatcctcaccaataatcttgatcctttccatattaattcaacggttagttaatttgatttttcaattttgaacaagttttttcttcgtttttggatattctgattttaggtagttaaatttaaactgttaagactgatatttacgctatgcaattctctcattttattgactttaataatttgattatgaaattgagtgatttaaaaatacagattaacttgattaaaatttgatatggataaagaaaccttgttgaccttttttgtggcgttgaatttcgcgcgatgctttggttgagttgacttggattaaacaaaataaattaatgaaattatgatctctgtatctaattagctcagctagtagaactctgtagaaataatataatttccactgaatggctttattcggagaagtgttcagtataaatgtttgaaaagcttttgttcttaacaaacatttttggattttctttgtttattttatattttctttttgagagaaacatgtttggatcttattttataatactataataagcaaattgagttcttaggtggcatatatgatatataataagtgaaatttgtttaggaatggacttactagtaagtgagaatgctgactgtcttttttggctacattatattttaatattatgatatatatatacatacaggtcagtgtagaatcgaagaaaaagtccaagcctaccgagaaaagaaaggacttaaaaccatcgaagatggtagatcccaagtagtttatttatgttataattgggttatacttagacattgtgtttgggtaattatgactagtctccctccttataaacccagaaaaacgatttgggtttttaatgacttcgtgtaatatgaattcatacctctgtattttacaaaaggaaaatgtttctctaaagaagagagaaaagaaagaaaaaaaagtgaaaagataacttattgatgatctttgttcatagcaaattttcttcagatcgaatcaatgacattatacatacagaaagccaaaaaaaaaaaaaaaactatttttcattttctaaaaaataacaaattaaagcaattacttggaagagaatagaataggaataaattacttgttcaagagggtaagccagaaaacaatattgtcccacatggatcaaatgtaagaatatttagctatatataagaacatgagctactctactcatttgattcaaaattggtgaacaaaaatagccaccatcttggcaaactcatgatccaaatgttggattgattgtacagctcaataatgataaaaacatcaatttgtaaataccatacatacatacctccatcacagttgagaaatacacgggatagcacatgcttgactttgtagaaatcctctcctctttcgtctaccctttctttgaattgcttagccatctttttgatcaccatcttcttaagcgtagtaatgtatcttgttgtgaaaattatatacgcaagtatacgcagtcacacaagtaataaagtgataagtaagatcgtctccacagggattgcaaacaaagtttgatgtaaaatcaactaattacaacttaaaataaaaagaaataatatgcaaatggttgagtaatgattcaaaattaaaaatgacatgaattaaacttgctagaattaaactactgctactagaaaacaaattggttgcaagataaaaaatataatatggcaaaaatggcttgaataactaattccttctagtcaggtttttttacagtcagtacagcattggttcagcattacttcagcattctgcacagagataacaacaaattcctctaggcttgtgagaattttccaacactcacaacttcaattctaccatttagcttaatat

SEQ ID NO: 378466 - DNA, 7734 bp, Cannabis indica
gattatatatattttttggtaataggatgaagcatatatagaccgttgattagtgaaaaagagtagactgagacaaagttaacggcggataaacttttgttcaaagatatttcttgagaacgccacgtgtcgacggtgtaatgatcagaggaccaaaccaaagtccttctcacttctctgactgcttagctcaaatcaactcatcacaaaacaatcaatcaaactcatccctccatccccgaaacctaatacaaaacaaaacccaaacccccactacacttcaccagaccaaaccctcttctctctctctctctctctctctagggttttcgctttccctaaatctcttcctcaattttttcaattacttcgccatcgtcgattctatcccctaattcatcgcaagtgatcatggaggtaagttttttttttgtctttattcttagataaaatgacctcaaaacctgctaattatttattattattgcttatggattttatttagaatagaattttatttctggaagtaatcaatgtttgaccatacaaattgataagagatcagagtgaataaaaatttacttttgttgtatgctatcgtatgttaaaggttccaccgggaatggaagagaatgtgaagtctgaggctcatttgacttcagcagcggcttttgtggagggtggagtacaggaggcttgtgatgatgcttgcagtatatgccttgaagatttctgtgacagtgacccttctacagtatgtaaactatatttgttatattgaaacttttgtggcttggtatagaatttctcctttaattgcccaatgtttacatgcaggttactggctgcaagcatgagtttcatctccaatgcattcttgaatggtaattttctattacttcagttatgaatgttttcatttatttggttttaaaatgtttttgttatgatgataaaatgattttactttctttggattatatgcaagtgtatccacttatatctatattatttgttaaatctaaaaactgaaagatcattataaggaatcttaactatttggatttttgtttggatggagaatggtttcttagtgtgcttgtatgtctaaacaagtaggattgttggttagctagagcttgtacactaaattgcatgattttttttggaaaacatagaaaaatattaattacaaaggatactttttatgctttacaaaattaaaccataatgttactactcaaatatttgatgttgttattgctgtgataatttaggacacacgtgcatatgtcgtttatgggaaaacgtctcggttcttgatttagccttttaaaaccttgtcgtttaacaagtaataaagtgatagtaattatgttatatgaaggcactgttattaagtgttacattgattagtcttaattctatttgaatgataaaaaattacaaatgaagatttataatactaaaaactccaaactacacttaattattaataaagataaaggaacaaacccaaaggggtgacagtggtaaggaggagtgttggaaagtgccggtaggcattcgttccaaggttcgaatccccagactcaataaccttggagccactggaacgtctcttgtttgaactgctaagggccaaaaatttaaaaagagaaaaagataaaggaacaataaattcctacctttttcaatcttaatgtgattcaatcacttttcaaataagtaaataaattaagcaacaattagactaagataaaaactattatgattaaatgctctaaaaaatttatgtgtctggtgagataaattctttctttatctttaaattgattacgagtttcctagtatttttttttaatttttttcatgttatgaagaattgctttaataatctcattatactgcacaaccccatggatatgataatctatgatttctaattagagcttatctaatcatttctcagatgtcaaatcaaatacaaaatttttgtaaaaatgttaactactcattcaaatgcgttatataattagatagtgaagaaaagataagataaattgattgcattcacattaaagatataatatctattatggactattaaagttcccgtttcctgggtacctatgtagctactgctatagtttcttagtccccaaatattatagggttaggcgaggatcctagtttcaaaataaaataacaagttttatttatgctcatgtgtatttgtgctatctgtcaccagggctgcgctagtttaatgttttctgcagcttgacttgttttaactcaaacttttctctattttcatctatcttgttcaacatcataacaaccctgaataatacaaaaatcacataataatgaactaggaatataaatacaaccatgaaaaacatgtgataactacacctaaatactaacagtactaacgtattaagtataacaaaaacacctttcataaaaaaaaaagtataacaacaacaaaataatagtaactataatgacacttacggaagagaggaaaaattcaagggaaggtcaaaggccttataatggtccatttttcagtttgtatataagtactacgtccatgtgaacctgctttgtatatctgcttgttgataacacttggttgtttttttattttctccaaattcagccataattagttacacatatataaatattttagtaaatagaaggaaatgcatcactgtaggaaagtaatccaaaatggtatgtgtgggagactttgggaatggtagctaagggtacttttgtggtggtgttggctgttttagttatttgtaaaaatgtcaaaaatcttattttgttgggggtcaggaatgtcattgtaaatactatatagcaattaaggttttctgagctctgtaatgcatatccatggtatttacatttagcttctggatgctttagaattaagtgtgcaggtaatttgttccactgtttctttttccttcttgggaggtgagagctgtgtgtgtgtgcgcgcgcgcgtgcgtgtgtttaaatttattttttatgaaaacttgtgcaagtccagttcataatactgcagggacctattagtctatgccatgaagtttatagagaaaccaaataaaaaacttgtgcaagtcatttggctgattcaaaatacttaatttaaatattgatgtttttttaggtgtcaaagaagctcacaatgtcctatgtgctggcaacccatcagcctgaaggatgccaccaggtttctagttttgcatgctcattgattttcattgatttgttaatttttgtgggtgcacacttcatttacaaagttttgtagatacttttcaataaattaatgcatccttcatgtttgcagccaggagttacttgagggtgttgagcgggagaggagtttaaggtttaatccaacgagaaatgctacaatatttcatcatcctactcttggagattttgagttgcaacatgtttgtaaactgactactaattttgtgctcaagtagttgcatgctagctgctgattctattcaattaggattgtattaagagtttattttatgttcctcatttcagttaccagtgggtgctagtgattctgagctagaagagcgaataattcagcacttagctgctgctgctgcaatggggcgagctcgacacattgctagaagggaaggccatagaaataggtcatcagctcagggtcgtccccagtttcttgtattttcaactcatcccaatgatagtggagcatctactgctcctgcttcttcctctccagatcagaggggggaaggtgagccagttcctgcaatcaacctagctcttccttctcctgcaaatcccggagaggaatcatcacagtcggttgcttcacttccttttacccaagctgaacctgtatctgctgcagcttcatcttcagcttcagcttctggatcaagcgacatttctcaaccagggtttgccttaaataacaggtacacgattaatgattttgcaaaaattagtgtcttcatcagtgcaaaaatgattgcaattttaataaaatgtatttatttatttgttaataatcattttttgataattttgcattagtatgccaccaagtcagtcatctccaaatggtcaggatagagctggaccatcagattttcaatcattttccgaatctctgaagtctcgattcaatgcagtgtcgatgaggtataaattatggtgaacatttctttttctgaaaggaaaaattgaatttttcaattttttgaattcatgctttattttgctttctttcagatataaagagtcaatttcgaaaagcacaaagggttggaaagataaattattctcgcgcaacacttccatggcggaccttggttctgaagttaagagggaggtcaatgcaggtattgcaactgtatctcgcatgatggagcgtcttgaaacgagagataatagtagaactggcgatgcaccagtatcaaacaatttaaataattcagtttcagtatcagacaaccagccgacctcagattctagtggcgacaattccttgagtgacactactgtcaaggcatcaggcgcgggaggttctagttcaaattaagcactattcttcaatccaatcagctcagagcagttcttggtcaagggtaagtttggaactttagattgattattttctaacctatgtatctataatattctatgtttggcacatttttctttacacctcagctcagtatgatatatatgagaacttgggctttcatttgttaggtatagtttatacaaatatgggaatatcagtagttgtctctatgacgtacccctcagccatagttttcactaaatggctttacatacccgagaatattgccatagttaatttaacatattaatttgattagcaaactcttgcaaatggggaggtatgttatgtccactcaatgttagcgacatgaactttgtgcctgacacaaaatctggtctgaatagctatgttgcaacttgtaatttgtccaaacatgaagtactccgaattccaatttgtgccgttggttggacaaagtgagttgacctatttttattcttgtaattttaaaatttaaatataaaaaaacatatattttgttttaaaaaagttgcagaaattcttttaatgatcgggttgaaacagatattcaacatgcccgttaatagttgttgaaataagctccgttatttggattgtgatttcttcttgttgttttggtggttacttaggcaggttagtaaaatgtaactgacccctctctaacaattatcttcgtatttctttttatttttactgattttacaattactcgagttgctcctaagtcctaacttgttttcaaaggacttggctggagttttgggtcgcattattctagcatttctttttgagtaggccgagtttaatttggctagccttgtgtttaaaatttctactccatgcaacaaaaccattaacattatagagttaggctctttacttgacaggattatctgtagtttaattatttttcttattgctctttgttagaaatgatggcttttgttgcttctgtcattaatgtttttctctcttctccatcctcaactttctttgttagagaattcccacccaatacccatattgtggcataatatatttagaaagtgactgaattctgcttgatttgaactttttttttatactccatatttaaatgcttgttttaggtattatgaatccgggtctaacggctatcttttgccggttgaatttgagatctcattggaaattttatttatataggtgagatgttggggatctgatgctgtctgtctatgccaaccatactcttggtgtcagtagatataccctttacattttgagagattttgatcatgatattatgaatgaataaaagacgtagtagtggaaatggaatagaaaagaaagcttatcactccaaaccagaaaagcagtgtttgtaaatcagtttgtactaaagaagtaatttatgaatataacttttaagtcttgcagggctaatgcattcgttttattaaagatgattacattattatctctaactttgaatcttgcatatatctctgtataagaattccttatatatgtgacttgactttaatgagaaatataatcagtagtagtagcactttgctcttgctactctaattcttaaatcttgttgttcctcccatgtatatatgtgcttgtagctattatgtaatctctagcaaaaaaatgtatgaggtaaaatgtttttttttggttaattgggggtattttgcacttggatgacctacaacacctaaataatttaattattagtgtaagtaacctacctatggcaaattattccttactctatagatctgtaattaactcaatagatttgtaagcatattgaaaaagaacacacctctcactgtctctagctagactccagtgttgaaagattgatgtgtttttctaacacaagttgattaaccttgtgttgtttcaatcaaattttcagatattgacagtaggagacaagtaatagaaaaagtaacgttttttttttcagaaaagtacttttgttatgataaattaaagaggtaaatcatttacaataacagaaattataagtggaggtatattctctaactaaaaacaagtttcatccaactttagagaaaatttagccaaactgtgagcagtcatattagcttgtacgcttgaaatgaacaacattaactctaagaaaaaatgataggaggctagaaatatctacaattatatacctaaaaagaaaaaattacaggcaaataagctctcaaaatatttgaaactagcaaagcattaacctcgacttgtgtaattggcaattgcatctgaaggacccagttcaagctatgaaacattgcttttgcctccatctcatgggatgcaaatttaccaactatgggcttcgagagagcaacggttacatggccaagcatccaatgccgcgttcacattcaatttgagatcaccaacagttggtggtttccattgttcttgtataggggctgggggagagatcattggagtggcactttgagcaagatggtatttaattttagctgcacgaaaattttgcaaaaaagtggcagtaaaggaagctaacacacgagctggtttagaaatattgtcatggaccactcggtttctctcagtccatattgaccatagaatacacataatttgttcaatctcaacctttgaatggattgtagaaagataaatcaagtagtcacccttatgcatagaagaagcttttttctaataaaaaaccatctgtgaagaacgccaaactgaacgggcatatttgcattcaaaaagtgcgtcctcaattgattcccaagccctattgcagatcgaacaagtagagtaagtgataactttccttctaaccaacgatgttgctactagaagtgcatcatgaataattcgccaagcgaagatttttactttttgtggcaattgaagagctaaaaaaaagttccacagaaaagatgttgaggaggaagttgaagatgttgggttttatgccctaaataaaactccatttcaatgtaatccattttattcaatatcgataaagaaacagaagtttttttcattcatttgtatgttttggttcatcttatcaa

SEQ ID NO: 378467 - DNA, 4154 bp, Cannabis indica
tggctttggatgagatcagtgatgaatgttgtaaagtttctactggattttatttcattatacctagttggaaaaactaaaacaccaaccattgaagttgtcttgaatactttgaggtaaaagttgtattgaatacatagtcagtggcggaacttgaaaccaataatagatgggggcaaataacaattatgaacaaagtatttaataataatttaacttcttaatgtcaaacatgtatacagatgtattattattatttttgtaaaaaagaaaaattgggggctcccgctcatacagctagtttggcttccaccaacggacataggttaatggagtgatgttgtctcttggtgtactatcacagatgttaaccgattcatgtggattcttaagttgttcctttttatttaaaaaaaaataataatctaagcctttggatgctgtcatgtgttaattatgagtttgtggcacattataaactgaaatgcttttgcgcatataattgcctgtactttttgtatatggtcaattttgtgtccataatttaactgtattttgcattgtttttgggctaatatattttctatttgctacaaagttttgtattgggtttcattgttttaattattatttaccatttaattatgtttcttgcaggttgttacacctattgcgcctctcagccaacaggtagatttttttcacctagttatctgtccagtttgaatactattccatttaattgctctattgatttagttactatttgtagttcttcctgctcatttttttgcttcatagaaacctttaaatttaatatggtgttttagtgctccttaaatcttgaggtagatatgtctcagaatttagaagtatcattcatcaccgtaacatgctgtcttagttgtactttgttttcacttttttcacattgtcttaaataaaccattaccatgatttcgatgatgatttttaaaggggaaaatgagtatacatctctgtttatgatgagtgaagtagttgatttctgatataatatagattagcatacatgatgtaattcttgtgggagggaaagaaggtcatttgattcactaaagtaacataagcaagaaagaactatgcttatgataccatttgtttaaactgagtttctttgtgatatctgctgtgattgcttagtttctctgtttgttcattgtgtttgtgtgtgattttgcaggctggatatttttgttcagtttgtgaatgtgttgtaaaagattctgcaaactacctggatcatatcaatggaaagaagcgtatgtggtcatccaagttgttattgtctttaattttttttcttcttatttttggtaatattttatgttttcattattctatagatcaaagagctttaggtatgtccatgcgggtagaacgtgcttcacttcaacaggtatattaatatggagattgatatattttgacgttgtatatgtagatatggagattgatagatggttcttgttatattgtaaatatgagagaaaattgctataaatatgtgattagtgtctactcatgtggaatttttgtgtgaagtgctgaagttatagatactttgcaggtccaagatcgatttgaagttctgaagaagaggagagtccctgggaccttctcagagcaaggtgtgacagaataaaaagatttattttctttagaaatttacatcatgtcaattgatattaaggctctaagatggatatttgattattcttcttccttagatcttgatgagcggattctaaagcagcagcaggaagaggaggagcggaaacgccaacgtagagaaaagaaaaaagagaaaaaggttagcatcgctaatttagttggtgtttatagtataaaagcattagaagtaaaactcatgaaagttaggggggttgaaaatgcatataatgttcaatttcatttgctctgtgtattagttacatgaagcatcatggcctgaagcctttagaagatagggtatcaaagttgtcataggcatagtctaatagtactagacctcataaaaaggaggtcccaagttcaaatatccctccctcaatgtcaaaaaagaaaacaataaggtgtcactgtcattaatagcttgttaataaacaatatagtgttgagtaggagccattagtgctaaggatgtgaattgaagcaaaaagtagcttgaaaactccacaaaatattctccctaacagccataatactaagcctatctctaacccacttaaagtgacataactacctctaagatataacttaacaccaaaaacatgaaaatacttcatggattctccttttcttcttttgaaatggaaatatttcatcgaatttgaaatacacaattcctctcattctttcaaatcatgaaactcatcaaaaaatttaattttaagctgaaacgacgaacttttatttgaacctgtttttgacctgattcgaaccatgtttgaaccaagcgggggcaaaacaacaggggtaaaaaacacctatttcaaacttggtgaaaacctagtcagagacaaccaagtcagaacctaatccaaacttggtcagattcaggttcaaaccaaaaatcttaattcgtagattttaagtagaagttcgccatctcaacacaaaagtaatttcttttgatgtattttgaattccatgaagtattttcatatttttggtgttaagttatgtcatttgaagtgggttgggggataattttgtgagagacaaaaatagggaaaataaataagctttgtaggggtgttatgaggatgttttgtggagtttcccaaatagcaacccagataaatgtatcatattgtgatttcttatatggaagccaccaaatgattctcatcttcccatattgtttgtctattccttggttttcagaaagagaaggcagcagaagaggagcctgaaatggatcctgatgttgctgctatgatgggctttgggggttttggttcatccaaaaagtaatttaacttcaatctttgtagtctttttgtattttgtttcttccattttgatcaacagagatgttctatataggtttaagttaaattctaggctgaagatttgtacaaatattatatttttaatggatatttgtggcatagtacctacttacttaagttcagtaagtgttgattagggaaacaatacattaatctaaattataatttatttttttatctaaaaattgatttgatttttaattagaaaaattagttcaacttaaaaatatatatttactttaacaaaaaaaaaaaaaaaaaacttaaaaaatatatttaaaatataataaataatttgattttttttttcttaatttttttaaagcgaaaatcataaaagtggcgaaaagatatacatccaaattgttttactacattttttttggcaagaagttttactacaaattaactaaattaattctactaattaaaaaaaaaaagtaaaaaatgaaaacctacaatttcaatagtaaaaagttaaaataccatattaggtgaaaaaaagaaatactcacaaaaaacaattcgacattgagattagaaaggtaaaacaaatcagatcaaaaggaacaaactattttaattccattaacaaattacatcgaaagattacacataataattcacgtgatagtttttatactatgttaatatataatctttcggtgtaataatctatgtatacatatatcatcgctcttttgatatatagacaaaagcaaaaagtttaggataaagtgcgtaagcaaagttcattgtttcgtgttttgattacttttttcttaattcttttcatgtggattgtttccatgtaacattttaaaatgataagttaacgttattggtgatctaaactcagtaataatttattccaaggaaaaaatttattaattgatatcaataaattttgtcattagtttagcattttctgaaggaaaaaaaaaattactaacgagatggcaaaggattatactaaacttttgagctttattcaattttgatgaaaacaattctaaattttaataaaaaaatatatttagaagtaaatatattttagaataattatctttttcaccccttgtacttatgacactatac

SEQ ID NO: 378468 - DNA, 6276 bp, Cannabis indica
ttttttttaaaaaaaaaatctcacattacaaataaaattatattaataatttattattactttttaaaacaaactaaaaaaggttagaaattacaataaaaaacgacaataataaaaagttatatgcaacaatttagtccataatttattttaggctaataaggatttttgccccctaaattttaacatgtactaaattatacccttgaacttttaaggtcgttaaaaatgatccctgaactattgagattgttgggtttaaggactttttccaattttagtaaaaaagtctaacatggataaaaattcaagaggcataatttaatacatgttaaaattcgaggggcatgatttagtagatatcaaagtatatgaattatggtttagtacataaacaatcagtgaaatagtacaattgaatgaaattaaataaaattctttaaattcaacaatctaaaatagtttaaacgatatttttaactaccttaaaagttaaagaagcatgatttaatacatgtcaaagtttaaggacaaaaatcctaattaatctttattttatcttgtgaaaattccacactaatttacacacacccgttcaaatgttcatgagattgctattgtgggtgggacctctagttgtgtaatgtcactaaattttgtattttagaattttggataacattattgataatagacattattgtgttttcccctaaataatggagtagggagtgatttttctttttttttcctttttttttactgtactcattataatgtcaacttttactattaataggataaatgtgaaaatataattattgttatttttgaaaagtctatggaggcttctttataaatactggtatttgaagtaaggtttccacacgcttcaaaaccaaacctcactcactcactctttttctctctctaaatcttgatccaacctttgctccatcttcaaacatggatccttacaaggtattaatattaattatatttctttagttttgttgtaataataataatctaaacccctaatactttagtttgtttatttaattaaaccaacatcatgatcagcttttcatcttcttctgtatttatttttttaatccaaataaaataaaagaaagagtgagagagaatatctgatctgagtttattagtcagtttacaaatcttattttaatttgatccatagttaaaatatattattaaagctaaagttggcatacataatatatataaactataattacactatatgacactaatttatatacgtaagctgatctgtactaatactagcttgatctagagactaaaaataaaattattgttattattataataataataaaagtaataattaaaaagaaaaagaaatactagtttattttgtagtttagattgaatttattattaatattaattataatttgaagatgatgattatattataagctattaatgaagatttggtgtttggatataaaacagtatcgaccatcgagtgcttacaacgcaccgtttatgactacaaatgccggagctccggtttacaacaatgagtcggctttaactgtcggacccagaggtattttttcggcgaaactcacctatgttttgatttaattatttttttttttttttttacaaaactcttctttatttttacttatatttataaattaaaaattttaattacatataatcgttaaatataaattattttattattatattagcttcaaaaatttactcgcacctatgcatatacacatggttatcaaattatagtttttaaaggattttcctacgaaaaaaataaaaaactatacatataaaaattaaaatctaaaaagagattttaccgctaataatttttatacatataaatatttggatttttatcaatatatatttatatatatgtctggataactctatctatgtccataattaagaagtttggactcattatatgtacacaatctactaaaattacatatagtgacgtttggtttgttttattttactaaaattaaatatataaatatgttttaaaaattatcttattttgaaagccaagatccatcacgttttttttctttacattaaatactcggactatctcaatcagatcatgttttttattgtttgataaagaaaatcagattgtatctgctatataaaataaagttttgtacataattattaaatatatttattaaaatatataaaacccactaatgaaatcatatgccttcttttaaggtgcgtttataactatttatttagacacatatttaaataaattgtacaaaatattttacctacaataattgcatcagtttaatttgtatcaatttatatcaaaaataggtttataactagttctggaataccatatatttaatttttttttatttgtatttcaaacaaaaaaggaagaaattttaaagcatttagcaaacctaaatcagtaaaaaaaagctaaaaaacaaacaaaatatcattaaaaaaaatggacaaaattaaatctgcaaaaattttttaaactcttatatataatttcctcttttttaaatttaaatattaatttggcgtggcactcgtggacatgcaatgcaattgagcttgtgatttgttttttcgatccttcacgcaattaaacgttataaataaaatggaggtgatttaatttggatagttgcagttgataaacatctgtgaataatttactgtagttgatgattaatcttcgtaattcagaatacaagatatgttgatgattttttaccgaagaaaaattattgagtctactttaacgtgtttgacaaattaaaggtgtgaatgaaaatgttgatgttgttgtttgacaggtccaatcctgttggaggattatcatctggtggagaagattgctaacttcaccagggaaaggatgccagagcgtattgtccatgccaggggagccagtgctaagggtttctttgaggtgactcatgatgtttcaaacctcacctgtgctgacttcctccgagctcctggggttcagacacctgtcattgttcgtttctccactgtcatccacgaacgtggtagtcctgaaactatcagagaccctcgtggttttgcagtcaagttttacaccagagaggtagataataaaaagctttcgagttttacttgtgctctaaatcgtattccatataacatgttacactgttattactttttcatggttgcagggtaatttcgatattgtgggaaataacttccctgtgtttttcatccgtgatggaatccaattccctgatgtgatccatgcttttaaaccaaaccccaagtctcacatccaggagtattggagggtgcttgacttcttgtcattccatcctgaaagtatgctcacctttgcctggctattcgatgatgtgggtgttccacaagattacaggcacatggaaggctttggtgttcacacctttactttagtcaacaaggctggaaaggtaacttttgtcaagttccactggaagcccacctgtggtgttaagtccatgttggaggaagaggccattagggttggaggaaccaaccacagccatgccacccaagatctttatgagtcaattgcctctggaaactaccctgagtggaagctctacatccaaacacttgatcctgctgatgaggacaagtttgactttgacatactcgacacaacacaaatctggccagaggacctcattcctcttcacccagttggtcgtttggttctcaacaggaacattgacaatttctttgcagagaatgaacaactcgccatgaaccctgcccataccgtccctggtatccactattccgatgacaagatgcttcaggctcgtctctttgcttacagtgatactcacagataccgtattggagtgaactaccttcaactccctgttaatgctcccaagtgtgcccaccacaacaatcactatgatggttgcatgaatttcactcacagagatgaggaggtaacactcacattattcctccaacaaactcatatactttgcttctttgcttctttgcttattcatatattatttagttggctctactaatcacatactgttttttctttttcacttctttgttatagattgactacttcccttcaaggtatgataccgttcgccatgctgaaaagttccccattcctgctaaaatcatccatggaaagcgtgaaagggtaattcttccatcaccaaactcaatatatagtaaaagtaactccttactaatactttggtatatgtgttacttctctttttggtgaatacagtgtactattccaaaggaggacaactttacacaagctggtgtgagataccgatcttgggcaccagacaggtacatgcatatgtggtcattttaccatgtcaaaaacagtattgaagtgtttggtttcatttgtatgcaattcaccaatgtagattttgactaactttcttcttacattacatctatgcagacaagacaggtttgtgaagcgatgggtggatgtgttggctgaccaccgtgtcacccatgagatccgcagcatctggatctcctacttgtctcaggtcagtttccaaccaatctacttctgttaacactgttgaataatgttcatttgctgatgttatgtattggtgtcggtttgtacaggcggacaagtctctcggtcagaaggtagcttcccgtctcaatgttaggcctaacatttgagagtggacagcaggcacgtatgcaagatgtttttaagattcgaaatatgcaagaaggaactaaatggcgaaaagtgcagattataaatatggaatgatgaataactcctgtgtactatcttgtgtacttttcttctgtaatcttatgttttgtgttgttatattatgttatgtaactctttatgtacactatttattaaacttaataaatactggtcatgtgcaccagtttcatatcctttggtttcctttgctgaactgttcccattcagccaaatgaatgtgtcactgtattaatagggtagattatgcaccccaaatcaaactttaatcccttttattatctcaagcaagatttgttagataaaatggttcaagggtatatatctgatattagttatcataacaacaggtgattgacttaacatttaaccttttgtgtttgatatacagaaagagactggcctttgatttgattatgctgattggtgctttcttttagttatgaccaggtgagctatagcatactccttaagctcaggaattgggtgctgcaaaacctactcatcacgataaactggtacttctactactgtgttcttagtcatgtattcatattccaattctatgaatgaaaattattagtttacttattctgtttttccgcatattttatgatgatgtgtagaagatgtaaagcaatgggatttggcacaaacaattcctaggcttctaaactcaaatcaaggttagtgttttttaattgaccaactttggtagttcttatctaaacaggaaagattgataaaaattcttgactttggtgaataagaattaatattctttagaaccaagtctcagcagtagttagcctatgtgttttgaaacttccttttaagtctcatgactgcacatgcaaatgcaattgccattgaattatttcctatggcttaacttagttgcacttttattccaagttaattttgtataattaattcacctagccaaaatacaacaaacccaacttaaaagccttagaaggctgcaatcatgaatatcaaaatatgggcaggatttagtgttagaattattataatggactaatacaatcataggtttaattccataatacacaatcattaattatgtgcctaatgttactcataaccataatgggatggttagcaacttaattatatgttagaggcacatgagagcacccttaatactatagttggcccattaaattatagtataccgtaaaagacctcaaaagccctattagttaataaccccttagggttataagggtaataacatgtgtatatatatatatatgtgttatgtgtggtaagaggtaattagagtttgtatggtaaaggcaaaaggggttagctccacaagtgctctctctagtttttgctcaaggattggtggtgattctcatggaagacaatgaaggataatggctcacatggatggtatgagaggtatgtattttatt

SEQ ID NO: 378469 - DNA, 1434 bp, Cannabis indica
cccaaatcataaaccaataaattaatcaccgtaaactcgttcgcacaactcgatcaacccatctgggggtttcctaaaaaagaatttgcgcaacaacgacattaaagctcaaactacgccgattccagctgcaacaaaacaaacccataaccaattagcttagctaagctctgttaaagattccaactttataaactcaaatgcaaaaaaaaaactattgaaaatgaaattttcactactttctttctagcttggaaaatataaacgtaaacatatacatacatgtgtataaatccaaaaaatgaatttgatttgataatttttgagtttgagagaaattattggggtttgaagaaggtggtacggatatgggaagtttggtacttttttgttccagctgagaatttcaccaaccgacttggaagaaactgacgtggataccaccagagtagtaggacctgcgcccaccagatagagagattatagctcaatcatttcatcatttgcctttttcttttctctgctcaattttttctagttgttataactaattattacaaacatttattatttttgtttaagaaaaataaagtatttatgattttttcagatttttcttttttttttttttttcaaatccaaatgaaatttgtaagcagccacgtcttccattattttgttaactgaattgggtaatttcaatcatttatattgtttacttttgaaaagaaaaaatgagaactttctttccacaaaatttggtaataattcaagttatatttagagaagttttgttacggtaaatgatttgatttgtaaaaggatgaataagagaattggtaatattaatggagagcagacacttttatttgatgctctgtgggttccaaatgggtcaattcagagttaggatagtttggatcctagtttggctaatgaaaatgttaataatctttttgtggtgagtgaaaaagcttgggatgttgatgttgtcaaagatttatttgatgaggaagtggcggtcaatattcttagtaattccctctctaatttgggtactaagaattaatggtattgggagtttgactcttctagcgagtatacagttaagaatgtgtttaaattattatttgcaaaccgtgaggatagtgtggaaggggcagttgtggcgttttggaagaagttttggcaatttaaacttcctccaaaagcaaaaaattgtgtatggagggttgttagtggatgtcttcctatgagagttcatatgaaggctaaacatgtggatgtctctttgttgtgtctgatttgtcatgggacgagtgaatcaattttgcactgctgtgaatttgcccagaattgttggcgggtagcgagtttggctatgatttcaattgatgtagggtcatttggggactggtttcttcatttgttctc

SEQ ID NO: 378470 - DNA, 3474 bp, Cannabis indica
cttcgtttttttttattcatcatcatcatcatcatcatcatcatcattattattattggataagaaataaattagtacattcatcaggagaaaaagaattaccaatttcatgttattcttagctgctcacagtaatcactaaacacatcatcttacactaaacaatttggcactcattcaagtagaagtagccatatatgatatatgtaagtgcttcatcatgtgatactcacctggcagcaatgcttggaccaatggtaatgcagaccagaattcagaactgctcgctgccaatttactgcagagaacaggctgagaaacataaaggtaaaacaagaaataagtagcggaacaaccagattgtgaaaaaacaacagaaatcagaaatcacatatgttaacaaagaggttatatatccatgttcatgtaattaacctgtgacgcacaggcaaaaagaacgtgtaaaatcccttcttccacagcccctaaatccaagatgttaagatagttggagtcccacagatcatccggtagctggaattcttccccaaataaatttgagtaatcaagtaagagaatgggattaagtaaatcagatttgaatgattcatcccctgatgttgcttcactaggagatgctgatgtttcttgcacagtaagaggttctaaaagcttttgcagtatacgagaagcctgagagcaaggtggaattacagttcaaaagtaaaataaaaggttgcaatctctgatcaataagaaattagattaaaagatcaagagagggagaattaaaagaaataccatcctacaaacaattcccatatcagaatctttgcatgcctttctcaacagcatgaatatcagatctggacgaaacaccatagaagtagatgtggataagataaaaggtgtactgcgtaatttccgtggctgtatgaagataaaatgaagatgattaatatcaagatcatgatgaacattcagaaataatcttgaatatcaagaacaaaactcaacgtatttgttgaaaattcattttccctttatctgttacaaaatatcagagcataaaatgctgaacatcaaaattaatcctgcttgagcggatatgaaaaccagattcccattattaaatgaaaataggataaaaattactaaaagaacttgaaataatgtacttgaataacctaatatctgcagcacagaaggtataatattgggtaaggtaaagtatgctaagacaaaaattacataagactaaacattacctcaaagttagatgaaacagtcaaagctgaagacagctgactattcctagaaacttcagagtcagaaacacttcccgcatactttgttgtggccctacagtatcgaaggtagttagacgatttggtggaagaaacatcacagctcaaacaataggacttaaccacgatgcatcctctgacaaagaagaaaacagcttggggaaaaggaaatgactgcatgaaatgaggagaccgttgtattccatctaaataggcatgtagtagacaaattgtagaaactatagattacttgttaagcatattattccctttcttacacatatatgtttgttatgctttttaaaaagctttcagaaagtgaggacactttttgtgattttctttagaaagtcctcatgaagtaaaaaggacaagtgtttcggatgtgcacctctatgactactctgtcggtcccaatactccatcatatgcacgcattaatttgtacagatacagaatatagcccaaaatggataatcgagggcgcatatcgaatgttacaatgatacatttgcatgactctgctacaatagcattaattatcactagtactagcagattacaaagggtactttcatcataattttgtttgattgcaaagtttcaattcattccgtacaatatcttgaaagccatcattttagtggtcttgtttctcccaatgattcaaattccaaaacttggacaaaatcactttttgcttattatttgtaggacgtcctttcctttgtgcagtattaaatagttagcttcccagaaaactccatagcatattctatttctaaaaactaaaagagagttctcaattcttagaggaatgatgaatatacatacctttcatttatgacataaagaatcggataaaatagacccgcaagcatagcaagaaaccgtaagttaggttctgcagcatctgaaaagctgttgagctctgcctatagagttggaaaccggaaacataaaaaagatatgttatgacttatgatacaacatacaagcggaagaagcacaagcaagaaagaatctatataaatacctcaagttgggggaggaaggcatgtaaccgactggtcatgtcttgaagcaactacatagcgatgagcataagatacaaaaatgttaaaaaagagtaaagagcaaagcatagttgttgcatataaagtgatccacctgaagatgcatatcatgagcatcttgtttatgggaaatgatttgaggcaacaagtggttcacaacaggttgaaactctggttcaaggccaataactgaaactccaatcagctgccatgaaaggattgattttattgtgtaagaaagaggagtttaatattttaaagtaaacaaatttgatcaatattagaaaagaaagaacctgtatgaaaaaaagagcaattgggtttcctcgtaaacaagatattctgacataacgacatggagtgtagttcattgggtacacaatgtctcgtcgaggagcttcacaacgcgggcgtactttgacaaatgtctcaggctacttagcataagcattagaattagaattagaaaaacaggagatgaagatgaataagctgaagtaaagtagaggataatgatggaaaccttgaagcgcagaccaagagaaatttcccattcgagaacggacttgttgtgaatccgaatatgagagagcaagcaaggttcctgggaacgaaaacagaaacaaaaaaacccttaaatccaagagaaagagatgattatgagtgttgaattgaaaagtgagagaattagggagtacgttgagttggagaagaatccactccttggtgttggtagcagtagaccagtgggtgcgaaggtcagcgtcgaggacatgagcagctttctgagagggggactctctggatgaggccttgactttgaaaggcagagcctttactcgcccttccatttccatctccatcatctctctcttcttcttcttcttccacttctgagttctgacttctcccccttcgttcccattttacacttacagtttctttctattcaggccaatttacaatgtcagtccttcaagttagccaaatggtatatagtacccgaataaatattattttggaccatttgttttgtaaaaattaccgattagttttttattttgttaaatgataaaatagaccttgtattt

SEQ ID NO: 378471 - DNA, 7124 bp, Cannabis indica
aaacaaaaataaataaaatataccgaccaggtttataacctagaacttcaaaacttcagattaagggttaattttcactaaaccccaaatgggcaagtgaaaccgaatatcatggaatcaaaatcggaatgtaattataatcaagtcatatggttaagcacaatcaagatcttatattcataaacctagattttttaccctagaacaagttcaagaactatgaaattttctacagaggaaacccagaaaattaaatattcaagcataaaagagaaaagagatgaagaacttactcactgtttaaaactttagggctgatcggatgaaacgtatcaacacttcctggaaattcttcgaagaatttgagaggaaaaggttcttgctctgaaattgtcaagaagaaaaaatgctaaaagtcgtttattagggatttctaccctatttattagcaaattagtgagggagtgcaatcatttcaaaatttaaatgcctcgatttcccctcaaaagtaaacgttaggcaatcaagtacatgaagagcaaccgtcaaagcgtgaaaatttttggagaaatttgaggtacaaatcaatcagcattgatgagccgaatatcgaagagactcttggtcataatcacgtcagatcaccaatagacgcatcgaacatgtgccactcgttcaaacacggatacaaaccgagtgaagtccacgcgcgacttcggaagtcccgttcaaacttgaggggaaaatgttctcatttttcgcactatgacgtggcagcatatacgaatgacacgtgtccatcattccttgcacttgggcggagaaatatactgaatagacttcaagcaacataaccgcacgcacaaagtctgcttatccgagctgaaataaagggcagattatccgagctaagaatgaagatagttctccgagctgtgtaccaagacttggatacttctaaatggtatcgtaaaactcaaacacaaaggctatccctacaattattggattatatcagagggatatggcaggctgtctcaatcccccatttcatgtattctaaaaatgtaatgaatgtacttaccaattatagatatcgtaagcaaaagggaaaccttccctcatgcatttagcccctataaataatgatctagcttcactgtaaagaggatcgtaagaattgctttgagagagatctaagataaaacactcagagatttcattgtgagagctttgagagaggaaacactgtgttctttgttctcaagttaatacaatctaaggggattaagctattactgaattaaaggggccgaacctctataaaacttggtgttctttaacgcttattaattttttgctctgtttttattacatttttaattgcttattaattgactcatcgttgttgcctaaaaccgaggtcaacacttatattcatatataaaaatataaaattaaacaatggttttttaatgaaaaaaatgcatttaagaaaaaaaacttgtaattttcattaattatttttcaatttcttattattggaaaaaaaatatatacgtatggcctacaatatagagaggtgaagagaaaaaaaaaagcatttggttttgttctttcttgtcccgcggagctcggtggctcggtcaatttaactctctgatatcatatgacaatcaataatccaacggcttcctcaacgccatgccaacctcagcttcaccaccgtcctccgcctccgcctccgactccctctctagcctcgccgtgttctccacgcgccgccattccgacctccttgctagactaacctcctccgacacccatgtacagctcaaggctctcagggagctcaagaaccgcatcatcgggaatcggaccaagaagctttttttcattaagctcggcttagttcctgctgtggctgatatcctcgcctccaaaaccggagccgttgtaccagacgatcgtaactccgatcttcttatccagtccgctgctgtcattggtagctttgcatgcggcttcgacgccggagtccatgccgttctcgatgcccaagtgttccctagcctcctcagactcttatctcattgtgatgagaaggtattttatatttatttatttatttgcgatctgttttctgtttggttgcttagaatttgatggaaaatgcatgaggttgaatgcgtaatgtataaaaattgatttatttgatgttttttgataagttgagatgataattcgaagtatttatcttgataaatagtgttggtttagttcaatttccatggtttcaatattgtagaattaatttaggtcattattcactgctgttgaatattgctgcaaatatttatttattaaaagaaaaattatgtgattttgatggccaaatgcaagtagagccaattagcctaattaggttatagttactcttatagattttattttatgtttgtgctgtaggttgtggatgccggggctcgttctttgcgaatgatatatcaatcgaagcttgctccaaaatatgattttattcaacaaaaaaatatggaatttcttctttcgttattaaatagtgagaatgaaaatgtaactgggcttggtgcaagcatcataatgcattcttgcaagacagtcgcagagcagaaggcattgtgtctagctggggttttaaagaaatttattcgtcttcttcagggttctctaagtcagagagatgctagtttggagtctttagctaaaattataaaaaacaatgttgaagctgtttctgagtttgtgggattggatagcggaagggctttgagtacggtgattgagttgacatcagataggtatccaaggacaagattactggcctcgttgtgcttgattgttataaggaacacttgtccttgctacctacaagatatagccatcaaaaccaagttggtgcatcttttacttgagcttcatgatgatcctggtcaagtcggagatgaagcctcttttgccttttctagcttaatagctggaagggaggatcttcaaaaacttgcatttgaggctaatgccattgataagctgtacaaccacttgcagaaaggtgcactgcatcctatgcgtgttgaaggcatattgttggcaatggctgatctatgctcaaaaatggatagctgcaggtttaagttcctaacactgaaggtttgtgtttacagttttacttggagatactaatttactagtgcattattctaccagccctatgctcaatcatcttttttagcaatatcattgactacaaatcagaaccttatttcttttgtttagttgcttgacttaagttttttgaaaacttttagtggtttgacttaatcggatgagattacctgtgttcatgtgtacgattcctcttaacatttgggtatatatttttcataaacacaggcattgaaattggtaatagatgggctaactcaagatagttctgctgtacgtgctgcagcttgcatttgcttaaaaagtgtctctcgatcaatcaaggtgtgttatgggagtatcagtttgcttttcacagttgtctttcaaacatgctttggctaatagctgagaaattattgtgcagagtttgtgtgcaggagattttatggacgagacaattgtatttcccttggttcaacttttgcaggatccttgtacttctgtccaggtacaggtctagtgatatgatcattaattgtcatgttttcttacatgtgtagtcatatttgctctgctaaatttctgtccttaatcagaataggcctaatgtttaggttacccttgatttagttggaccaacatgcttgctggttattatggacactgctatcacctttaaaaatgagatctgatacattttgcattgatagctatgtaaagcccgacattgcagtcatatcatatggtaacttgtgtgctcgtgctcgtaatgtttaggttacccttgattttgttggaccaacatgctttgctggttattatggacactgctatcacctttaaaaatgagatctgatacattttgcattgatagctatgtaaagcccgacattgcagtcatatcatatggtaacttgtgctcgtgctcgttaatgtagattcagggatagatttagtttgacgttaagttttttctttttatgtgagaatatttcactctcttcctgtaaggtaaagatagatctaaaaactgaatacatatggtaagttcttttctagcaaaggtcatttataatgataactatataaagggtttgaaattcattttacacattaagaattgaagtgttaaagataattgggcatggtaggttcctttaccatttacagtccctgtttccttagagatttgaaaaagtattaaatagaaggctttcgttaaatgcttcccaggttgcagctctcagtgctgttggcaacatagtccttgattttaccaaacgtaggtccattttcatacgatgtggaggtgcaacacaactagttcagttatcaaaatcaatggattcagccttgagattaaatgccttatgggccttgagaaacttaatgtttcttgcggataccacatgtaaggaaggcatatttggagaactcgaagcttcctcattggcaagccttgtttgtggtaatgaattttatttttcttcaatgaacactcgcattattgtatgtggaagttggatgtactcccaaagattgcttagtcgattgtgtttatctgcagattctgagcctgtagtccaagagcaagctcttgcacttgtccgaaatcttattgatggaagcgtgaactgtattgagtttgtatttgctgaagacggtattatcttacattctgttggaaggaaattgcagagtgttcctaaagttgaaattgcgatacaggtgaggatacttttgtagatgggtcatttagaacttgtatgttgaatgtactttatagggaaatgaagtgtaataatgtgaatgtgtgtgtgtattttgtcatagttacttatagggaaatgaagtgtaataatgtgaatgtgtgtgtgtattttgtcatagttacatattataattgagttatggaaacctttatttagggaatgtatttgctctgcaatgtcgcaagtgggaatgaatttcacaaggatgctgtaatgaaccaacttgttaaacaagcagacaacggaatgcaatcttttatgatcgaatttttgcagagcagcaacagtcaattacgtacagcttctgtctggaccataataaatctcacttttccatcagttcctggtgcatctggtcgtgtatcaaaactacgtaatgctggcatattgtcacaaataaagagcatggtcaatgatcctagtccagaagtaaaggttggttggtttaaatatcaaattcttaattttgtcttccaattatatcttaaatcatcttttgcttgttacgcagcttcgcataagaacagcacttgggcaatttacgacttctggtgctgattcaacatgatgcctttcctgattcccatcttttggggacccaatgaagataaacataatagaccattgttgcaacttggtgtatcatatgctctggttctttttgaatggagtttcagccttcctggctgtggctttccagtgcatggtatgctccaatcaatgtttaaatgacatgtttatcatcacaagggcattgactaagctatttctagaacttcatttcacttctgacatgaaaaattctttttgtatattgtttaaagaaattatatcatatgtgattcagagttgtcttagcagttagatgtcatttatagggtatttgttcatgtagtaaatttttgccctcgacccacgaacaaagagtgtaaacagaagcttttaaaacaaagctggctgtcaattttacttactcgcaattacgagattgtgtgaaagtgttttttatttttatgttcaagcagattatggcgattgattttgatgttagaattttcattgcgtgctacacatacaggccaccacaatgcccaacttccaccactgcgatggttgcctttagaagctagtatctttaaattaaacttcaagactagttatttgctcatcaaattatcatgtcttcctttagcaggctaaccacttttgcttttctttttcttcaatcaaagcagtcaggtcgcttatttcttcctgtgtagtaattatgaccacctcattatattttaatggtagcaagctttgtaacttcatttcttctattacaccatgattgcttcaattgcaatccagtgcttcaaagctaattgagtatttgcaatttttttttccttttcacttcaatgactttgcggtggtagtggctaattatggttgaagacggagtaactcgagtcctaggtgtctaaaaatcacaaggccccctcccttgtgtaaaggtacactgttatcttaaatttcgcacagagtgatgtgatatctatttgagtgacatgtgaacatttttagatttggacgagtgctaccatctttggtatgccatctagagtaagttattccttgaaaatagtttatttgaagattgagttggaacattcaaacaggttaaatggtatcgtttcaccagtattgatcttgcagccagcccatatatgtcggccatggtaaatgcagctggaatgttttagaaatactttccttatttattttattaattgaattcttattttaactaaatttctacacgtgtagtaaaatgggaaacatttatagttttctaattatttttcatttatttgggaaatttaattagtgtaattctttcttataaatagtggaactatttcattatttaaggattcaaaatcaattgttcaagagagctttcatgttgtaaaaattgtaaattttcaagagagatcaagaatactatcccgattacaaaacactttacaaaaagttactgtctaatacaaaatatttgtcgcccagcgactaactacaaaagcgctgttgtctcgaggatcgtacgctccaggcctaaccgccccgacatgtacaatcttcaccggctcgctctcagggtccatcagccttagccttgcc

SEQ ID NO: 378472 - DNA, 2291 bp, Cannabis indica
tggcttgccacatgtcttgctgttatgaccaggctttccacattttttgcagtgtattatagtgccaaactttctcactttattactagcaggaacctcaccagcttcacggtttctagctttcttgggacgtccaggtcttttctttactagaggaggttgcaaaggatgtgttcttggatttggccatgattctgggccatttgtaccttcgattatttcagcataggtcttctcatacgcctgcttggagtagtaagcatcaacaaaagaaattggatttaaatttaccttgagtatgcaagccaaagcatgttcacaaggaatcccagttaattcccattttctacatgcacatgttttagcattcaaatcaaccacatactgctcatttgtatgagtaactccaacttgaaaatgtagttcacctgaccatttaattctacaaaatcgagcccattcttgattcttagctatgatttccatggctttgggtgaaattggatacttccacttctccattgactttcttttatctaccattcgctccatcatatagttcttgatcctctcaagcataactattataggactatctctagctggaagtatagacttattgaacgcctcacacaagttgttaagtagaatatcacacttgggacgagttcgaaagtgtgatctactccatgcagatgttggcttatcactaaaccatgctaaggcagtagcatcagtgccacccaatgtggccatgtgttgttgaaatcttggtatagttgttgttcttgctgcagcccaaaccatttctttaagtgtcaagctaggatgtttagtcttgaagttattgtacatgtgccttacacagaaacgatgttcagcgtcttccgcatgcttcttaacagcttccaaaaggcccttttgtctatcactgatgaatgtgaaagataagctattgttcatttgaaggtcttctttcaaaatctctacaaaccattcccagtttgctttattctcagaatctaccacagcatatgctatgggaaacatgcaattattagcatctataccaactgcggaaagtaggattccttcataataccctttcaaaaaacacccatctaacccgattagaggcctacaaccagcattaaacccatttttgcatgctgaaaaacaacaatacaacctccaaaattcgttgactcccctactatgaagcacaatagtactgcctggattacttctcttcaattcttcacaataatcccataacaaagcatattgatctttgatatctccttcaatcattttcattgctgtagcccttgttctgtagaatttccatcgggagacctcactttcaaagtcatcctttacttggtcaatgaagccattgcaggttgttccaggttctgatctaaatctttctttgtacctttcagctaaccactttgcatctattcttttattgttgtacacccgctggcagtcatgttcatcaataagtttttttatttggtatccaattttgtcctccattacactagcatagacaaaaatgggcaactctcttggcaaattactctaattcttctcttgtcattcttcacaaatctaatctgtctaccattctttatggcatattctctcaaagcttccttaacaactttcttagacgcaaacaccatacgtaaatgaaatattggattcttcatatcaattgcaggattaaatacagggtagccatcatcttcaagatcatttatattactctcaacatcaacttcatcagtggccccatctaagagcaaatcactatcctcaatcaattcaagccatgtgataggttgtcctagtgtcatacagtaatcctcaattggttgttcataatcctcatctcgtatttcttcttcagtactattttcttcatctgaattttgaccactctcatcatcaccctcatcaacatccttaccaccaccctcatcaatactcgcattaacaaggaagtcaacacttttcttattctcttcacttggacttggacctatgaaattcaaaatgtcatcccattctccataattagtttcaatatttgggtttgtgtttaaagtgtttggagttgagtttgaaatgtttgggattgtatttgaaatacttaaagttaggtcatcactctcacctgacatataattataatttttaactcaatatacaattacacatataatacataataaacacaaaatgtaattaaaataaaaaaaaaatgactcactgtatatagg

SEQ ID NO: 378473 - DNA, 3987 bp, Cannabis indica
atgtaattttcattattttcttataagctcctttggactcacaggtagtggccaagccaaccatatttctagtaagggcaaaaaaaaattagagtactaataataaaaaatataattttaattgagaaaaatataatttttagttggataaaaaatatttaagagtaaaaataagaaatataaattttataaagataaaaataaaataaatttttatagggacaaaataaaaaatctataaagatataaaatataaaatagtaatttttagaagagaaaatataaaatattcaaaaatatgattaacaaaaaatcaaggggagcaaatgaccccacatgtcccattggctcacacaacacatgcaccttgtctggtcaagtgcctatatttgcaaaataaaaatttgcagaacaatccaataatcataaaatttacaaaacagcccaaataaaaaagaagaagaatattgatgaaaggtcctgaatcgcttgtttggtaagtcttcttatattattttttatggttattgtttggtaagtcttcttatattattttttatggttatagttttatattttatttttgaaatttgtcatattttaatgttagaataatatataattgaattgctaagctttttctcgtgtctatttttgcaatggttggccataggaaaaagcaaaaatagaacctttgagagtaattggtactaatgataatgtgacttgtgggtaaagtgatgggtggggtctaccttttcttttttctttcttattagtacttattttaatattttattaagtttttaatttattgagacatattgatagcatagccaacttgttgtttttatagtaaagagcatgctccacataataaataaattattaaacacaaagatcctacaatattttaaaaaaattgagcatataaaagtggacatatattaaaattaagaaataccaaatgttatatttgtttcataatgatggattaaacaattaacaaaactattttagtgaaatttaattgtataatttctgagcaattgcgcacaaattaagtaatgtaaattagttatctcatgttataaaatgtggtaaattagaaaatagaataattgttgtattgtgaaattttgttatattttagaaaaatagaatgaaagttgtattggaattttttttaatttgtgacctctagttattttataatagaacaaaaaattaattagtatttttattttgtaaacaaattctttattagcaaacaaaccaactacaacaaaagccaattagcttgaaaggcataagcaaatgaagttgtccacccaaactgaatgacaccctgaaattttagctaactgagtaagaaagtgggcagctctatttttacaacaagaagaataaaagattgacacaattacatagcaaaccactgcatacaatagcatatagaatagaactccactccgaccgactagtgcaaggttaagtcaaataattggtagcttgaagacaatctgaagttagctggaacttttgaatctcaaaatggtgcagcaaatctagttccatctaaattgcaaggcattccgccatagggaccaagagaaatcagaccgggaaatagcagtagcaccaaggatgaggccttgttttgatcttattaaagctcccacaccacatctaggaagaccttccgtgatagttgcatcacaattgagaataatagtctcctcttgatcatcaaaccagtaagacttcggggtcccctgcataattatagtcgcttctgccttcataggaactacatgctgaaactcaatttgagacaggaccaaagggatccaaccaaccaacaaagcagtagaaaggtgcaagtgtttcttattcctcctagaccacaccagctaagataaaagaaagcaagtcggaacatatagttaggtggtggttatggagatataataagaagtctcaagactccattggagccttcgggatacaatgatgccaccccatatagctccaaagcggtttaatagccagataaaatcgcagagcatgacaaatggtttcaaacgaataaccacaactattgcaatttatatcaactttcatacctcactatttcaggttggtattcacggggatccaacaaacacgctctccaagcaatttttttgattttgggactcactcccgaccccaaatgaacttccaccatcgctctgctgttgaataatggacacattctattttagttttcaataaagtgcacacctcgtagccgcttttcactgagaacgtgccattaggagaaaaataccatatgagatcatcatccttttgattcttaattgaaacaaggctaagcacccaaggtacatcctcagtgtaaaaaaatgactagatactatcctcatactaggggccctatttgcctaaaaggttggtaactctagtgttagggggacaatattgattttagtccaaagagagaaaggaaaggctttaaggatccacttgtcctcattgatccgaattgtcaacccatttcgaatcctccaatgaatcccctgattgagaagcttacaagcccacatcaagctttgccaaatatatgaggcatgaggcgataaagaggctgccataaaattgccattagtaaaataacactttttaaacacccttgccaataatgattgcggattagaaatgacttttcaatacaatttggcaagcatggcttgattaaaatcttccaaatttggaaaacccatactgcctctattctttgagaaacaaagtttatcccaagacctctaatggatttttcgcgttgacatggaagacccccattagaaacaagcttctgttgcatgaatttcatctattgtgcctttaagaatgagaaaaaaaaactcataacataggttggaatagcctgagcaacgacttcaatcaaaatttaccgacccggttgagaaaacaaacaagatttccatccttgaagcttattctaaattttgctttggactttggcaaatacttctttcttcctttgacccgcatagactggcataccgagatacacatgatggcaaggaaccaaataaacccaagagtattagctatatttcccccactttcttcatttaccctttaacccatacatatttacgatgtatacatgttgatgtgttgactagaaagagatatattcattcagaatttggattaaagagacatatatccacgttgatgtgctgaccacaaataaaaccaatcctttctgcttcatgtaataagcaggaaaatgcctctgaataaatgaggaacatatgaggggataaggggtcgccctatctaagaccccgaccggtgcggcagaaaggagaactgagaaggaaactggccttatacagttcataattttctttatccattggggatcataccccaaacaatccatcattgcagtaaggaagccccactccacgcgatcgtaagctcttgacatgtctaacttccaaaccattttcttgccatttcagaattgacctttcttcatgcaatagagaatttcaaatttgagaatagtattatcttgaattaaatgccccttaatgaatgtactttgattatctgaaatgacccgagatagactttgtttcattcggtttgctatgcatttgaaaattattttataactaatattgcacaaacttatagaacgaaactcaattacttgagttagtcgcttaacttttggaataagacaaattgaagtctgattaagctccccacaatctgcatcattattaagaatcatcaagcacaactgactcagatcatctccccaatatatctcaatgatcttgataaaataatctcgggagaccatctgtgacagtcagtagtcccgtgatccgtaagggaaaataccgggtaagctgtgcaatcccacatcgcctggggaag

SEQ ID NO: 378474 - DNA, 1532 bp, Cannabis indica
aaacatgtttatcaaactctggtcataaatttataaaggaaataaatcacctttctttgaagtatgataactaggatcaccttgactaatacctccctgcatacttatcctagttagacaaatgtgaatgaagaaactttcaatgaccgctaaatcaaataaaattatagtctgctacttcacagttccaaggcaaatggtgacagatcattaggattgtgaatatggtcaatataagcttgtctaatttgattcaatttttggtttgtatgtacatatatattgatatatatatgtgtgtgtgtgtgtgtgtgtgtgtgtgtaagcattgctgccattcaaatcaatggttttccaaaaatagaaaaatcaaatacataattctgaaggttatccctatgtccagcctctcaccaggaacttgactttcccagcctttcttagttaacaaagtaagagaatatttaatataactttatccactcatcttttttatgcacttaactaattattttaactaggcacgtgaattaaataagttcttttctagcccaagtctcattcaaatgacacttaacaggagacatgtgaaccagaaggtaaatgtactagtttctgtgattattttgtaagcaacgcattctaaactgaaaatgttgaaatacaaatctatacctgaaatgatttccttgatgatacatttacagtcctagagcccacagtagctgatactctaaagatacgaaaacaagcgaaggatcaaacaacagtgaggatgttattttcaacttccgtcaaagttatacaaaaaggcttttgcaagataaattaagatagaaaacatatcactcactcaaacgcatactaaaaaaatacatagaaggtacatcatgtaacaaagaatatttctctcatttcatgaactacaaattttcaatgaagtatttataggaacccttggttcaaaaatgaaggcttcacacaagataaagacccccctatcctctttaaaatattatatgtatatttatacaatgaattgttaaaaatcattatcaaatctagaatatgttagaatgttttacaatgttctaagaaatttgtaagaaaaatcaagaacactctagaaagttttagagaaaacttagaatcactagaactaagattagataattctagagttgtttagaaatagtaggaagtaattaattagctagtaaattagaaaaatctagaaatctttagatacatcttttgtagcctataaatataagtgaggtgtgtgcttgagatgcaagtttgagcaagagtgttcaaagtgtgttcaaaagagtgagagtgtgttctaaagtgtccctaaaatctttcaaaagtgtgagttatacacaagtgtgtagtaaaggtgtctagtgataaaataaagagtgagtgcttggtgtgtattgtggtcaagttaaagtgttcaagtcttggtgtaattgctttttcaataataaagtaattacgtttttcacgtgttgtggtgtccaaca

SEQ ID NO: 378475 - DNA, 3535 bp, Cannabis indica
aaaaaattactaattaactacttacaatgctttttcaaaagaaaaaactagcctacccactttgtaatgttctatttattaaattaaaattgtagaatccaatataaaatgtagtaccatttcttttaatgcttgagtcatgtttcttatcatttctcatataattatccttagtttgtcataactcacaagtcacaaccagcttatatatatatatactacatacaaatacaacgttacacacaccaaaacagtttatattggaagttacaaaatcatcttcatcattctgttctcctaattaaaacaactccaagaaataacaaacacaccattttctttcagccatgaccaccggaaacctagacggtcgccggaagaggaagtgtttggcttgtatagtagccggagtcataatacaaaccctaatcatagttttctttttcgttttcattatgcgtgtcagaacacccaaagttcgtctagcctcagtctctgtcgagtccatcaacataaacccttcttccaaatcctcttcgtttaggatcaaagtcaatgcagaagtcaaagtaaagaacaccaacttcggctactacaagttccaaaacagtacggccacgatcttatatagaggagctgaggttgggaagaccactttggtcaaagcccgagtcaaagctcggtcaacaaagagtttcaacattacaatgtcgattaactccaacaaggtctcctcagattctcatctggcaggtgatatcagttccaagaatttgagtttcagtgcctctgcaattttggaaggaaaggtacacctgtttatgatttttaagaagaagagatctgcaaaaatggactgtacctttgtcatcaacacttcatccaaaacggttcatgatttgttgtgcaagtaaacttaattagttacctcttctaatattattcttcttattagtaacttattactttcttttacttttggggtttatacaaaattgatttgattttttattcgattaattacaagaaagttaattagttcttgcttttgcttttgattattaactaatattgtgtgaatttctcgatttttgttcatttttttctaattctaaaacttctttttcttgagctgtcttgactagtgaacatgtgagaatctcatcttttaagaatgtggtttcttataatgttttggtcatgtactcttcgaatacaagcaaattagtaaaatggcgggccggtcttctaaactttcactatcgataatattacaacaaaatctatattaaatttttatatattgcttaaaaaaatgaatttatttataattacttcgtctatatttattaaacaaaaaaacttatgtacatcattcattggaatttattagagcacatataaaattttcataagagtaatttgcggcataaatatatttaagttttataccgagtaacacataattacttaagtcgtatttttggtacctcaccgttatgtgccatataagtatctacgtaacaatttcccattggtccagatcatttattaattattttttatttaaaaaataaataaaaaaatatttgaaatttaaaaattataattttttttaaaaaaataaactcataataaaaatcattgtttaaaaacaaatcactaaacacaaactttaattcaaaacctaaatccccacatttttttaactaattttttttttactctttttcccatttatcatcttgttcttccttctcaccatcatcagaatctaacctccctcttttaatctctttttctttctttttctctctgtatccaaatcataaaaaattaaaaaaccctaatttctcatcactcaagagatctatcggcgagtgaccatacgtgatcgaagttagaaacatgtggggttgaaagagtaagcgagcttcgtgctggtaatttgaatcgacaagccaaagaggaccaccatactggaatgcagatcgacatggttagcgatttttagagttagtatatcatttgtgggtttttctcctttatctgaatgtgatttgtttctaacatttacattgagcaatatgtaacctttgttaaaaaaatttatcaatgtttattgatctgagcttgaatttgggcatttggattcgtaatctgtgttctatttttgggtttgagtttttaattctgggtttgtgggtttggctcgggcacggtcttaatagacatttgctcttcacctttttcattcaagggttttagttttgggattttcactttaaatttggtggtagcatttgtattttgtttgtaatatattttgatttagaattctgtataaagtttttgtttttgacaagttttgtgttagttttagggtattaaacaaattttatattgttgatggacagttgaagatttgggtttcttttattcttttttgttttgtttgttcaaaatctaagtttgcttgaagtggtgtgattattcacttttggtcttagttttgtttcaaaatctgaatttaatttatgttggatttttttttactcaaagagaaaagaatggaaaaaagaaaaattaatttaaaaaaaaagaaagaaaaagaattaattatttaggtttagaataattttttacgtttcataatattttatttttattttttatacattttaaatatactattttaattttaaaataatttttaaataagtttaaatgaatttcaaaatgaaaaataaaaatttatgatgtggactaatgaagggtgacacatggacacttacttggaagaaaacagagaggtacctacgaaagttctaggagtgtgacggaacgtattttactgccaaaaatacgacttaggtacttatctgctactaggtataaaacttagatatttttgtcgtaaattactcttttcttaaatgaaaagttagaatttctctaaaaaagaagataaaagagataaaattttatacaatctccagcataaacttaacgaaaaagataattatatgtatatatttaatattttacttttatttgataaatatgttggggaggtctagagtgcggcctcccaatgaagattagttggagcatgaaagagttgactaagtttgttgattatgaaggcgaccttaggacgtctaagagttagatactacagtgcgccaattgtgcttctatagagatgcaaatcttccataatttctacaactgtcaaagacagttttttagttgagcttatcgggctagaacaaggcttggcaccatctaaatgtagctgatgtcgcccaattagttaatctacggtcatagtagtaaacgggctatatcgtatccacatggagataaattaccactaaagattaatataaatagaaaatgatttaaatgtataataaaaatgatgaggtgagttgatcagataaagagtttggtaaggtagaattgttggaaattattttaccaggatcttagatctactcacaagtatgtcgattaacatcctaaatatgaa

SEQ ID NO: 378476 - DNA, 3253 bp, Cannabis indica
aaaaaaaaaaaaaaggacaaacaaataattccattaattaattaacttcttaagcttaaataatgtgtcagaacatataagaattaacttaatttgcatgattattatttcataaattttgagctgtgtgccatttatgtttttaattaataataatattttacatgtcaaatcaataaggaaaacactaatgtacatagatttcattatataattaaataatgataacgtgttgaattacatgctaattaacgtgtttgacttatttgaccacacaggaagggtacatagttccaaaaaccaagtgtgaacctctaccaaggaataagcttcttagcccaataatattccacgaaggtcgttttgtgcaaagaccaactccactagtggcactactcacattcttatggctcccaattggtataattctctcaattctaagagtatacctaaacattcctctcccagaaagactagcttggtacaattacaagttattgggaattaaagtaatcgtgaagggaacaccaccacccgccccgaaaaagggcaaaagcggggttttattcgtgtgtaatcaccgcacagtacttgaccctgttgtcaccgctgttgccctaggccgaaaaataagttgtgtcacatatagcattagcaaattcaccgaaatgatctcaccaatcaaggcggtggcactttcgagggagagagagaaagatgcggctaacataaaacgattgctagaagaaggtgacctcgtgatttgtcccgagggcacgacttgtcgcgaaccctttttgcttaggtttagtgcattgtttgccgagttgactgaccgaatagtgccggtcgcgattaatactaagcaaagtgtgttttatggcacgactgttaggggtcacaaacttttggacccttattttgtgttcatgaatcctatgccaacttatgagatcacattcttgaatcaacttcccaaggagttgacttgtaatggtggaaagtcagcatttgaagtggccaattacattcaaaaggttttggcaggaacattgggttttgagtgcaccaacttaacaaggaaagataagtacgctatgattgctgggacagatggccgagttgtgaacaagaaagatgaaaaggagaccaagactatcatcacctaatatattttttttaattattattagtattgaaaaaaaaaagtactcaattaatttataaatttcacaagacaccattattatatatataatttcataaaaatcgaccaccttgtctattgtttcttcatattatatatatatatggtaaaaaaattgaaaagggtttttcgtaaaatagcaataaatgatcatagatgtaagaatcactgtgtttgtatatgtttatcttgaaaattctacttagtttatcagctttcaatttatatattaactaaattttcttcttgactttagtaaacatatataagagaagctactacacgaacttttatattgatagtgcatatatattttagagaaattaaaacgcgaaatacatttttacgtatcaatattgatattggtttaatttagtattgagtctcatataatttaatataataatttttaagaagtattactagccaatcgtaagacgacacgtcttaattaagggtgctaagtaccactggtgtccaataacaatgctcctatatatacattatattaaaattgtaaggctcactaagcggggtttgagttgtgacactgacacatgcattatattcctattagaatacttccatggccccattttattagcattttttggctgtgaaatacaagacaagaaattaaagatagttgagtacgtatgtagtagatggccatggccagccatatccagcgtgagcttattcaatggtgttatacatatatgagttgtgtatatataattacttgtgcctgcctagctagctagttttaaatgcgactttgaatagtcttaactgtcaattaaaagacccagtactctatatatgtaccctagccaatttaagaaggtttttacaaaaacaacaatggtatataaataaaaaaaacaatagtgtatatatagtaaaataatttatcaagtacactctgattaattcttaaagagtagtcagcaagctctgacaattattaattttttcgcataatatatattcttattgttttttcattattaaataagtctttgaaaaaaaataaatataagtaaattaaagttaattaagattgaaattaaaagtcttcatattctgaaagtgggactactctctgtttctgtgatttgatgagctattataagagatattaatttaattagatcacaccgttctcctttttgtttttttctctctctcagagaaaatatggttgagatgttataattattttttcttttttgaagtttaatcataattgactaaaatccaaagagtgtcgactttggtgaatttggttaatgcaacacaccaaagagtgagtaccaattatgtagttaattgagtcattgataccacgccagggtttcatgtgctttggccggttttcatggctatttacaatttttaattatagggatagtcaattccattattttgttttacagcttataaatttgggttatattaatgaaagtaaatatacgtacagatttcacaaagacaattttcaaaacaaatgaaaaagatcgtggctttttcctcagtacactacacacgttagttttatgagtatcgattgtaatgtacttacgtgcagtgcaatttttttaatttaagaaaagcattcatataaaaataaaaactgtaagactacatggtcattacataataattgttcagaaatagaaaaatttagaatacaactaaatctttggtaggagaacgcccacttaaccacgttatgggctgtaaaattatattttttactaatatgttcgaaggtacaaccaacaaaaaaatgagagaatctaacacaaaatgagacatagttctcaaactcccaacgggactccttcccttttaaagcgttgatcactaccctcaaatcactctcaaccacaataaactttaagcctcgaatcttagctgtctccaatgccaaacagtaagtcgtcgcttccccacagggacggacccactttgattgtatagcccccactaacaaaaaaacggccttttaaaaaattaaatgcaatttttttaatttcataa

SEQ ID NO: 378477 - DNA, 3515 bp, Cannabis indica
ttaacaactgtatagtccatgtggtactactctagtgtggggctcttttctatcattaccacaaagaaccttaattataatcaatatcctatcctatgcaatttattactctctctcacttcactgcccatgggagtgggagcctaaatatatggctacatcaatgctatcctatgctcccatcagccctaccaaatctaaattaatatataactttttaatttatttatttttttcatcctctctcttggaatttcaaaaaattgaaaagaaaaaaaaaataaacgaacgtagagtagagagagagatagaacttttgttttcttctagctagccatatatatcgagatatcttattgtacatatgtacttatgccttaaacaatgacaaaacttgatcagttataaagctagcacaactcgtaggagaaatacaggctattatatatatattatatatatacgctgtaatttatgattaaagtcaataaaaataaacagaaacaacataattcgggtttgcaaactatatatgtacccattaaagagatgacctccttggattcttggttataaaaataaattattacatcaactacatcgttcaaatcaacaaccacctcaatttatcttttcccacacggagggtttttactaaaataaatatatatttagcttcaaaaaattgctagctgtgagattatttagtcatattggtcataattagtgactctccaataaacattattaaccaccacaccatgtgcattaaacgacatacatatattgatatgctaccaatagcttccacgtattataatttccaaaatcccttgtataaaatataaacagcgagagatcttaaaaagattttgattaacctaagccgatgaaataattattaatatttcacttgagtggggttaattcatttcattacaaacataaaacatatatctacaccaaattaaaaattagatcattgaagtagatatatatatatatatatatatatatttatagtgatactattggaggtgcaagctaaggggacaagagctttccatatcatgtttttaatatataaacgtggaaagatccctagacaaagagcagaagagccattctgcgaattttggatatatataagcaatataaagcagatgatcaagggcagggcatgaacgtcacgtagagcatgtgcttggtttcatcatccacatgcatctctttattcctataaatatatatattctactaataatactatattttttttatatctatttatatatactaaagagagctaggtcctatctatttatgtacatactgtgtactatagtgtacgtttgtattttatcatcatgtgcatatgttactaaagtaattaaccaatagccatcctctcatgcatatgtatatatatatacataatgtaagaaattggacaagagataagcttggcgttaatgatatatattttgtccaatactaaattatacatattgctataaatatatatacagatggtccctgcagtttgatgtcatatatatcgctagtaatttctttttttaaaagaaaatgacctaggaaagtatttttttatatatatatattcacgtgaaataaagaaaaattggggttttatcagatatttatctattgtggctttattccatcatttaattactttaatttatttttctcttgtataaactaaagaatcaaccgcatttaaattagaccactccgttctgacaaaaaaaaaaaaatatatatatatatatatagagaccacccaatatatatatgtatatatatattatatttatctctgaataaagagcagctaacatgttcttcataaacaagggttaaaacacttaatattcttattacagatgtaaagtaacttaaaactggatgagcaaagaaaaaggagtctaattattgcagtgtttaactagctagctagtccccgttaacaaagcaaaaactctgatacagtataaagttcaccatgattattacacccttaatcaggtcctttaatataattaataattaaaattactagttttttaattcaaactactgcagtggagtggagttgtggaccccaaaggaagggcaaaatgtccaacatcaggtggacagttatatcagtaccccaatgatcagtacctaatgtgaattaaaagttaaaactaatttgttaatatttaattacaatctcccattcccacatgaccttgcctcaccattttgcaagctaagcactcactcatatgtatgtgtctatctttctatttatacatataataatacatttggataatttctttctcttataatatatcatcacattttcccctatctccaactatttttacagactaattttttcatattaattgatttatttcaagtaaataatcgttcagtagccgactcatatattataaagtgtggcttaaattcccattatttatgtatttatagaatacatcactgaaattcatgcacgttgtgttaggtgctgcctccttcttaagttaatttccttgttttcactaatatcccccggctaattgggtcctcggtgtgcataaaaaggttccctcgaattaatcacagccatataatctaccattgcctacgtacccggctatttttctcttatctttcttgggtagaaaaaaaaatatataactacaaccacatatatatttatttttttattaattactgatataacccattttccatttcatctattttcttctcattattattaaaatattgatattgtccatgatttattttatttttattcttattctttaattttttctaattctaataaacaataatacagggtaatgaattcaaagcatattttcccgttcacgtgcagcaagtatggagtgatcatcatcatcatgtatttgatgaacaaaaactaattagatagtcaatggtggtttactttcaaacaaagcaagactagcacttattgccttaccgaaacaaaaacaaaaaataatagaaaaaagataacgaacggatttgattgagataacaataaaccatattcatgtgcaaatgtcaaccacttgaagaagcaaatgcaactcgggcacatgcttccatggcccatttggtttcataaatgtggtgcatttttacaagatatgagttaaataactccactgcccatatataattaattaattgatcatatttaagttacccatatttataatacaccaatgtgaaaagggaggaaaaaataattgttttattagtttaaccaaaaaaaaaatcaaaatttgaaaaagatcagcaatatgagaaggaaaaagttgaaaattgaaaacttctcttcaagataaaattgattctcaatttgccatattcggcaaaagaagaaggggaaaaattaaaattacattacaaatcctacccccaatttcgctcttagcgcttcctttctttctttttttttt

SEQ ID NO: 378478 - DNA, 2773 bp, Cannabis indica
aaaaataaaaattcaaagctctgaggggtcactaatacgtaagctatatactatattaataatagtgatagccattagcaaaaaataaaaaaggaaatagaaaattagtgatgggcaatgttgcgcatgtgccacctttcatacacgtgcaaagggaatgcataattctgtctaggctaggcttggaagtataatgatgatgacacacgtgcacaacattttatagttccattccatctctgttctctagggcaaaaagggaagaacctaagagacagggagagagaaggatagtattatcaagttaagggatgtttctaaagagtttcttttgggaccatttcttataaggaatgtcaagcaaaagtgggacattactccttcatttgtgatgaatgagatgccgtggagtgtcccttcttatgaccaacaaatgtgtatattatatgggcatttcttctattgctctatttatttatttattgtttacaaatactttgtgtatcttaaacagtttttttttggttcattgtacaaaacccactttaggggcattaaattttcctaaaagcactagtagtgggatctcactaatgcacacttgggtctctatcaaagatgaggcaaaatgagtgtgagtgcttcaacatgaaaagagagccttcctaattttttttttttttttttcattttcaattgcccctttgaaacttttatcatttttttttttaaaaaaaaaataaataaataagaaaagaaagaagaaattttctctacttcaagggtcttactccttgggaatagtcacactgaatcaactcgtcctttccaagttcaattcaacctggcaaattcctttgtcgcttttttcaacatttagggcaatttatattttttagtgaaaatttaattaaaatagctaaaaattaaaatatagacatttttattattcttgttttaattatgcttcctactttagttaatgagcatttgattattttgaatattttataatttcaatttattaaatataattaattaaataatataataaaaaaagtaatagtacttttgaaaaattttagcataacaataaagaactccctatagctaaatatcatttctctattatagagagtcaatttttctatacttggagctcattttcgtaactcgcgtcttattttagctgaaaaatatatttagagagcatttttcctaatatagtaaagtcaaaatttcaaaattcatctacatattttattaaactattctattttgcatcttgtcttatgtgactaacaaaataaataaataaggtggtgttggtcacacttttataaaagttttattcacaaaagtaaaagtaaaattttatttttaaaaaataaaatgtgttcaataactatttttgtttttaaattttaaaacaaaaaataaaagagtgtttgataactatttttatttttcaattttaaaagaaaaattaaaaatattttttatgggtctagctaggtttaggtctgcggtgagggtcttgggtttggatcggggtccgaatttgggttagggttcgagttcaagtatggggttcaaggatcggggtacaggttcaagtttaggtcttgggtcctagtttgggacttggtctaggtccaggtccagggcgaggtctagggtttgggtcttgggtctatagttagggtccgggtttggctctggggttcaggtttggggcctggtccagggctgggtctgcgcccagggctgaggtgcgagtttggggtttgggtccgagtctgagttcgttgtgcaggtttgggttgtggtgtgggattaagtccgggtccgaggtttagggtccaaggcttagggttgggttcgagtcgggttcatggtttgattccaaaatattaatgatagaaaatacaaataaattaaaattaagaaaaaaatttaaaaatgatttttgttttctatttttaaaattttaattcctaatttttaaattaaaaaagaacaagaaatttgcagaatatgtttttttaaaaaaatatttttactttactaattaaaaaaactaaaaactaattaaaaattgatacaaaacacatcttaaataaatactgataacacaaatcttatctcccaacagtacgtaatattgaagagtacaattcaagtattattggagatgttagtcacagtgacatcactgacttaattaatatctttggatgatcagtcacctacttaattatcaagcttggtattctgattggtcaaattgtacgtctctagtttgagcctttgaagtttgacccaaaaaatttatgatctttcaatggatttgtattgttatccaaaatatatgatctttagaaagtagtggccctgtagtgttgccatgtagtggagctgccacttcccatattaccaataagttaaataactagtctattatcatatcatatttttaccggctgcagaaattaaatatatgtctcgtaattatttgtctacatgattttggttactccatacatatatatattctatataaagtgtgtttattgttgggttttatgtcctaaataaaactcatttcaatataatcagatttacttattaaaaatatcagaaataacatttaatgttacacggttcacatacataatttatgaattctatttaagtccagaacatatgaatttgttaatgattatagtgttgtcagctcagtggaatataatcttaattatatgttcgaaag

SEQ ID NO: 378479 - DNA, 9141 bp, Cannabis indica
ctaaaaaaaacaataacaaaagtgtaagaaaatatttacatacaaatgacatttcagtgaaaattttcatataatcaatcaataaaacagataataaaaagtgataagaaaggttattagtcaatagtaaaactgtggatcatacttgtgccataagagcacaataaggatcaggtaaagaaaccgaagaagaagtggaggtgtctgcagggccaggctttgcaccctgagccataagtatcgatggcaccataaacggcggtggaacaaatgttgaaccggtggtggtggctgcagtagggtggatgactgaagagagagactgaggagaaggtctggccattgagctcatgtcaagcattcccattcccattcccattcccattcccatccccatccccattcccatccgggctagcattgacatctgaagttgttgttgcattcccaaagacatcaccatttgaggtgacatgtttctcaaactgctcatcacttgaacttgagtttgaagttgctttaagtagtgaatcacctcatcaagcattgaagccttatctgtctgtaaaataaaaatgaatacaaataccacacacataaggtactaataaaaacaaaaggcgatactttgttgtaaattgtaatgtaacagtatcacttaccttacttgcatttggcaccaacttttgcagggctttcatcttctggttaatcctatctcttcgcctctatacagaacaagtaaaagaaaaagactttgaaactctcaataggttgtatctaagctatacaaatatttcatatgccaaacatcatcgaagactatttctattgatgatcacaaagcttataagtacaaatttgtataccctttctgattggttatgaatagcagcagcacgacttcttcttgttgagttagagcgtccagattcaccttttgtttcttggtcttcatcttggtttccctgttacacacattttaagtttagaaaacattgttttacactagttattacaacagtttattagcctcttaatttgcatcaatactatttaaaaagttgcaaattggcatatgtttgcaacaatagttaagaatcaaattcaatatttcctgggaattgtgttttgtaactttatctatttatttattttttggaagttttcaaatttgttgatgttacacaatgttgacaactttgagcaagtcatatatagttaattactacaattcaaaaatctctcctttttttttaccatgccatcatgacaggctgaatcctcatcggtacttttgttcttcaagctttggggagattcaaaggaagcccatgtcatcagagttgtgtcactttccttgcaaaatgttgtactagcactagcacaagcacttgggcctccttgctcttcttgaatgctacaattattgctacttaaattcttcccttcattgttggaatttgactgatttcgctttctcatcaccggcggggccatgaaggcgttctcgacccgttttccgctagaagttgcaccagtttcgaaggttatggtggccggggtctgtccatgatatgtcacataggggtcttgaacttgattgttgcatgttgtagcttggtggactatagattctagtgtctcacaatttgtaccccatgtaggctttgttgggcctgagggaagtagtccatcaagcccatgcatggctagctggccattctcccacgttagctccttaactttgttattaaatctcgatctactataatttgcatataataaaatgaatgagttaaaataaacaaataaataaatcttgcggctaggaattatatgaaatcttatggttagatatagaagaatgttttttttttgacaaaattttaaattttgttaatgaatgagacaaggagttgaaaagaacaaaaaataagttagcgtgttaaaagtctttgtgcacatgatgttgtaaaaaacaattatgtttcagaggaatttttgttttctactagcataaaaaatagagaaggagagattctttagtcaaaaaaagaaaattaattaaagcacggattaaaaaaaaataataaataaacaaatttgttaacaagtaatgataaattttataaggagtaaggtagtagagtgaaggaatgtatgattgaaaatgacactaaaattagatgtatatagcttgtgagataaaagtaatccttggaaaatatatccaatgacttgaataagaggaaatggagaagataacacattaatgggctaaaagaaaagggtattagacattttctatttaattaagtgaatatcatacttataatcccttttggaaggcaaaaatgtgagtatgaagaaggaactttgtttttaaaatttaataaagtatttgaaacaagaaaaattacataaaaatatataataagaaaaaatgatattgttttcattgtagattcaataccaaaagaaaatcatacgtataagtatatagagatcattaaaaagatgaatagggagataggtagcaatagagaaatggtgtgcatacatggggactagatgagtgctattactacaactactgtgattctgcacgtgagaagatctgtttccctcttctccttcgacttgttcttgtctttggtgccttagattccattttggtacaacgtaatgactcatactctcatatatgatactcctctatctttcctttttactactctatgtatttgtgaaaattatgaatcattactatatgaaggcactttaagttggagagctatagcttggaattttggacccttccacagcttcacatttccttgtctttatatggtcccactccttgatgtcacattggttgtgaattgcgatagagattttccaaaagagaatatgtggctgctataagaagcatgagagggaataggatatgttagagatttaattactgaaaatcaacatatttcaactctattgtaatataatacatggactaactaagagattaaataaataaatatgataacaatataagaaagatagaagaagattatgtatataaacacactcataactttgagtgtatattagtgagaatcaccatacttgaaaaaagtattatacatttgcctaaaaatttatttctctatcgctaaatactaagaaaactctctaagaaattaatagctttgagaattatcaaaccatttagggttatttctatcaaagtgttttgttaatagaaattagattgtcacaatatgaacaccttaaacctatttatatagtgtaggatattactatttaaaattctaactcataacctctaatagttatggactcaataaatgagtataaaactcattctttcacaactataactcctataccttttaagaattttatattaagatgtgcaacactttttttacacacttaatattggtgataattgtggaggttaacaagtaactccaccatatgttaaaaaatgatgcaactaatatatattttcatatattacatatttttagtttcttatatatatatatatttaatctatatattatattatttcaaaataatataacaggatatgctttatctctaacatacttttctaaagggacatattgttgaagtattaaacttgatttaatatagttaatttctagagttttcttgctgttactaaattttctagactattcttatattcactaaagtgtctagagttttcttatttgtttgagtactcttaaattttttagaattgtctttcactagtgttagtagtaagaattgtgtaaaaattgtagaagctagtcatttattaataatgtctagaatagtccatagagtcctaaaaatagagatgtaatcttatcatattatatcaagtcataaatcacacaagttgagatataaaatatagcttctttcatttaagtattctctccaaaattcttcttattatccaaagaagtggtaccaaaacaaagtttgtgaagtaaaataacaagtggaggaatgatacccttccaagttctaatgctcaccaagagcaactatgaaaattgaagtattaagatgaatgcactaccaggagctcaagatttgtgaaatattattgagaaaggccataaggagcaagatgatggtgctctttcctaagctcaacgagatgccttaagggattccagaaagagggacaagaaagctctcttcctcatctatcaatgggtggatgaagatgcgtttgagaagatctcaaatgcaacgacaaccaaagaagcatgggagaagcttcaaactttcaacaaaggagcagagcaagtggaaaagatttatcttgaagctcttagaggtaattttgaaactttaattatggaagatactgaatcaatttctgactatttcattagagcattatatattgtcaatcagttaagaagaaatggcagggaaattagtgaagtttatcgaaaaaaattcttcgtactgtgagtccaactgtaacccgctaacccgtaagggtgccatgtgtgtgcttttaaaatttaatttataataataaactaataattttaggaagaaaatgtgatttgattaaaacttttagaaaatcaatttaagtataacataaattctttttcaaaatattattggatttggggatccctttagttacaaacttctacaaaaaaccactaaaccagtttgttacaaaatattactacatattcaaaagattaaaaaaggtgaatcctattcgctgagaaccaaaagacagtgagggtgatatgtttattgtcgagagactttttactcatagttggtctattttccctttacatttacctgcaccacagagcacccgtgagtcacaaagactcagcaagaaaaataggtaaaatacaaacatcacatatagtacaaaattttaaacaacacagagcatctattgcaacatatagtttacagagttaatcaaagcgtaatcacatgctaataaccatctatttgtctaataagataagctgaaactcgatactttataaagcatctttaaccctcgttaccaacgagtttctaatgtcactatcgttgcataattgagcaatatataaagtaagaaatcaattagcggtttcaaaagggagtaataactctttcttagaaacggtaattaccgtatcttatttttgacatgctaagcggtagaattgacatttcttacctcaagtccaaagccatgtgtgcggaccgacctgagtgaaatgatgctcgacgatcttgggccctatgtcacgacaatgacaattcgataaatatcttaatcaatctccaagacctaaactcaaaaattgtatgattccctatcgataaaacataaaattagttgctagagatacccaaaaatggtccatcattttccaaaaatggaccaccatttttctggattctgccctgtatgaatgatccgttcttacaggtataaaatggtaagtcgtttttcttgcaaaacagcccaaactcgggtttttcactttaaagctcgccaaaacttctccaaaccaattgaaacttttctcatcaacttaatctcatacaaataacatatttcatcattcaaaatcatcatttcactcaaatttcaaaaataaccattaattggtgagctttgagtttttaagctcaactcactcaaactaaatcataatagcccttaaaccagtgtgacacaaattaccattttatcttcatttctacacttaagttattgtatacactaagggtattttggtcaaagctatctaccccaaataatccaacaactcaagaatactaaaacaatctggtacaatcccaataaaatttattctattaccgttgtgacatcctttgccaatcgatcgagtttccacggtcgtcgaacctgaaaatttattatttcgaaaatggtatatataatactcacatgtttcaataaaatctccataattaataaattacgctcaaattctcttataattgacttaagtaagactataatcttactttaatattcatataattacatatttaataaaatatgtctaattaaatataattatattttacggaatattataactatctcctccttacagaaatattgtcctcaaaatttacgtgaaccactcgagatactgcttctgcatctgtgactctaactcccaattcactttttcgaccttgttgtttctccatagcaccataactagcagaatgatcttgttctgcaatactttttcttttctgtatattcaagatctgaacaggctattcctcatatgataagtccgtctgaagctcaatgtccttataatttagaatatgggtcgaatcagacacatatttcttaagcattgaaatatggaacatgttgtgaactccagataaaggagggggtaaagctagccgataggctacttgatctaccatctccaggatctcaaagggaccaataaatctagggctttgttttcctttctttccaaatctttaaattcccttcattggtgacacccgaaggaaaacaaaggtcccaatctggaactcaatatctcgatgcttcggatcagtgtagcttttctatctactttgtgaggcaagcatacgagctcaaatcttctcaatagcctcactaattctttagaatcctttgggtcgaagatatctccattcaccgacttcatcttagtgaataggtgaaggacactttctttcatataacatttcatgtggtgccatgctgatagtactctgataaatattgttaaatgaaaactcaatcaaagaaaggtacttgttctaggaacctttgaagtccaatacacatgcacgtggcatatcctaaagtatctgaatagtcctctcggaatgaccatcagtttaaggatgaaaagttgtactaaatcttaatttagtacccattgctcgccgcaaactttcccagaacttagacgtaaactttggatctcaatatgagacgatcgactttggagcgccatgaagccgaattctttccttgacaaataaattagcatactgatttcttgcatacgtagtttgcattagtaaaaagtgcggtttgtatattgatccactattaccgagatagaataatagaatcgcattgttcttggtaatataactacaaaatccacggttatattctcccatttcctctcgaaaatcttaagtggttgaattaatctcactggtcattgatgctctaccataacttgttgacaagttagacattttgacacgtattccactatatcacccttcatatttggccaccagtacaatgctttcacatcttgatacattttagttgttttggggtgtaatgagtatggtgtggtatgagactcatcaaaatttttttgtttgataccatcgtctgctggaagacaaaccctatcttgataccacagtagcccatttgatgaaattgagaaatcctttgttgatctagcctcaaacttctctttatactcttgtaacactggatcactttactaagcggtcttgattctttctaataaatcagactgtaatgtaatatttgctaatttcccaatcacaaactcaattcttgctctagtcatatccttagccaattcttatgagatcttcttcagttcataaacttgtcttggacctttttgacttagagcatccactacaacatttgcttttccagaatggtagatgatcttgtagtcatagtacttaaccaattccaaccattgtcgttggctcatattaaaatccttcggagtgcaaaagtattttatgcttttgtgattcgtgtagattttgtactttttgccatgcaaataatgacgccaaactttcaaggtgaaaaccaccactgtaatttcaatatcatgtttgggatatcactgttcattctccttcagttaccaacacgcataagcaataaccttaccaaactacatcaagacacaacctaacccttgttttgaggcatcacaataaatcataagtttctcatcactgattggcaaagtcagtactggtgtagtaatcaatctttgtttcaactcctagaagctactttcacatttattagtccaaacaaacttacaattcttccgagttaattctgttaaaggtgtagaaatcttggcaaacccttccgcgaatcttctatagtatcatgctagtcccaggaacttctaactttggtagcagacatgggttgaggccactctcgaactgcctcaatcttcaccaggtccaccaaaatgttattatattcacttaagagaaatgttacatcttttcataagagatgataaaagtaatttgatcacaaagttcccatgacagagaagagtgtttctcttgaatattcaacatgacattctgatgtgtttaaaggcctgctacaatgagtcatcatggctttggcatctacgctttggacatctcaattttggcgggcttaaactcttagagaagaaggagattgtgagaggccttccatgcatcaaccagccagatcaactttgtgaagaatgtttgcttggaaatcaatcccaaagaagttttctaaaggagtcactatcaagagccacaacgacgcttgagctcatacagactaatgtttgtggcccaattaaaccaaactcatttggtaagagtaaatacttcgtcctctttattgatgattttttaagaaaagtatgggcttatttcttaaaggagaaactagaagtgtttgagaatttcaagaaattcaacgctctggttgaaaaagaaagtggtcttcctattaagtccttgagatctgaccgaggaggagagttcacatcaaatgagtttaacaaatactatgaaaatcatggaatttgtcatccattaacagtgccaagaccctccaaaaaaaatggagttgtatagaggacgatttgaaccatactaaacacggcaaaagaaagctaaatgagctttgggctgaagtgatagcttgcgtagtctacttggtgaatcactctccaacaagaagtgcacatgagaagacacctcaagaagcatgga

SEQ ID NO: 378480 - DNA, 1125 bp, Cannabis indica
agttatgctattgcatgtacatatattatggcttattattagtgttttattccagaaaaaattgagctcggaaatcaagcctattaatattgaacttgttcggaaaagaagtagcaagagagtgacatatatatatttatatgttaaaaatatatattatgattaatgattgttaactttcgaagttattaagaggacactgaaagtgacagaaaaactagacaccaacaactttgtgaccaagattataaaaaagttcctcaatgataataatcaaaagcaattgtactggaccaattaaggggtcttgaatttgtagtgtaagtgtaactatattccacatggacatggatataaaataatggaaacttattttatattatacaactatatatatgcatacattcatgggcatttatttgagaaataaactgaaactcaaataagattttaaacaatttatctagcagatatatatatttttgggccttatatggattaatgttaaaaacaggaagaaaaaaaaccttaaaggaagaagagattgagaagtctaatgaatgtcctgcatacaatgatgtctagtgatatacatgattttaactaagatagggtaaaatatctatctctaatctctatttatcaacggtcagcaaattgggtagcacatatgttagtgtgatcttctctttttgaaactgattgtattttttcctaggaattaatttgtttccttatgcttctattattgggtttatttaaaaaatataatatttttaaaaattattaaaaaatatgtattgtatatttttaaaaggaaatatattgttgaagcttctaaattaataaagtgttgctttaacaaaaaaaaaaaaaaacaaaaaaaaaaacaaaacaaaaagcaaacaaagatatagagtcaaataataatttgattaaaatcatcaaaatcaaattcacatagttagaggctagagggattaacagaggtcaagtaggtgaggttgacatagaattggccttacattataattgggaactcaacacaaagatatgttctgttagtatttataaaacacttatgaaatatataaatcacagatccaaacatattcctaaaagtgc

SEQ ID NO: 378481 - DNA, 2445 bp, Cannabis indica
aaagtcatttacttcatgttgtaaatcaattgctactgcagtttcaacttgtaatcatttctctatcaataaagataatttttcatctcatattaatactttatcttctaatttctataacactactttgcacaatgatataaacctgtggcactgtaaattaggagatccagcccctgtaacattaagtaaaatattgtccacatcaaatatagcacagtcccttaagaatctaaagttttgtaattcctgtcaattaggaaaagccacaaacttcccttttccttatcctctagtagagcctctcaaccgctatagcttgttcatactgatctcatgttgtgtccaaaggcaactataaatattacattttattccttgatgattacaactgattctcttggatttttcctctaacaccaaaatctcaagcttttgaagtattcataaggtttaaaagcctagttgaggtgaatatcgaccctttgagaagtttctgactaatcaaggcatcaaattctagctatcttacccacacactcatgagcaaaatggtagagtggaaatgaaacaaagacatgttacagaaattggattaacattgcttgctcatttaggtcttgacatgagctattggtggcatgcatttcaatgtgatgtctactctataaacagaatggcaactccagttactggcaatgttagtccttacgaatgctcgttttagcaacaacctaattacaagattcaaaagccttttggttatgtttgtttctctcatttgaggccctattctcatcacaagatggaatacagatctgaggaatgcatctttcttggttactctcccaagccatccacgctttgggatgctgattccttaagaatggacatttggtgccatataagtcctgaaatgttttgcactcctccatcagtcgagtatgcttccagaagatcgtagttccgtaactgatttggcctttgatctatctcccaaatagaattattaagaactaagggagctaaagacactgcgcgagcttttgctttccccttacaatgtcacttagatcgaatggattcgtaaggtccctcatctgaaatgggatcttcgaggttcccctcaacaggggttacttcaatgggcgacccctctagaatcacttcatgattcactaaggctagttagaaattgttgctttcaccagaacctaaaaaagtggaaggaaagtccaagcaatcaataccctacatccaaataacaaatagggtacctgaggaaacctctcccaaactgcttaaagaggtccctggtggactcataaccattgggatcactaccataaagtagcctgccatggtaacgaatcgagaaccccaacatgcaacagcaacaaaaaggctaaaactttcttttttgcaaatgaagtaaaacaagtgcacacaatgaaccaaagaggaagtaaacgagaagactgcggatagctcaaaaatgaccaccctaaccccttagaactagggagtctcaactattaaacatgcatctcaacttgagcctaaaagaaaatacctctctaaaaccctaaaactagacatattcatctatgaactaaacaaaccaattctagatgcaaatcactcgaattcctaaaatcagatcttgtgcatgaaaagtaatagattccctcaactacgaaaactatatttcaatcaagcattggaaaaatagcttaaaagttgaggaatacttacttgtactgcgagataaaggtgggaatgatggtggtgtgttgggatttcattgcttacatgacgacagtggccttcctagcttcgactacagaatggcccaagatggtggtagacatcacagaaatgtaactgtggagttgggaaaaaggggggttgagattgggtcaaagaggtatgagaaggctaaacaaaatttctgagcaaagggtttgtctaaaagggatttttctctagtcgaaagattgttgatgaagtaaagaaagtgatttaaagtactaaaaacccaatttataaggatggcaacagttggaatatttttgaaatggacggtccagattaaattgattgggggttgagtcatccaacggttggggatgcgaaagtttaacatttaaagcttctaaaggaagggaataaagtatttatcactcatcatttcatgacagcatccccaatgaacctgaaagcagacatcttctcaaaaccattcgttatttgttttcccgagaaacgcgcttaaaatgcggagcaagggtctcatgactccactaaacaccttcgcaagtcatccatgatatcgccaagaacaacaacacaaaatattccttctgttgggttttatgccctaaataaaactccatttcaatgtaatccattttattcaacatcaataaagaaacataagtattt

SEQ ID NO: 378482 - DNA, 2541 bp, Cannabis indica
aaagtttgttaagtcaaggtttattcttcagcaacaagagaaacacaaaatacaataatgatctttcaacttgctgaagctgaatatcaaatgtcctaatccagaattacaaaaacactgcttcattggaatttatcatctctaactaagtcagtgaatattaaaactaaaacatcataaaaaaacgagaatttaagaaaatttgggtatgttttgtatgtagcatctcaaataaatatttctgcaatttttatttcttttcatttaatgcctgtgttcaactaactaattcacacaatcaatcttccacacccaagaaaacatatatacatacatatatgtatatggaaatacagtttgcaattactgtaatcagacccaaaaactttatatcatgcacgtatttatgtgaatattttataaacggacagaacatagcctcaaatgattcagaattttagtccccaaaacttttgattgaaaattcaggaaacagtttattgccaataatacaatacttacaaaaaattactcttactcacaaccgatccaaacagcaaagactctataccaaaaaaaaaaaaaatattaagaaaaataactgattctcttcttcaaaaaagagttgtgaattttcatgaagaacaaataatacagcggcattaaaaaaaaagatccaaaataaggaagtaattaataacatcaacaaaccctaaaaattgtcgaagcatcgtaataaattatccttatttacgattaaaatgaacaagactaatttaatttagggtatattaacagcaatggtaatgataattttacgtacttgagttgtaacttgagtttctgaaaaattgaaaacacgccattattatggaataatttgttggatctgaaaatggaaagaaaagaaaaactaaccgaaaagcgtagcggaaatgaaatcgagaggattgaaaactcctcctacgcctatgtccgtactattcgcatggcggttccatagtggtttctccttgtatgtatatgcctcaagtttcggttcaaactcaaaatttactataactagtacaaaattttaaattatatatgaaataaattttttattttatttgatgataaataagtaacaaaattttatgaaacttttacataaatttctttaaaagaatatgagaagataaaatcaggttaactcgatttaataatttaaagttttagccttaatatgacttttttgagataataataaagtttatactgataaaattagacaaatcatcattttagttaattaataatagaatatgtgtttttttacactttcttttgtcatatacagaacaacagagagaggggaaggggaagatacaagttttttagggttttaagattatttggaaatcacaatataagttttaaaagaaaaaaattaataataataagttaactgtttcagtgtaacgacgttagtgatagtgttaaataaaataaaatgatcgttaaactaagaattttgttacataaccatattttatataaaataaatgatatacgatattttttttatatattaataagattttttttgaatgaagaatgatagtttacaacgattttggtttttttatttcaataatctattttataattttattatatattttttttttaaagaaaaaatgttattatataaaataggatattgttgtcccaagtttcttccaatatacgtggcggccttagtataggacacgtggcaaacctagaccccttacctggagataagcagagtacttaactaaatcccctctaagataaccagtaactagttcgggagcaagctcctagacatgggaaaaacaaccctacttcctctctaggaggtgaagggcgtatgaactcctccaggctagtgaaattggagatgaactatcacctcacatttaatgtagcatgggggaagcgtctgggaatacgtataagaggacgtgtcagacgtcgtaaacgcgtcttttaatgagtacacgataataaagggtgtaagtgacaactctattatgaagaatcacgtcaatcaagaagggatgaaggctaatctcacctaaaacctaggttgtctactatgtaggtggtgcatgccctatttcatacatttgagaacctgtgcatgcccatggatgacacttagaacaactgaggcattatttcttcctaccaatcgctataaatacccctcaacaaaattaatgaggaaatcggaaaaataatacataacattctctgtaaacatctattcatggtgatgttaagattattttctttttgtgtttgtttcctttctttaagtgtggatctgtttacttgttggctagtatgtacgtatctgtcaatcaatgactatactactactacaatatttttttataaatattaaataatttaattaaaaagataatcaaatctaaaaaaaaaaaaataccaaaataaggaagtaattaataacatcaacaaaccctagaaattgtcgaagcatcgtaataa

SEQ ID NO: 378483 - DNA, 4925 bp, Cannabis indica
tcttgataaaaatccaaactttgcaccaaatcattgtttttgaccggtatgagagcattgatctgggccctaatagatagtctcaattctcaaagttgggtaaatacggcgatttctccaatgttctcctccttcttttaactctctctctttcactccaaatccaaaatggcttcttcttcagctctcactatgtcctccctcatcaaaattacgcctctttcttccccaaacccccaaattaatcacggctttcttcttaaaccaactaaccccttcaccaaactctctgccatctcccccaacggctctgtttctcgttcatcttctaatggggtcagtcagtcagtcttatttcatttacttacaaaactttaaatatttcttatgtgttttattcgattaagtgatttaattcaaaggggtggtataaagtctctatctttagtaaaaaaatgtgtgtgtgtgtgctccttcaattggattgaactttacataacatagaagctttgttttgtgttttgcaatgtgatctaatttgttacatgatttcaaagtgaacaccattgatggtagaaagtgtctatctttagcaaaacaaatgtttgtgcttcaattggattcaactttatgtgttttgcaatgtgctgtaatttttcttacatgatttcaaagtgaacaccattgatggtagaaagtgtctatctttagtcacctaaccaaactctgtgtgcctcatttggattgaagtttatgtgttttgcaatgtactgtaattttttacatgatttcaaagtgaataccattgattgtagagaaagtgactatctttagtcaccaaaccaaactctgtgtgcctcatttgaattgaattttacacaacttagaagatttattatgtgttttgaaatttgttatatagtgtagtttgccttaaaaaataatgcatacatgaattggtacagggtgcgagttcatcgtctgggaacactcatcaacgaagaagcagccttgaatctttgttttgttatgataaggctataccggaggagaagattgaaaagcctgttggaatatctttggctgaaaaatcaattggaaacaatcccagatgcaatgaatgccatgccaagggtgctgtcctttgtaccacttgctgtggttcaggcttgtatgttgactctatattggagagccaaggcattattgttaaagtcagatgcctaggtaacttacccccttaatctcttctctataattatggttatagaatgtatgttttacaactgggatgacatagaacatttaatttgactcgaatggtgagtcaatgtgcttaatagggggtttgatatgatgcttgaaacacattgtttgtgttcttgaatggtacattatcactgtgcttaatacgagttgcgaatatccttacttgctattaatattcacttcttagaaaacctattagcattttgtgttcactagttgaacttatttagtttcatcataaattttttaggatatctatttacacttcaaatcatatcagtaattttgttacttattaggatttataagctttagagtaggtttataagagaataaaccagaaagttaaaagaaaaactttctgctggaaaatataagttatgtggaagcttctacaaacccgatgatctagttgtttagaatagatttaaataaagatgttttctctatttggtcctgcttagaaaaagaagagacactatgagcagcgacatgaagctgatcatctatgtggcgtagatcaatccaaaaaggagatacagttatttgataatttgttcaaaattgtattcctttcttaacaattaatttgtagtatattatgttttacttaatttttaacaaggcttttctcactttcatagtcatgctctcgtttgaaaataagcacttatatgagaattacaaagccagatactattgtttgtttgaaggattatcagatgaaaaattcatataaatacctttagttgagcctctaccgagttgatttttttaatcatatgattgtcgaacatgtagtttgcccacaatatttaggtgaaaagatgataaatttctaatatgttaatcttgactatgtgtgtaggttgtggaggcagtggtaacattatgtgttcggagtgtggagggcgaggccatctttgataaaactgacgggcggtcaaagctttttgttattagatggatttgttcttttaattgtatactgtaatatcttctcttacaagttcacatttcttacaatcttgtagcctttgattaattttctggaggtgccattgtaatgcaccctacccccctttttttgttttttggcataagagtattgctcggtttaggtttgtatctactgttctgtatattgaacaagcatgaatctacacaaaatattgcattgtgaggctacaaacttaaataaaaatttgagtatcgtttcttacagctgtgttacagaatactaaatcagatctcttccttaatacaaaatgaatacttgaacaggaaaaaatgtgcaaaacaacagaataaatctgtaaatgtatatatgtgtatttttaaaactcaaaatttcaatatatgtacagaagtaggaaggggttcttccttagcttgtgaaatcattaggcttgaagtcttcgcagccgttgaattcgatctggaatggtgttgtcaaatcgggggctttgcgggttctctgcgtaagcaacatagtatgcagtgacgcatgcttgttgccacgccatggctatccgacactgcaacaacagtgaaaaagtcaactacaagaaacaaaggttagttaagttgtaaaatttcgtttctatgaaccattactaattaccatgaagtaaccaatgaagaaagcaaagagagtaagttctgttgcatagctcttatgaattacaaatgcccatattccgccgaccaagctgcaggttgccccaactgccacacccgaaaggaagcagaatgagccggtcagatctgaattgattagaggttccaattcgatcttcctaaacaactcccaaacatctatggaagcctgcataatccccttgttgtatacaccaacatgaacaaagccccatcggttcccatacatcactagcgtggaagcacaccctgcgtagcagtcagcacatgaaaaaaggaattcaccagtgtcccctgcagccaatttcatggctctagctgaactccacaccccaccgagaattgggacaaggaatgaccctgcacagatgcttcccatcaactgcttgaccgtctcacgcaatgccaagcttgtttcaacatcatttccagctgccaggtacatgtacttgactcttgtgattgtagctagtaatgtgtatttgatgacttgcatagtccaggccatactcagcaggagtatggagatgtacaaagcttcaaagttattcttaccagctctggctcctccaataccgattatcaaaaaacatgaatagagagtaccgatgagcattgatagtgtgagtaatgaagtagctttgcctttgagaggcggtggagcattagaaaccgttaaaacccggatggcataatagaaacgagggctgacccaacagccatagagggagagaaagaaggcacagagcagagcagtcacgcctgctacaaggctagttacagaaccgacgtttataagaagcacagcaacagcacaagtggacaacggggccagccagaaggcggccttgaaagctttggaagggctgcagccagcgatccattgcgatagaagagagagaattgcagcagatcccgtggaagcaagcaatggaggataccagtgagcggggcgaaagtggtggtggtggcggggaagtccttgagctgccaggaagatgagcagtgcagcgatgaggatgaggtgagagaagaagaggtattcaacaagccttgtcatgaatccacttctgttgtttgttgactggattggaatggctgattgctgttgttgttgctgtggttgtacctgcaacaaccaatacaaggcatcttttagtacttaaaattaagaaagtcaactatggaagttgataaattaatcatagatagtcatacttacattgtttggagcagaaggaggttgcatttttgttactgataatatgatgtgattcattcaatgttgattaatttcatgttcaagatcacaactttaatttcttggtcaccaagagacaagcatagtgtttaaaatctgaagaaagacttttagaagaagtttgtttattatgtcatgtgttatgttaagaaaaagtcaaaggagagactttaggaggaagtagaggagttgtttagagaccttgactttgatgagtttacttttgatgttgtattgctgacgtggaaactaatacgtcagccaaagtcacaagcaagattcattcattctctcttttctttcacattaaaagacattgtcaaactacaaagaacaaaacctttttattagttacagttatttagttagttattctccataacaacaacaacaatatatcataactttttctttattctaataaaataaaatggagtgtagtgtatcccttaccatgtgttctcacttctcacaaccatgacgtttggtcacttgtaaaattcaagaaagagaatgaattgtagaatagtgtgttgaacaacgagaaggaaggaaggaaggaactctcctttttatattcattcttaaagggaaatttgaatttgtatgcttaataaataataaaatttatcctcaaaactcataatactctatatttaaaatatatgacaatttttctattatgcccaaaataccctctcttttttccttcacccccctatcacttcttctctct

SEQ ID NO: 378484 - DNA, 1004 bp, Cannabis indica
aaaaaaaaataataattaaccttacaaattaaaagatgactgaaaatctagtactcataaagacaagtacggaatctttttttttataaccaaaagtaataatcaggaaagatcaagaattacagcgagaattgatagtaatatcataaactattcaaagagaaacatagtttagtgtttgtgcaattccacatcttaaaatttccaaccagcccacatattaatgcaactcttcacataattcaaaacagtttcaactgcaaattcttatgcaggcatgtgtgcatgaagtcacattcaaataataagaatcaatatgcatgtatgtatgtatgaataatgatacatgcactctaattacacactatatatgtaaatctaatctcaaccacacaattaataatgatatggtttcaattataaaatatcaatagttaaatatgttagtaaaactaagacagcaaattagtttttcttcttttttatctgttagtttcttaagagtttagttaggctgctagtaaataacagaatttgttattttgcctaagagtttcgttagccagtactgatgtatatacaaagacctctctttaataataaaacttagaatattcattcagatatttctcaactggtatcaaagcagaggagctgatatatcgtgcgacatgccaaaagcatgttttcgaagatagaattggaaaaccagctcattagaaatctagacgaagccagtggtgaaactcatgatttggaatttgttgtgtgcgatcagttggatcttgaattgttggcagtggtcgaacacgctctccagtgagaatccctcaagatcatgtgtgtgaacagatgggagcacctgggatcgccaatacgggtaatttgtgtaggtgagtctgagattcagtggagtcatattccactacaagaaatgtcacttttactagcacagttcgctactgcgctggtaaaagtaacgtttaccagtgcatttcgcaaac

SEQ ID NO: 378485 - DNA, 3082 bp, Cannabis indica
tttttttttccttgaataggttataactacttaagtgaagtatgtatgtacctgagccgaataagaaagccaagagaagtgcccctgtcgacttaatcacacgacgcatatcagctctgtacaacaacaatggaacagccgttggaagtagaaaactccatgacaatcgaaaatgcaggagcttctaatgatagaacccctaaattggttgcaccaagtccaaggtgctcaccaatgctccacttaatgcactcccaatccttctcttctgctccgatcttgaatcccataataaataaatattcttcttcaagatcaatataacttgctaattcaaaatatgcataaaagccagttgttcacacccaagatttcagaaaaagttaagacctttaaacacttctttttcactctgctaaaataagattgtaaaattgctctccatttggatgctgaaaaaatccagaagcaacacaaattaccaaaaactgccacaacacaaaaaaatcagttgatgagtaactttgtttaccagagaccaaaatgagaggaacattgcattgtgaactaacagtgacacctccaactggattgttcttactctttttctgggtaccattaccaattcttacagaaaaagtacaaacagaaggaaagttttgatttttattattaaaacaagctgatgagctttgcaggatactagcgccatcgataaagaatgagaactctttacaatgaaaagcatcggcaatcatgatcgtttctactcacaggcactgacacaattccttcctcctaaaatcgattcagttgcatttaatttaatcgtttcgatgttaaagtatgaaaataactttaatttaaaaataaaaaatgtaagcactaacaagtaaggattagatccgaaggcaaagttccccgactctacacaaagttacgcagaaagtaacaaatttgaagatggttgtatgaattagattttgattagaaacctgaaagcaaaactacatgacaatcagcttaacgaaaaccttcttgggtaatgttttgttatcagaaaattctaaactgatcaaacttacatcatatgtaatgaatacagttttagtttcagttacacctacaaatttatgttttatctaagaaatactgtcttcacgcttctgcttctttgcagtagggccttcttcctccaaggttttcagcttgttcttaattgcagctattttagcactccgactcaactgtcctgagttactaccagatgttctggctttgtttgtctcactgactccttttgaagaatgttcggctgattcaactgtgtatttattactggcaaggtggacaattaatgggcggccacaagctaatcttccatgcattttctccttggctagtcttgcttcctgcatgctcactttaatgatggaaatcaggaaatgcttataaaccaaaatcagaaagaccacaagtaacttacctctttggtactatactcgacgaaagcaaaaccccgaggttctccacgcttagggccacgagtatgccatataaaatcctcggatacaatttttccaaaaggagagaacattttaattagagccgccctgaaaaaaaacaggcagcaatatgacattaatcaagataagatattcatcatctaagaaacaactcaaaatccatgcggtttactcactctgttattcttaggtcaaggttaccaatgtaaagcttgctttcgctcttctcatcaataaatccattgggatcctgcaacaaaacgaatcatgttatttgacttgatttataatgtattgattaatgaaacataatggtgacttagagtcttaaaagttcatagcatgattaagaacatctaattgatatgctgcatagtgaaaacaatttaacaattcccacacaaatccagtgcaaagaaaaacaaaatgtcgacattgcccattcaagggtgccaaaactttaaaagaactaatagataattaccctaaaggaaacatgatctaaattccattccctagatagaggtagacaattaaatcatgctacctttttcttcttctttttttcttttgcttaagggaaccccttaaaggggaccgtagaacatgctacctttagagacgaggatgagggaacatataacctcagctaacacttgaaaatatgtacaaatgaccaatatatgtatggccccatgcttggaactgatgcttattatacacatagcagaaagcatacactggatttcttattgaacaaagataacccataaaaatgagtccaaagaagatagaaccccatgagaattggacttgtcttcactacaaatcccattctaaaatggctattttattttagtttgcaagtgtatacaaagtcattcaaaccacaatctccaacacaataaaatttttgttacgtgccatacccaaaatgaagatttctcagtctcgtttgcaaaatagttttaagcagtttaggataaatataacaataaaaaataaaataataaaagttccatatgatcaaatataccatggcccaagagcatataaatccttatagaaaggccagcatcactgtccgtactgacctgtaattctacaccaaaaagaaaaggaaagaacgataagaacatcaaaatcctgaataggtactcttgatctatatatgctgataaacgtactacgaaaccgattggaaaaccctagatgctaaaccccaaggaatggaagatgggttttacttactcgcaccaataactcggcgatgcacctgatacggagatcgaattgcttgccgtgccccgacccaattaggcgaaaagactcaaaaaagcttcgacacacagaaatgccacgttccaaattcaaagacttctttttcttgatattttttcgtttttcttgaaagggagagatttgttctttctttctttctttctattaaactagttaatgttaatggtagtgcataatataaatattgtgataaataaatcctgagtaaaaaatttatcaataatgtaggtaccgttaggtaatacttttatttt

SEQ ID NO: 378486 - DNA, 2756 bp, Cannabis indica
ataataataataataaaatagatgaattatatttcttcaaacattcttgtactactaaaaattacacttttggtatcgatttcaaactaacacttatacctacactatcggtttataattccaccaaaataaaaaatcaagagctgaagctccaacaactgacagcgacaacaccacctcacagtagtttttggggaagttgagctattgttttaaagctcatggcaagtggagaaaggatatggaagtcattttcttgaaagggtgcgaagttgctcgatttaagtcgagatatctcggctctaacaagttattccatcacggtaaagagtaaggaagctcgaggaccgcatgccttaggggtttcgaggctcgtggaggtcagccatgacctccgtttaagcccttaccgagcaagggtggctcatcgtggccacgtcgagaaggagacaaggacggagagagagagagagaaggaaaagcaagaaagagagaggggctatggggattctcgggctcggggttttctggggttagagtggctcttcgacggctaagaatgatgcttagatcgattctgggttttctggcgccgcgcaaggagggagcaagagagagagagggtatcgggagagagggtatcaagagaaagtgagatttagattttaggagtttagtccttaagtctcgattcataaaaaacacttatactcaatctgtatatatatatttaattttttagtctcggttattattttagtgttggtttactaaccaacacttaaagagtattataggtatcagttatgaatcgaaaccttagacttagggtagtctttattagtatcattttttttaaaaaaattgcccctcaaactaacattaaaagtctattttgttgccgtgttgacaaactattatgcaccacaaataatggcttcaatgtaacctaattacatcttacatggtgttagtagtagtgagttggttagttatttgagtcagttagcaagaagtaaaagtttattgcttagctagtctaagagattcaggtttgaatcttggccctatgtatgaaataatcttaatttcgagaaaaagagttgagctcatttttactctcaaatttcatttttcatttttctctctatttcactttttctattttctttcaatttggtatcagagccaatagcgtcatctttctcaacttcagtgagagaaaatgatccaccgtctcgagctctaacagatccaagcaatcaaatgtcagttgctccagcaaatctaaacaatctagctctacaagatgttcatgtcattgttgtgaatccatatccattcaacaacaacctcttaccagtcaacttgtgatttggaatctcatacattaatataattcaagattatatagtgcaagatcagactgaatcctatggcgagatcaatggggatgtagctctaattcttagggcgaatcttgggaaaaacttagtatatgatctctttaactttttactttgttgtttatgtttatctattatgattgtattatttatccatgtttaaatagctaatcctaactttttgtatgcaaattaaatttttaaaattgttcaattcagtttgtgtttaaagattagaatttgaatgtatatgtgtgcaattgagtgtgtcatgattgtgaattgtttgattgaatgctaaggtctattaggactttgatgatctagtatttatgttgagttggggtatgaattgagttgttaaatcctaatatattataagttgattaaattatttttcaaacataaaatcattatctaacatcgacagaaaaattattgagctacaacaataatcataaattatgcataatcatataatatattttattttgagaaaaaaaatcttggtaatgaaaattaaaatttaagagacaacttcattgaatccatgtaacaactactatactgcatgtaataaatatatatctttttaattttttggtctcgattattattttagtgtcagtttactaaccgacacttaaagatcattataggtgtcagttttaaccaacaccatagatttggggtggtctttaattagtattgatttaaaaaaaatgtacatcaagccaacaccaaaagtctatttagtagtagtgttgacaaactattgtgcacctaatcaatggcttcagtgtatcctaattacatcttacatggtgttagtagtagtgagttggttagttatttgagttagttagcaaggggtcaaagtttgttgcttagctggtctaagagattctgcttaaatcttggtcttgtaatcatgtataaaaaggatcttaattcaataaaaaagagttgagctcatttttactcttaaattttatttttcatttttctctctattttttaaccttggtatcagagtcaatggcgtcatctttctcaggttaggtaatagaaaacgatccaccatctcaagctttaacaaatctaatcaatcaaccactagttcctttagcgaatccaaacaatctatctctacaagttgttcctcctgctgttgtgaatccatatcaattcaacaagagcctcctgttggaatttattttaccaagatcttagatctactcacaagtatgttgtttaacaccctaaatatgaaatttctaaaacaataaattaaacacatataaagttaaaaacaaccttacattgatgtagcggaattaatgtctcctt

SEQ ID NO: 378487 - DNA, 9451 bp, Cannabis indica
tattgtttttttttctttttcttgggaattacacagctattattatccaaactgagttatgtcaaatgtaaaagtggagcccactgcccagcccaccctagcaggaagcccaataaatgggcccaattaagtgggtgggaagatggtaaaggcaaagctaccaaaaacccaaaaccctttgaactcatctctttcctttgagactcagaattgagatctcggctgctcctttcgtcttcgtcttcgtgttcttgtttcagacagtaatggcctcagcctgcaaccgatttgccaacagagcatccttttcctcaattaaatccgccataagatcaactcctatcaaccgcaaacctccttcttcttcgctccctacctcaactcctctcaaccgcttctctctgtccaggtctttcttcctttgactttgtatcaaattatgcttctttgcttctctattttctcactttgttaatcaatttcattgtcctgtcctcccaataggcctccgccgcaactgggatgcgtgcagtcacttttgccattccacagcgccgtcgcggcggccagattgacggcatgtctcagcacaaactcacggagctgccgtgcgctctcacagggtacactctgctgcacctatcccggcctctaatatcacatttttctttcttttaaaattgtgagtgaatacaatacacatacacacttgccctatgcatatccttgttttgttccttctaaacattattcctttaacttgtttttcaacccttttcttttaaaaaattatgttacaatcaacttattcaaaacccttcatttatgtttagaattgaagaaaaaaaaagtcttttatgcctgaaattgggtattaattccaattctaaagatagtatctttagtgaagcaagtatatgttataataaaaatatgaaaaacaattcatttatgcttgaaattaaagaagaaaagagggtatttgggtcgtaaacttgggtagtagttagttccaattctaggtgtgttcaagcacgtatatatataagtaaagactctttcttcaactcttgttcacccccgaaatcctaatctttttagagcttagtgggactctgtatattttcaacaaccttattttttgagtttagcataagttaaggcagtgatacaaggataaatgtgtattctatctgactggattatttgttcctgcaggcacataatacctataggccttaaagataaaaattgggattttaccagacttgctagaaatgtcccactgcatcattatcaagtatgaatcaatgatttttcccttagaaaccttagaattagttaactcatattagtttggaaatttattttctttccttcctcttcattttttttaaataattatttgctgtactggcacttgcattatgtgcatgacctgcttttgattttgcttttcatgtgctttattttcctcctttctattcttaacgttatgaagtgtactttttcaacattgccccctattagttttcatgagatgactattaaaactccaaaaaaattagtataggatagtattagataccaggagggttcttatattctgctcattgaggttgttgcttgctagaaagttttttcctactatcattttgataataagtgaagacacatactagttagagcaagttttaagctgatgcgagcaaggtgaatcaaatgtaggagtaaacaaactcatacatctgctacaaattttttggcttatattttgcacttatagagtgattagagtacaccctgataacatagttgctccttttccccagatgcaattgatggcacgtgagacatgtgtgctctgtttggaggtgggcactgtcatctatgcttcattcataatatgtctcttgtcttccttgctagtggagtccgtgtctaactatctagtgaaaaccagtcaattgctgtagaggacagggtttatttttcccaaaaaaatgtaacatggaaaagttaacaagattttaagttttctttttctttctaaattcatatggatgtattatcctattgagattgattcatgaactttgcaatgtgcataatgctgcatgatatgatataacagtgtttgttttaattcttgtgctctgactaaaatcattctgtattgattcagagcttggtttgtcggttccaaggtgacttgcgtgaagaagaatcattattaacttgaagaagctattttgatgaactggaacaaaagattcttatactttttggcttattaaaactcccagctctgtttactatgtagctacaatgattccaactcaaaattcatccaacacatgatattgtgattgagaaataatgtttcagtttgtcctgttcaattttttaccaattgaaaaaacagtatttcttttctttgattcttgcctttacaacttaaaagcttagtccttttctttttacaagataatcctattactacccaaataaatacgagcataaacataaatttgtaaaaaatgtatcgagtagcaatctcactaattcacaagaactcattttcctatgttttgtatttgtttcattattatgagggtgaatagggaacaacctcgatccaactataagaagctatttttcttactccctcctctcttgtcaacttcctcactgccttaacatcttcccattttccataagaagcatacatgttggaaataacaatgtaggcataacccttgtcaccctccaactctatcacttttgcagctgcaatctttgctaactttaaatccgtacaaccctcacaagtaccaagcagagctctccaagccaaagcagaacccccgaaacccagctcatagattaactccaccgccctcctcctcagctcccctctctgtcccattaaccggatcatacaacaacagtgttctatacttggttcaattccgtaatcctcgatcattattttgaagtaatgaaatgctgtttcgaatggcattcgattatgagcgcacgctgataaaacgttaagaaatgtgatttcgtcgggctgcacagttctctcgagctgcagctgatcaaagagctcgagtactcttgaagagtttccattgtgagcaaagccagaaaccatagcattccaagtgatcaaatttttatctgccaatgatttgaaaatcaattctgcctttgtaacctctccacatttggagtacatatcaattaaagcacttcccacaacagtacatgtatcaaaacctctcttcatagagcagcaatggatcaacattccccatgttaaagcagaaagccctgcaattccacttaaaatacttgaaaatgtgaactcatctgttcttaaattttccaagtgcattttgcacaagacagccaaagcttctcttgcttggtttctatttacaaatcctgttattatggagttccatgaagacgagtctggatttggcattcttgacaaaatctcaacagcttcttccatctctccaaactgtgcatacccatttatcagctcattatatgatattgtatcaggcttaggcatctgctgtaaaaaacaaactgcttgttttaagtctccatttttagcacatgctgcaatggccgaattccatgagattatgtccttgtcaatcatattactgaacacaaccattgcttcttcaacagaaccacatctcccatacatatcaatcaagcaattggaaacaacaatgccattttctacaccagatttcactatcttagaatgaactgaccggcctaaccgcaaaaggctcagcgggccacacgcagccaaagcagccgtcaaggaaaacaagtctacaaaaatatcagacctgtcaagctcaagaaaactacccaatgctttactaaactgagcagagcccacgaaccctgaaataatagaattccaagagacaacactaggatgaggcatttcaacaaacactttgtgtgcaccattcaaagaaccaagtttgacataaaagcgaataagggcattggagatagagacatctgagccaaacccagatcgtagaatgtagctatgaagctgatgacaataaaaatcccaactcatgtctgtggaagctcttagcatgtggaccaaggtgttccaatctgctttaaacaaggcctgctcactttgagaaagatgttgttttggacataatgaatgtaaaagtaggttcttttgtaccaatctattgaataggaatctttgcatagctttgatgattaaaattcacaacacaaaccaaccaaccaaccaaccgacgaaagagaaagttaataaagattgatttttttttataaagaaagatgagttatttacgcataggaaagttagctgtgaaaggcttctacttatacataggattctacgtaccaaagttaaatgctttaccactcgcacattaaaattagtcctgacttttggttgtgtatcttatctatttgtccactagtcaacaaaatataactcattgcaatgaatgagttttaagaaagtcatggctacatcaaaatgaaaaataaaaagtttggttgtaacacatctcacaagttacaacacaaagccacctcctttgtttcggtggcaacatctaatgatgcatgcatggtttgatataatataagctaaattaatttatatatatatgtatgtatacaactcggttggtatctaattttagattgactaaataaagtctttctacaaatttagatagatggagagatagagagacaatctagctagtgtgatgtaaatttatcctataattctagaaaaaataggtgaaaacaatcttctgggggtgttctgttctgttcatacaagcctttctttcccccaaaagaaaaaaaaaagtttgaagagaatgagagagagaaagagttagagaattttgtttgaaaagataaaaagagagaagactggtagagaaggagaaggaggaggctcatagtcaaatcaaagtgaatggagaatgttagttgagatcatcaaagtttaaaccaaacaaaacaagcaaagaagatatgaaaaagaaagaagagaaatttggtttcttaaaaaattgagaaaagtggggttgtgttgaaaagaaaggagagaaaaattagtagaaggaaaaagaagaataatgatggattatttgatgaagaaagatgtatttgaagaagtggcaataataagtggtttgatagtaatgcaatttgtttatgctggaaattctattgttctaagttatcttatgtcaattggtcttgcttcttctaccattgttatttactcttcctttgccactttcttcatcttatctccaattgcttttctctttgaaaggttaatatatatattatattctttctttcatcaattctattacaatacaagttttccttttcccaaattaatttttatctttttctttttttacagaagcaaatggcccaagaaattcagcttgaaactcataactcagatggtggtaatagcctttggagggtatgtgaattaattcaattttctttatactaataaaatttcccaaaattggtctgaataagattttgttatataatttgtatagggtaactttattccagtctcttctgttaaagggtattagtttaacatcaccagcaatggcaacatccatgccaaatctcactcctggtctaatttttataattgcttggatattaaggtaaccaaaaaaataaaagaaaacacttgttcttatatacatatattcaaaagggaatatgataatatttgtatatatgttatataatggcagatatgagaaagtgaaactaagttgcatgtacagcaaagtgaagatagcagggacattgctgtgtgttgcaggtgctttaacaatgagcataatccacagtgcaaaatcagcaacagcaacaacaacagtaatatcaacaagtaataatgtttttttcgatgaggacaagatcataggatgcttctatctaatggcagccatctttgttttgtccacaaatgttgtccttcaagctgcaaccttggctgattttcctgctccaatttctctatgtgcatttacatctttgattggtgtctttctcactgtaactctccaaatactatgttaccacaaacttgactctggctttccaattctcagcctttcaaatttgattatctactctctcctggtaataatcaattaattacttaattaagaatgaaaagtgtttatggccctgagattggctgagcttttaaaaactgtttttgggctggttgggtaaccggtgtatatatgtgtattaagtgtattaactcaaaaccattgatgtgtgtgtgtgtgtgtgtgcatgtagggaggtgtagtgagtgggacatgtgtgagcttcaatgggtgggccatgaggaaaagagggcctgttcttgtttccatgttcagtcccattgggacagtttgttctgtagttctctctattttcactttaggagaatccctcaaactaggaaggtaacataacacaacacaacataacataacatttttttcccaatattaacaatgtgtaattgtatttacagccttgttggtatggtgctcatgtttactgggctctactttgtgctatgggcaaaaggcaaagagggttacaacacttacagtagcagcagcagcagcggtggccgaggccgtggtggtgctaatgccttagctagcgagtttgatgcagagaagcctctcttaagttaacatacaaaacctctttttttttttctttctctgtttatctttgatagctaatagtttaagtagtaactagtaactggtaaccacattcaacctcaaaagaacaatcaatcaaatggaaaaatggactcttgggttgattttgtatatacatatataaaagtagtttacctttttttgtataaagcttcagcattttattttatttttgatgtgatgagatgaagaaaaagagagtactactacatgtctaaacaacccatgttgagttgataaggataagtttttggaatgtttaatgtggcagacaaacaaagtaagtatcttatagcaacaacttttcaaacaacacaaaactttcaacattcttctattcaccttttccaatacaacaattctcctcttcttcttttttaatttcttttctactattcctaaaaagaaatgaatagaaaagaaaagagtaagaatttcgattgaagccttaaaatatgaaaatgtgtaaatatcataccaatataggaatgtaaatgcaacaacctcatttggtataccacttttaatttattttataggtgggtgaaatgtgaatagtgaagtgaacaactgtgatgtgtgtgtgtgtgtttgtgtcatttagtataaagcataataggagtgattttgtgagaaagtagggcccaaaatgaggccatataggtgtgtgtggtggccacataaaagagtaacaacaacactagtagtagtagtagtaatagtagtagtggctagtacttgggacagtggcttttgccttttcctagtcttgaaatgggaaaatggggtccatccatttctagctatttggaactcattcaatggaaagtgacaggtactatacagggtcccctcttcccccctatattttcaactgcttgccaatcaaacccatcttttagttttacctcttttttatttatttatttatcttttttcaacttacaaaccaagtatattcctctttggacccacttggtagtataaagatcaggtattgttagttagacacgtcatttgcattgggcagtccacaatccacataatagtgttcttcatttctttttctcttacctaaatatatatatattattaattttgtgacttttttctttctttgttctttgtgtaatctttatgataagcagaaggatattgaatattgctgaatgttatatcaaatcacagttgtctttttcttcaaccaaaaaaaaaaaatattgcaaattgctgaaaaaatgaaaatgaaatttatgctgaaaaaatttataagttgttgttgattcgaaataaataagaggtctattatcgagataaaaggaaaatatatatgggccaaaaaattggggccaaggcaatgggtttcttatccatattcccaaactcagaaccatatcctccaatgataggaaagtggacccacttaagaatgactcaaaaaactcaaacccatttctctctctctccaaactatacacaaatggatatgttatataaaaaaaaagaagaggcttggttgatttggagttaagtataagagaagagagagtgtaatgaaaatgggttgtaaagtgagtgaaattgagtcagagttcacgagctcaaatgagcagatatgatattcattacatttcatattatttatttaattaattaatatcaatctacaactactacttctcaatcaataagtaacagtaaatagtagccaattcatttcattttgtctcataaaaatctccattggtttattattatatgtaaataacaataataagtgagactagtctagtgtgtagtatggtgtggtggggttggcatgcagccacacgaaagccacgtggcctgggaataataacgtttcacaatatggtcatatatatatagatgatttggtgctacttctcttcatacattcacaatattcatcatcactatatgtaaataaccatacaaacaaaccaaaattcaattcttttcttttcttttctttattattattattgtttaatttaacttttttttttatgtgtatgtatttgtgtgggttaagtgtcaacttcatatacatgaatctcacacaatcataaattggatggacaacaaacaacaatggtgttggtgttgaattgagtgtgagttgataatgtggccacaaactgttgatgaaaatagaccaaacacaaaacaatataaataatccttttatgaattcaactaattaataagaaagaaaaatataacccatattttatttattaaaaaaaacataatggaaatgatgttacaatgtgggtactaatgcatttatgtaaaataaacaataatatggtaaaaaagcaaaactttattacttcatttgcccaaaaccaaaacctctgcatgttacttcctctctttctcttattcaattatcagaactatcctatattactctaaacaacgatattaatactataaaactattttcattttcatatttacgacaaactcttttaatatttataataattatatatatgatctaataaaaaaataacagcaaaatattttattgtaattaaatttatatatttttaattaaaaaataagataaataataattattt

SEQ ID NO: 378488 - DNA, 1966 bp, Cannabis indica
tgaccatacacatatattatcgatgctttagctttcattatttttcttaatcaatgcacgcaatatatctagagttccaaaaataaaaggctgtttttcatcaagtacaagtactaaagataattatgtatcataatttaagtagtaaaatgtgcaaagaaaacacatgtagtgtagatgcaataaaacataagattgagaaaggcaccaatgaagtaggaacagtccagccacattttgaagaccaatctaaagatggccgcagatccttgcagaaagctttgtaagaatccccttcacctatgggaggcggatgtaactctatctacaaatgacaataaataaagtaaagataagcaaacaattttattccacattgtagaaattctgaactctattataataaataaactcatgttgcagccctttcctacattcaaaattaaataagtagaagacatccatttctgaaagacatttcacagtgacttcaaaaaccaacttatattgcaatgaaacacagaaagagtaatattacaaagaagaaacgaacaaatagaataggtcagctgaatcagcacacaaaataggtagaaaattcgagtaaataacactagcagctgaatatataatacctcaaccatatcatcctccaagatttgaattactcttccagaccaataacaactatcagtaaaccaatcaactaaatccccaatcttcctgacatccttgaaaacaactgccacttctgagatggtattgacatcaggcatttcactttcacgatatactgtaggaaagggtggtcgcagcattatctcctttttctgctgtaactttccagtcttagttgggcacttttgatataacaaaattgactctggagctgcaaataaaaacaacaaatgacaaagattatgatataaccacttgagtagaactcactaccaaaagctagcctaagagaggagaaatcctaacaaattacaaatataaaacatctcattccttgtaaatatggtaatgtaaatattaaaaactcaaacaaaaatcctcgtacataatatagaaaacacctaagccaactaccattctgctccgtaaaagtaacattacagcctataaaaatcaagcactgcttagaaacaaatacaagtacaaaacctactaaaaatcatacattacttaacaaatcaaattcaagtgcaaaaaccaaataaaaattgtgcatggcttcttttcttttcctttatttgttgggaaatacaagtgcattgcttctgaaaatatagaaaaatatacaactaataaagactcatgatgtttaagtaaggtgaaaactgtaacatggtcataaaaacttcacatatcctagaggcaacatacaagcttctttagtccatataattagcatatacttgagaaaaatctagatgtacagccacagaaacttaaaaagaagtggcttatctcatgcatagtgtctgtaaatctaaactaatcattcagattgcatataatcatgtatatcagcaaaaccattagctttaagtgatgtttgaaaagaattatacaaacaaaatgaatatatgcctattcgtgactgtgctatacagctgtgaatgaatggtttcctgatacaaaacaaaaggaccatacataacacttctactttaccttcaccaggaaagtcaatatactctaacatgaacttctgtctttttccctttatattatcctttatctgaaaaataaaataaaattaagaacatgcttaaatttcgtgtcacagaaacaatgagaaagaacatgaaaaaccaaaaagcttccaatgtgcattcaaattaaggtaaatatgtccacttatagtaataattaattaaaaaattgtttaaaatggttaactgcctcttgtcacagaagagaaatgaagtcaaaagattgtagagtatcctcaaaagtt

SEQ ID NO: 378489 - DNA, 4003 bp, Cannabis indica
tttttctttttttttttttggatagtgtatattttaatttgtgtaaattttttataaataaaccaaaaaatgtgaatcaggaaattcagatgaagtgttagaaaattaagataaaagtagaatgtaaattgatacatatcaccctctgaaaaataaatttggagagatgggtgttaggaattccttaacttcatttaaaaggattattgagaagtaattttagaattaaaacataatttttaatttacttgaaaaaaaaaaatttattttagtataaaaatatctcaaaaattttaatgaattttagctaaaagttaaagtatactcgaaactcaaccaacttcaaacgtattttcggaggtacaaaagtcttttgaaaatccaatcagtgagtcccaatatgaaagagaatattggtagaccaattgtccttccataaagtaagggaaagagaacaatttaataatttaataatttataattataacaaagtaacttaggcatttttagagcttgaggatttataacaaagtagattgaggtagctgatttgttttgttggggagttcaaagatttcattgcaagtaaaaaggttaagtatacaccaatttttgggtaacattctcattaagagcatataaatatcatgatgaagatttataacaaaatagattcataaaccttatttgttttgttagacagtttataacaaatagacccacttattatataaatcttttcacttatttatgaacagtttatcttataataattctcttaggggtgttgccaatgcagaattgagtgaaaggccttttaaatcaaaattaagatgacaagtattaataatgataatgaatttgatttgaagtttgatcatataaagctcatcagaaaaagagtagctaaataaataagagtcaaaagaagggtgacaataactactagtgaattcaacccaacatccaaatatcaaaaattgtactcaaaattcttcatataacactaaaaagaaacacaacaattttagggtttaaaaaaacattcatgcatgcatgatgatagcttaagatctgggcttctccttcttctccttgaaaagagccaagagagacacaccggaaactttcacaaccttgaacctaactccgggaatatctcccacagcgtgaccctttctaccgaatccagcaatcaaaacctcatcctaaacacaaaacaatatcgattagtctcttctctacacaatgctaataaaggggtttgaccatttcaatagtgttgtgtgttacttacattctcttcaatgtagtttaagcaaccatcgttggggacgaaagcagcaatcttctttccgtttttaataagttgaactctggcacactttctgatagcagagttaggctgttttgcctcaataccgctgttgaaacacaatgaataacgaaactagttagtatttttagaatcaagtgagcttgttgatcataacaaagacttgtatcgaaaaagaatctcacatcttctcgaggacaatgccctttgcgtgggaagaaccggcaaatggcttcttccattcgttaccaaggtgagacttcttgtaagatttgtcggcccacctttgcttgatacggtggctcttcaacttgcgcccagctacggtaccacgtgtcttactgcaacaaagattccatgttccgggttagggtttatcacattgaaaactagaaaaccaaccgcacattaacaattactaaaaaaacaaaaccttaacataccaaattgcagaacaagattagagttcatctcaatgaaattttgaaaatcaaacacatcaccatactcaaacaggaattatcattattaactagtacaaaaataaaaagactcctaacatacccaattgcagaacaagactagggtttatcagctcacaatgaaatctagaaaatcaagcacacaatattatccccaacatactcaatttttgaagactatggtttattacaatgaaacctaaaaaattaactacattataagcagaatctgatagcaaacactcctcaactattcaattcgtaatcaattaaagcagaaccagactaaattagggtttatcacaatgaacaatatgaatcacataacatcaaaacagtacatacttcatcagataaaaagcaccgatttttaaaacttaccaacataaacatcgaaatctaatgaacatctacaataaaattctcaaaaaaagagatagctacagatacaaagtaacgatttttacaaccaaaaacagcataatcaaaggatagaagaaatgggaaagcatatacgaaccccatggcggcagagagagagagagaagctctggtggtggttagggttagccttgatgctgtggaggcctaaatcttcttctcctcgttcgactgagaatcagagatttgagttagggttttccttttatatcaacgtactgagtttagggtttctttttctttattatttgggttgggcttacttaaatttggattgggttcgggcctgtcctgagctggcccaattataacaaatatagtattatttttaggaaattataagcacttttatttgttatttttatatttatttttcttttattactctttaatttataactaattttataggtaactctaattttaataaattttaataagttatgtgaagttatatttagtattttgattataaaaaaaggtatttatcaattaaaattattttacagttgtatttaattaatatgtaataaaaaaatagtttttaacttatcccgattattttctttagatttttaacccctgaactattgacatatgcattattgtgcttcttgaacttttcagctcgttatacaaatggttactaaactactcacataattgtaaattggtccttctgtcaagttttgttacacgaggccaacaaaatgataacatggttgtttaaccaattatcacattagtgtcacatatataacttaacatcaaaaaaaaaaataggtatttaaaaaaaattaaactaaaaatcaattaatgattaagaattatgtaaaactaaattgaaaaaaaaaaatacaaattaattacacactttgcgttgacatggcactgatgtgaaaactggtaagtaactatgtcatcattttttttttcgtcacgtgtgataaaacttgataaaaggaccaatatacaacactggatagttcatggactgtttttcacaggctaaaaagttcaggggcacaataatacataaatcatagttcgggtggtaaaaattttaacacatcctagtattaggtagtagagtagtatagtagtggccttaatattctattaactattttgatttttcattattaattagctaggtctcatttgttttctttgattttccttctacatttatagagcaaaatctttgtccattgctcatttagacaaatgtcatctattaaatatcacttattgtgtgagctgttactttcaggcttaattttgtccccgtttgcaggactggctttgaagtgtttttgggccttgaaaaatattaagacttttattctaacaatatgtggtatttttgaaattattacaaaataattgtgtacttttaaaaataatgattttttgtgctcttgggctcattagtgggccccatttgcagacaaccccaccttagcccaattcagcttatagttcaataatttatacaaaatcttgtatttttcttactatgtgcattttgtcattttcttttataattttcatattttctaagttctcacaaccccaataattgatgcatatatcatcttgttgattttcagtttttaattgtgttaatcttgatttttctattttacccataattttgtgatatgtttcttctttttaagtaaagttttttgtgtatatgtatatatataaaaaagtgcatcttcatttgtaattttttttt

SEQ ID NO: 378490 - DNA, 3772 bp, Cannabis indica
agagagagagaggagggggttgttagcaaaaaaagtatatccagattaatacaaaactccacccaccttctaccaaagtactatcaccatttgcaaacttttgcatggtattattagtctccccaacaagggttaagggcagaatgtccacagctccatctacagattcaagatctccaacacctagaaagtttacaccattaagactaaaaaggacaataataatgggcagagatcagtggaccctgagctagaaaattacctgtcatattttcagttgatctcccattttcatatgaattagacaccacaccactacttgttatctttcccttccatatattgctaagggtggcctgttatgttcaagttacacaaataaatttcagtgaaacagaaaagaaaaataaatacagaaggctataagcaagaaactatttgctacctcctcagctgcatctggggcaagaaaagccaatggttcaaccaaccctacttctgttataggaggtgagtcctccatctcatttggcattgtaacaaaagatggatcaagctgattctgacgataaaggtcaagaagcttaccccttggatagtaaaacctatcagctgagtaccttggctttccgggaacactttctgttctgtcagaacaagtagcgctagctgtgcctatacaagatgatcttccagcaacatttggccttcctcgtccccgggcaaatcctaaatttgaaccttccacctttcctctttcaagcccaaatccaggtgcagcacgatatgtagctgaaccactggggtgaacttccattctatggcgtggcctccatttgtcacgagaatctaagtcacgctcagcagtgggacggttgctacccacagtagtttggctttcggagtgagtatcttccttctcaacatccgttctcttttcatttcgtgcttccttttgtcttcaggaccccacctagacgaccatttgttgtcgcgtctggtttcatgtgcggagttacggccatcattccatcgctcagaagtaggtaatgctctattgtcagtagtttctctcattgaagtgttgtctcggcgctccactttcttgcgctctcttctaccaccaagtaagctagtttctctttcttcttcacgccagcggcgactactttcaccatcagtgttaatgcgctttcggtcctttttgtcctcttccaaacgccaaacatccttaaggttgctttctgtggagtttcctagtgaacttgaagggcgtaattcctgtcatcatattaaagaatgccaagaaaagggctccaaagtcatgaaaggcaaatcaatattatattaatttcgagttaaaagaagggggaaaaaattcaagaaataccatattctttaaaacaaaagcttgcaaaagagagaaaatctagcacaattacaattgtatctaattcaatgacattaggaagcctaaaagctgaatacctttaaataactatagaaactaaaaattggggtcataaccaagttaaaatataaatactagtatataataatgatattatctatgttcagattgtaatagtatagaaccatatttaagatctaaagtttgagcccaagaaaccgtacataaaaagtttttgtgttaaaaatgtagaaagaaagaaatccataattattatgccaaggaacgtcacgtcaacagttactttttggcgaaagagaaaaatgaaagtgacaacattcccagatgcccataagcacttaccatcttcgactcagttggtttggcataaagccactggggagacaaaggtatgctgctttctgaaatcagtaaatatgcaggaattggtaaatcggcaatataataaatcacacaaacaaaataaattacagtattcattgctccaatgccaccaaaaaaaaacaaacaaacaaacaaaggaaacatgaatacctttggactcgtcaagtaacccacaatgcatctttcctcaccactttctccagatgtttcaactattgaagcatgaaaaacataagaaaatattacaaaaaaaaagttgctaattttgttctaaagattcaacttacttttgcaattaattttaaatggtattaaattattaatttaaatcaagtcataacgcaggtatccatttggatgttctgactgttcattcacggaagtagttttaaggatttcataatttcaattccaaccaagtagaatgtcacaataagaccatgcgttgaagataatgactctaactacaacattcctaaaatatacgtcaaattcaatgtattgcttcgaagcaattaattctcaatgcattaaaattaaactataatatatcaacataatctaaccagccaaaaaaagaaaaaattaatacatgaaaaataaaatgagtagaagcaaattaaatatccctaaaatatttacatacactgccacatgtaaatgcattaatcataagtcaagagaaaggaaaaaaaagaaaaaactcggcacaaagacaagtctcaatacttcctctgtgtgaatgaatcccacgaccaatcccagaaattaaaacacacatatgaaacttagaaactatataagagaagcaatcagataaaatgtatttggtttattaggaagatcttaaatacccacttaatggtaacagaagaccctaaagtacaaaaacaacaccttaatttacaatctatgggaatgcgatctaatccatgcaaaaaattcaaaatccgggtacttttaatctacttcatcaagaaaacttgcatgagaaattgagaatttttaaaaaactttgaacggattgagaataaaaattggattttagtttattgtaaacgaaatcaacaaataaaataaatatgctaaaaattgaaggtattcgatattcaactaggaggattcaaatcaataaacctaaatctcgcattcgcttcgaaaccatcaaatccgccaaataaacaatcgaaactagcaaattgagaataaaaatttgaaaaagcgaaaataaaacaaacaagcagatggagagaatgaaatacgtttggaagtgcaggagtgatcgggcggttttgaattagagggaaggataacgtcgggtagatcgaactttctgtcagccatgggaagaaggagaaagtagagagaaagagaagggatcgagagggagagagaaatcagagtgtttatttgtacagagaagagttgcagagtaagagagagaatagaattagaaagggttgagaagatggagagaagggtttgattttgggttcaataggttgtgttgtgttcgcaaccagccaaactaatcttatttaaaaataatgaatctttaaccaaaaataaaaaaataaaaatcattttttttctaaaaaaaaacataaaaaatgattaatctttctttcttgctgataattaccataacgaaaaatatttgggataacctcaaattacacctcgtataattaaagagtgatatattctcacttaaaaatataaacagttaagggttagtttagtacggcatattacatcgtattgtattgtacagtattatattgaattatattttatgtaatatttttatgtaaaattatatgtggtattaaattttatgggcacctaaatatataatattttggtataaattaaagtttaacaaaaatattatataaaaatatgatatataatcgcgttcaatataatacaatacaatacgacctaataagacat

SEQ ID NO: 378491 - DNA, 5077 bp, Cannabis indica
aaaagaaaaaaaaaaaagtaaaaggtagaaggaataaagcaataatagaaacaaataattaaagacttacatttatttatttatttattggttaaagataaaaataaagtgaaagactaaacgagaaagacttaagaaatgtagggaaaaaaatgcattttgataatccaattatgaagagaaatcataagtgggtttctgtatgctcacctaaaaaaaacatatatatgtcactccatggctatgtcatacataccttgcaatatatattgtgatttgcttagccaatagatattgattcatttttacatgtgaaaactcatttatatatggtgaattggtttgtttaaattgggaatgatcctcttatacattgtaattagtttaagtagagtttaaatgaaaggattcctccaaaaaactataagcaattagttttatttggactaattattaattttaataaaatatgattgattggatagtattttgctgtgttaaccatattattagtgatcaatagttaatagactcacggctaattttttaaattaaaaatttatttgaataaaattgaacttttttaaaattggtttttttttttcagaaacaattgccatgttttaattgtctgtactgtacatcagaaagattaaaataacgtaacgtaagtgccaaacgtaacgtaattatcttagcaaaaacaaaacgtaattaaactttccaaacaatcaactgcttagtgcttataccacgcgacaaggtggcacgtgacaacacccaccatatcaaaagaaaaaaactgcaccgtggtaaaaaaaaaaaaatataatctaaaataaaaaaaaaaaaaaaaagtaaatctacacttttttttacagttttacgcccttgggaaaaaataaaatctgttcttccatttcttaaaaaaaataatcaggcacgcaagcctagtgccacgtgggatttcccatctgaaagctgacgtggcgagatgagtcaacacaatcaacccaaaagcaaggtgggatgtatgtctttgagcgaacccaagacttgttgcatcgtgggccttttcccaggtgactccgccgtacacaagtacccaactcgtaggctctccaccatttcacgctcccactcatcttcccgcccacttatggatccgggtcggagtctcgggtcaagtgcattcacaccaacgccttccctcaccaacctccttacccacactacagtctccgctgttccgggccgacccgtcagtagctccatcaaaaccacaccgaaacagtacacgtcactttcggggctgcagttattaccatctcgtgctccgaagctcctgaacccgaaatcagctatccgtggctcgaaattctccgccaacagtacgtttgaactcaccaagtggccgtgtacgacgggcttagaacccgcgtggtggagatacgcgagcccacgcgctataccgacggcgatgcggtggcgcgtcagccaacccatgtggagcccgtttccattaggattctcccacgtgtcactactccaatcttccacgttaggctgcccggtaggaagctcgtgcaaccatctttgtaaatcgccgttggccatgaactcgtatagaaccagcttctctttccctaaaaatttaattcaggaaataaaaatcaaaactttgaaattatcacgggtatcgatggaagtaatcatggcctagtctgcacttaaattcaaacagtctttaattgaagtaagacaaatgaagagcatttaataaaagcccgtgagttcaatttaagagggtaggtcaaaacactgccattcataaaaaaatttgaaatggagtattaagaattgtacagtacctgcaatgcagtaaccggagagaggtaaaaggttggggtgtttcaaaccggacaattcttcgaacatgaaaacagcatcatcttgatcgacgtctctggcgttttccaagaccttgattgccacgtgtatgtctccaggaagaacggcagtgtagacgggtccacatctgccttcagctagctgagactctttcccgaaatgtgaagtggcggcaatcagatccttgaaagtcaaattcatcaacggcttctcaaacatcaccaccggagctgaagatggttctctgatatctgcggtccaggacgaacctgattcggtctcaaacgcaaagggaccagatttctccatcttgaagggaagttggactggtttagagatggcccatttgttctttctcgttatttgtcgttttcttctgtacatccggacgaaaagacaaaccaccattgaaaacaggacaaatgtggaagcagaggccgtggccaagatcaatgtctttcgggatttttttcatgactggtttttggttttggtgtattgttttgtgtctgtgaacaagtttgtgggctcctttttgatgggtaatgttaaacaaggttgagtttatacggtttggtgccggtgccggagccggtaaaggtgaaagatggaaacttttaggggttttagcagcgttgagggtgaaatttccagcggcaatgaatgctgctttgccaaatttctggtacttttcgtggctaatcaatccagagaaattattatgagaaatgttcaaaaacttgagcttttcaagaggaggaaaatccgagggaaatataccgttcatcttattattcgaaacatccaagtacttcaatgaacggagagatgaaaagggttttgagttaccggaaatattgcagctggagatatcgaggtattgcaactctgtgaggtttcgaaaaccagaaggcagagttctcagattgttatgtgaaaggtaaagcactttaagatggcgaaaaccagagagcctaaccatattcgtaaaccgatttgaagagagattgagcacttgaatagacgaagctgaaccattactcgatgtgggttcgaacccaacagaccccccgaactgattcttggatagattgacctgaagtaagctcggtagggaccagagccaaccagggaccgaacccttcaaggaatttcccgaaagatcgagactttgtaactgagacatatttctgaggaacttccaggttacgatccctcttagattcatggatgataagttgagttctctgataaatggccgtgaacagttggaatcataatgtttgaacagagatatgttgaagccggagactgatctaaaagccttcgaaaccagcacttggtccgtactgttacatgaagaagaagtagctgattccgcttctgctagattcagtgcaaagataataaaagctataaacaagatcttcattttgagtgttctctgttttcaagtctcaataatattgtttctctctctctctctctctctacccatctatgagtgagttagagagagaaagacagaacctttgttaatttatattgaagaatagtttccataaagttacgaggagaggttgatggtggagcaagtagtgtatatattggaatagatagctggggttgacttggactgataatattcaacagagagactctgagtactcaatagtgaaattattttaattatttatagtagttggtggtattgatgccgttgattgtgaagatatttgtttttatttgtttgtttccggttttattctaaagtttaaataatgtctagtgattttgttcctttatttattattttaatataaataaaatatgaagaaatttcctgaaagaagacaaaggaaactccactctaaaaatttagaagagaaaaaaacatgagagacagaggatttaaccagggattcattgattgtctgtttgattataattgtcacacatgtgaagcaataacttgcttgttccacagtatattcacctgctctttgatctgcaatttgggttaatttagtttaatttaatttatttgtttggttcttttgttcttgttcttgctggataaagcattttaatttacaaaattattttgagtttctttggtggggaggaagtgaacctaggctcacctaatccacaaaattccaaaacccagatttgattcttccatggaatgacaactaataatattaatacataaaataatactgaaactaagattaactacgctaaagtaaccaaatcctcagctttaatttaatgtgaagttgttccaacaatacaaaacaaaccgttatgtatttggtctattatttaatcagcataagaaagatgcttcattaaaaaacttgagtctatttagaactcgcggaattaacaaatatagatatctagggggtatgtattgtgtctttctttaggggtattaatgtaaatatcctcttttagaaggtcatatgtgttgtatatataatacaatatggcagctaaacaagactgagaatcaatttaatgggtttgtgttttgagttgagatattatgggtttttgttttgagcaccaaaagtgtctgattatatatcccatttgattgttaattgttatgttaccacttgaatctagaggattatatgcatagagtatacacaaatatagtacaagatatattacaacagcttgtggtgaaaaactactcaccaagatcaagaacttctaacagaaaccaattaagtaacaatgacacaaacaaccaagttgaactaaatctgaaaaacataaagaacacctgaattttaagtggttccaccaaaggcttttcaaccttgatgtagtccactgtgggaacagctacaaagccacacaggttttgctcttttttcaatcaataatggagctgtacaaagtttgtccaagaatcttcacaatgaagaattggaaccctcactaaatctctcttctgtttctaataatagacattaagttctaattaggcatatatacataacataggtgacaagatacttgatcacatcatcacacaactgatgagggaaatcaattatgagcattctaagactgctaaattaactggtttgtattcatttaaaaaagataatagattaatcatcaccattctcattccactttaagt

SEQ ID NO: 378492 - DNA, 3160 bp, Cannabis indica
tttttttttttttgaatggagagaaagttgaccaatatattttggtaacaattatttccttttccctaaacataacattaatttaactttttactctaactttgttatcctaaaatccctaattagttctaaaaaaataattttttagagaccattttaccaattatttttaaagaataaattacaaaaatatataaagataaaaaaacataccattaggatctgaagatatatgtatggataatcatcatccatccgtccatttttttcaaccacgtgaaaaatgaattaatgaagaataaaaaagaacaaagattatatcaaatattagagaatgagaaaataaaagtttcatctttttttttcaaaaatgacattgaaatttagaaaaaaaaattctagaatagtgagaagaaaacaaaccgttcatccaatttttggggggttgaaaatgatagccagttctatagagctcatctcgagaaagaagacattcaaaattttcatctttaagatttgaagcttcatttccatggttgatttgaataataacaagagttattaacttaataaaaaccctaatcatcatacacaccgatcgatctcttttataagcttttgagttttaaaactctagtttgattagaaccagagattttgttcatctaataatatcataataatatcatgtaactcaataaacttgcttaaaatattaagcaacttgcattaaaaaaattaagtattattatatagttttttgaaaatttaatttaatggggaaccgtgctatggtgtagtgtgtttaaatgttattaaattaattgactcatcatgctagaaaaataaacaattaaagaatgactccatgtattatatatggttttgattggattttaggtgtgactaatgagggatttatacaattatttgatagataagccatttaaaattattaataaacacaaaaacaattttgatcacaacatcaaatatacagggccgtgtgcaagttgggccacagggccctaattaaaataaaggctccaatatatttttttttctttaatgctctttaattacataagacactattttttgtatttacatttttacgatcaaagactattttttttttacatttttacggtttttcaaaaataacacgaaaataacacaaaatcaacaagaaaatacatacaagtaacatgaaaatgacatcaaaataacaacaaaaaataacatgcagataacaaaaaattaacaacaaatgaacaagagtataacataaaaaaccgtattttctgtaaataaaatcaaaaaaatcgtaaaaaatatttaaaattccgtgaaaccgtatttttgaaatttttttgttgtttttatgtttttgtgaaataatcccttaattttttttaatgaacctaatttttcaaggggctaacaacttgttattggtcacttccataccaattctcaaaactcattttcaattttattacttttttaagcaaaaaaataaaaaatcattactattatttaatatttattatatttttcaaacattttatttttttttttgtcttttttttattgtattgcaatcaataacaattaataaaataattgaaattttttcgtattttgtaaaatatataaccatatgatactatttaaaaatattatttataaactacactttttttttcttgtagtggtcctctagctaaaatattgaaggcagtcctacaaatatatagcaataatatatattataattcattataatgaataattccttttcatgatatataatttaataacccattacttgattgattaattagattgaatctcacgagtatttaaaaaaaatatatgaaatttaagaagagtactaattagagcattctgaaaatatatcacgaaaactgtattttatttattttatagttaatttttatattataccatatattatttttaattttttttatctctattatttaaataatatatttttattaatttctaatttataaaaaatgaaaaaataaatgaaactaattaaacaacatttgaagaaacaatagtattctctacatttagggctcgtttggtacgccgtattgtatcgtattgtattatactgtatttgattgtattgtattgtattatagtaggattatttaatacaatacaatgtacaatacaatgtttggtattgacttgtattaattgatcgtgtaaagttataatatattttcaatacacttaaccccaacatcaactacgggttcagattcaggtcggagtcccgggtcttgggtcaggtctgggttcaggtcgggtcctgggtttgggtatgggttctgggtttgggtcggagtcccaggtcgaggtcggggtccgggttcgggttggggtccgggttcgggttggggtccgagtttgggttcgggtttgggtcccaggtcccaatctcggtcctaggtccgggttcaggtccgggtctgggtttgagtttgggtccgagtctagggtctaggtctgggtttggatttgggtccgagtccagagtctaggtctggggtctgggtccgggtctgggtcttgagtttgggtccgagtctgggtttgggtcccggtccgagtctgggtccaggtccaggttcgggtttgggtccgggtcctaggtccaggtcccgggttcgggtctgggtctgggtttggatacgagtccaggtttcggctaggtttaggttcgggtctgggtccgggtcccaagtccgagttcgagttggagattagtgttaaccccaaatcatttgtaaatattataatacaaaccatttgttatgtattaaataatacaacatacattgtattaaaaattttagtcgtaataattaatacaatacatttttttatccaaacatagtgttaattattatttaatacaatatgacctttatacgctgtaccaaacgagcccctaatcttcattttattacatcacctaatgaaagcatttgaatggggttgattttttaaaatttaaatagtcacaacaaaatattacttgtgactaaaacatagtatgtagtacaaattgttattaatttagttttagtcacaacaagtattgtgactaaaaata

SEQ ID NO: 378493 - DNA, 2503 bp, Cannabis indica
gaaaacacagtcaaacaagctctgagaatcttacctcgagagcgtgcttgttgattttgagatttttgagacagttaatggtgtgaaaaacatcacccttgcgaacaggattgcctcatgtagctttgaaaagctaacagaacgacttcgcctccaagcaatcgtgttctctattccatatgtgaactcactgtaatatcaatcaaattaaaaataactaaacagaggtacatttggattcaatgatgatgacctctctcctgacactaatgccatttccttacaatatttgtatatcaatctcaaagtacaaattttcattattaacagaacaaaaatgatatctgcatttggagccctgcacattgtacgaaaaggaacaagttaataaaaaccatagatggtactgatgcgcaccccaggcctccaattaggttcacttcctacccaagtttgggaggatttgactatggatttcattgaggggctgcctaaatcaaaaggggttgacaccatcttagtgatggtggattgtttgagtaaatacagccactttatcgccctcaagcatccttttacagcccgcacagttgctgaagccttccttaacaatgtcgtcaagttgcatggggttcctcgtaccatagtttctgaccgagaccgggtgtttctcagtcatttttgggctgagttgttccgcctccatggtactgaactcagccacagtaccgcctaccaccctcaaactgatggtcaatcggaggtggtcaaccgctgtcttaagacttacctctgttgcttggcctctgatcggccaaaggcatgggcaaagtggttatagggcagaatattggtacaatactacgtaccactcctccttgtgatgtaccccattcaaggtgttatatggccgcgacccgccggccttaattctctattcagaagggtctacttttgtccttgcactcgaatatatttggaagagcgagatgggtttttggatgacctcaaaatgcactgttgcgtgcccattgcccaacacaagaggaaagcagcagccgattcttctcggcgccatgtagaatttgcggtcggggaccgtgtcttccttaagctccgcccttacagacagaagtccttagccctccggaagaatgagaagttagctgctcgtttctattggccctttactgttctgaaacggattggagcagtagcttatcatttggattagcccacgtcctctgcggttcaccccgtcttctatgtgtcccaactccgcgccgcggttggtacgactcactcatctcctacgattcctcctacactgactgctgctttggagttgttggtcgagcttgctgaacttttgaatgttcgacaacgccctacgcctacaggagctcctattgaagtattgatttgctggaaggatttgcctctttttgaagctacttgggagaagttcgacactatttcggctcagtttccagacttcaatcttggggacaaagttcgggattttggggggataatgatgcgcaccctaggcctccaattagtttcacttatgctagaaggggtaagcaatgtaaaactatagatgagttggcataggaaggagtattttggtaaatgtaactagtggtgagctgccttttgtattgagggtgagtgtttgttttgggtatgcaatttgtaagagataattctcttctgcatcaggagagagcttccttggctctctctgccttttgtggaatttgtctccagtttcagttaattcaataataggtcccacaattcctatatccttcattgttactgttttattgctgtcattgtgctggtatttgtggctggttgtttgtgattgcagcagcaggtgcgcatcaggtactcacacaataaacgaaagagtaagaatataaatattgtgttggtatttgtggctggttgtttgtgatttttgtattagttatgattctatctaatttcactttcacaacctaataacaaagcccaaacaattaccaaaaatcttaatcaaaatatactatatcgatataataaaaaatacagtggagatggagattaatgcctcatatacgggttctgaaattccacgagagagagaattatttgaagacgacgtcgtattaagctttaacgacgaaacattcgaaccagtagcagcggccgcacagtcgagctctgatcttcgacttctataactttggccgcatcagtatcgtctgattcactctggtggtcttcctcagtggccaattggatacactttagaggagaatgaatagggaatcagaaaaggtacagttatggagcgagaaccatggaaagcgagcgagagagacagaaaaatggatttaggattttcttttagtactctaaatatatattagggtaaattgcggcataaatacttaatgtttcagattttatatacttaaatacctaatatttatttttggaggcaaaaata

SEQ ID NO: 378494 - DNA, 8211 bp, Cannabis indica
accaaaagcggcggccggagctaaaactaccacaaccaccacctctaagctcgatttaagctaaaagaccaaataaaagacgatcaaactttggggatatgattttgggtatgaaaaatacaagattgaaaaaaaatgggtaaaagtcgatgaaaaatgaagaaataggggaaaaatggggtggttgggcaagggtttcgtgggtttgagaggaagaagggctgctggttattttagagttttgaggaagacgatagcgaagagggttatataaagacttatggcgtcggttattataaaataaccaacgcaatatgttttttttcattaaaattaaaaaaatcatctacggagtcggttattacaaaataaacgatccgtaggttttcaaaattaaaaattatcacctacagagtcgattattttgtaataaccgattccgtaggtgtgtttattaaaattttattaatttgctgaaaaaaccgcctccaaaggcttatttggtagtagtgaatataagttgaaagggtatttaggacaatctatggtcctaaaggatacttatatggtgctcggttcacggcacacagtactcgtctaacacaatcctgagaaatctagcgacctatcccatattcgagattttagaaatgctattgacaataaggaagtcacctttttgaggaatacaccactactctgacattcttttttccaacgatggcgcatgatagaatgtttttagaaattaggccttacctactagagggtacaggtcaccagattccttaggattgtgtcatccaagaatagaagttgaaagagtatttaggaaagtctatggtttagaggatgcttacttggcacagtgcctctttgacaaaatccagaaaatctaggtaaatattttagtattctcattgagagttgaagaaatattctcaccatcgcttgtcatgtaagaaaatgatggctacgagaaacatggttacatggacaaccaaccaaacagtttgaaatgttgctcaaaactccattattgacactttaaaacctcctcctctggatgatgcttagaaagtaaatgtgggagaggtagaagcatttgttgtgggtggggccccctccgaaatgtcaaccaatccaaagaactccataaagaaaatcttgacggagaagctgacctaaattggtattacaaagatgattgaggggagcattttgacaaagaagaggagaaagacgacactccctcctaggatgcggatatggcatttttaaagaaacttgtcttagacaatgaagcagagttggcgaaacatgagcaagccacctgccaaatacaagagatgttgttccagttataactctcattgcaacaaggggccttaacccagaggttcctcccacaaactaaaatccagggattgggattcagataaacaccaacctaatattggctacaagaaagtttgaccaaatgggactcgaatcgtcaaaaccagtgaatggtatggggaagtacatagcagatggttcgcaaaggaaaacaaatttgcctaggcttacacgagtaaatcctaaccaccaaaaaaaagggtggaccaaaccccaaggtagggtcacccaaacaatctgccaaggagggtcctgcaaggaaataaggttgtgctcaataactcagatctaaggcctagggaaagaaaaattaattgtcccagtgctttcataaataaggaagaagatgttgaagaccttgaccctgaagagagtgattttatggttgacctaagggaaaacttgaatgctcagaaaatgaaagcacatcgttaaagaattaggcctcgcaaaggccatttacaaaataacatcaatcatcgaaaaatggtggtgagagttacggacgatgagacacaaatgatgaaggatcaaatagcagccttggaaaaagtaagagactttgtggacaaaaagtagagtggagccaaattggatttgaaagatgaagacatggaatcatgtgttagaagaatcttagatgtggtctttctacagtgcttctagataccactaattgatttatacgagggaaagatggaccccatggttcacttgtcctagtacaataatcttatgaaggtcgcacatgtgaatgatgatgtaaaaaatatttatgtttttcccttacttttgctaaatcgatgaaggaatagtggaagcaagtgccacccgaatatattcaaagtcagtaagatctatagtccatgttcaaaaaacaatttgttaccacaagggatttcaacatggatattagttccttggcaatgatcaagcaataggagaatgagacactcacattttatatccaacattcacggaagcaacatcgaagaagaaagtcagatgaacaaaagctagtggccctacaagtagggattagatccagatccttactttggaatgaaatacaacgaaagagagttgagtcactctttggcttcttggcataggcttaaggaatcataaaactagaagaggcttatcttcaagagttcaggtggctcttgaagcacttgctacaactgagatagcattcagatgtattgtattatttctctactaacttttatctatcattgctgattgtgctctcataatgcagtttgctagacctacaggctatggatagattgcctaagggtatgcccattcgtagactattttcttcagctacggggaaacacaaactagattcaatgttgctaccagaaaaactctaccacaacaacaaacgtaggttcccaaataaagggtaaagcaagctaagggaaaaagaaacaataaattccaaagcaaaatagagccatccatgaaaagaaggagggatacgaatcctagtatattgaatatactcaccagatacatacaagagaaaatatctatttggcaacttgcaacactatccattacaggaagccacctccaatgttcaaaggaggtaaacataatagagatttcaccaagaagtgttaaaccactttgacataggcaacaccaccaatgggtgtaaccaattgaaagatgaaatggaaattctcatcaaactcggccatcttcatcaacggataagtgtctagattgtttacctgagacaagtgatagtgcaaaggcaataagcggcaactaaactttaaggacctactaggatccctcaggatatagtttaatagtaagctttgggagtagaagtccctgaggggacactagctatacaatatacaagcttcgaaaccaagagatccttatccactagaaattgctccaccacctgtggatggtcatgtggtcatgatctccggaggtccgcatatcagtggaagcagccaaaatacctagaaaatgtatttgagagagttggaacatgaagaagaagtttgtgcattggtgcaaaaactaactcaacagtatagaataatgaaattacctatcacatttattgaggaagatgtcagacatgtccacttcccacatcatgacccattagtcattgaagctaaaatcgccaaaagattgtcatgggttttggtggacgatgggagctttgtaaacattctttttaacgtcacattctaggccattggccgagttgaaaccaatatttccttgagtccaatccaactataatggttcaatggagattctaatacccatgagaaagatccaatttccagtcactctaagtgggggcatagctagaagccatacccttattgcctttaagtattataacttttagtcgtggattttcctactacatatagtgcaatttttagatatctcatccttgtcgagtttggggcaattacatttatacgtcattcgtgcatgaaacacccaagtgataatggtagcattggtattgtaaagggtgaccaaaagagtgtcaggaaatgttataatgtatccacaagaataatcttcattgtttgcgaagaggccatggaagtggaagaaatagttcttatatcactagcttagccaacaccgagagtgattcggcaagaagatatattagacccacaagcaaaaaacctataaaggtgacacaaacccaacaaagatgatcgaagtaaggaaaaccaacctcttgaggtaaaagaaaggatagtggcataaactgaaaaaaaaaaaatcaagatgtcctcgcatggagtcatgtggataggagtgggatcagtcccaacatcatctgccatgctttgaacatatacaatgatctcgtccgacaaaagagaaggcccttggaccctgcccgtgtgaaagcagtaaaggaagaagtcaacaagcttttgcattgtatctggtatggttggccaacccaatgttgtcggtcccaaagcctaatggaacatgaaatatgtgcattgacttcaccgacttgaatcgaacctatccaaaagactatttcctttaccacaaatagatcagatagtaaacactagtttcatattagctttggagttatatggatgtgtattatgggtataatcagatcaagatgcatgtgggaaactaagaacacactaccttcgagggggtgtatagttacattatgatgccattttgggattaagaatgccaaagctcatactaacatctggtcaactaaatgttcaagtatgttcttcggaaaaatatggatgtttaatgtggataacatgttggtgaagtccaaaactttaagagaatgtagagatgatcttaaggatgctttctcaatagtttagaagtacgtgatgaaggtgaatcctaagaaatgcacagtttcctcaaggaatttcctaagtttcatagttaatttttgtgtaataaaagccaatccagaaaagattcaagttctcgttgacatgctatgtccaaaagaacacaaagatgtgcaaagttttgcaggaagaatagttgcactcagtaggttcatttcaaaagctattgataagtgtatccatttcattaacattttttgtggaaacgagaagcttgagtgaactgttatgtgtgaggaacccttctagaagctaatgggtcatttggctaaacttttaattttgtcaaaacttgttgagggagaaccattgtacatgtagctggttgtgtgtgaacatgctataagtgtttcattagtgcgagaagaaggaaatgtctaactttcgttgtattatgtaagtaaaagattgggcctgaagtcccgatatcctctgattgaaaagttatcatttttcttgctaagcggctagagatagttgagatttactttaaagcccatgccatcaaggtactgacaaatcaccccatcatgcacgtattgtagaaaccagaatgctcacgtatattgttgaaataggttatcgaacttagccaattagacattcaataccagccaagagttgcaatcaagggttaatccctagctgaattcacagtcgagtgcaccaagatcgatgagaacttagagaggtcaaccacagagctagcaatgttgaaagtataagtggatggggcctcaaacaagagaggcatcagggttggaatcattttttgtctctctacaaggtcattaacacaagagtaccctccatttcctctttgatgcttcaaataatgaagttaaacgtgaagccccgatacctgaactccatttggccaaagaaattggagcttagaacattgaagttcataacacatctcagcttgtgctaaaccaagtctcaggagaatattactctaagggaaaaagatggttgggtcgtatcttcgactcacaaactgtttcaacacttcaagaggtacactatcaagaaagtccccagggaccaaaatgcctttgataactcactgggatcatcaagagaggggtaattaagaatgtcaagagctttaccaggtagtctcaaagtgggaggtgtgctttgatagaactatcaactctgctccaagccccgaaaccatcaacacttatgatggctttcccatccctccttgaaagtctattcaagaatagacatagggtattctggaagctgcaggcatcttccaagtccaaaaatatattgtagctgcagaatatttttatggcactatccatcacccactatgtgctctctttccgcacctcttcgacgagcacatgttcgacattaacgttccatgccagattatgatttttgtagccttcatcccacgtgggtttgtgattcgagtttcctttagctattgtaaaatcattaaatatacagaccaagcatttagtacctaaaccaaattgagatggtgagggttctagagaattcttgttaataactacttaaagaagttcttttcagaccttatatttagatcaagcccgttgagcattatatcaggaacttaaaagggaagaagcaaaacatatggatagaacttaggttttggaaccataaggatcctggataccccaattgggattgcagcaagaccatcaagagatctgccaaaatccacaagattaatattcaggcaaataacataacattagtttcctacgcatggcatggctacataattatccagattcctttgggtctctacgtctcacaaaagactaacatgataatcgtcctacacggtggagcatatgattttaatttgcgtaaaccctaaaattccctaactcatcacattttactacaatttactaaccttaaaatagcctacaaatgtaaaaataaagtgcaaagagactaagggatatcatacatagttatattagcggaaacctaagggtggtggttgtaaactctgagtcgatagtgagactctcatctgaaaagtgaggaacctccttgtaacctcgttgaaatctcccaagaaatatgaagacatagttagtgacgattaaaggtctatatttaggaaatagacgagtttgaaggccgagaagtttgttgatgagctcagagccaggattagacatccacttaaaaaatattttttataggttatttgggaatttatctttcataaaagctctaaaactcaaatgaaaatagaaaacatgtcgaattgttcctttgaatggtaattataaagaaggagagtgatccatgttcttttaatccaatggcctagatcagcctgtaaaattcacacttcccattgatctaactgtctgagcatattaacaggttcatttaatgcaaatattaaaatcaaagggtatcctcataatggtaaaatttgcctcgataagagcattgacatatgcctactaccattccattactgtaggcatcacttgcttgtgggagtcacataatccccacacactgactaaatgttaccacgtatccaatagcaccggattacaaaaagtccagctccagtgcatggtaatctcgaatcaaggcaacaagtctccataactctcgatcagatgaaggcttggacataactatttttcacgtttctagatagaagacacgtggcaccaggccaaggcctaaatatgtttgggcctatgaattggcctaagaagactagcaaagtagtctttttcctttccaaagatatatctggatcttgtattcatattctaggtaatcctctgaattcatgagctttctagagacagggattatgcaatcactggtcattgaagtttataataatccaaaaccgtaccgaagaaactccagcggtgggaatagaaattgaaagggtattcgagatagtgtatggtcccgaaggatgcttacatggttccttcaaacataatctcaaggaatataatgacttgtcccctattccagattttaaaaagactcacaaaaaaaaggtagtcgcctttttgaggactacactactactctgatattcttttaccctctaacgacgcacgactcctattgtcactgtcaacaacaccacgcatcatatggtagacttcttttaggaattgagcctcaccttcctagcctaataactcaaaatgtaatattaaacaatatattttaccctagtagtggactttatacaataaaaccctagaacgacccaaatttgtctggtccaattaccatgattgcctataaatatgcactatcttctacatgtaaaggattcacaaccttgaaatatacatttaagttgtaaaaaactccatagctaaaagcttat

SEQ ID NO: 378495 - DNA, 2292 bp, Cannabis indica
ccaagtctcctttactatgcatgttaattacaagtgtattagctcgaattgatttctaggaagagctacaagtgcaacaacctgattctttagtggagtttttttgccatggccgagccccataagcgaagagagaattccctcgcaaagcttgaagaaacaaaagaaaagaggcaatctccaggatcaagaactcgttttagaattcctacacgatgaagttcaagaggacgcagtcctaggagatgcaacccagcgagatgttgtagtctgaaattggcaaaatcctctgctcgaaaagaaagttcccccaagcgcaaggaacgtcctcgatttgtcaactatactgagttagcagttcccaacgaccacattaatgcaatcgaagagcataaaggagttttttttttaaaaaaaaacccacccatcagaggcaatcactaccattttgagaagtatttccttaccagcacgtgagagaaattttccatcccaattgttgatcctattaatgaccttgttcttcaaaaaaccgagaactgcattcttatatgtataatttttgaacaaatgtatatttcattcttatatgtataatttacttttctacatataatttataataaaatcaagcatttctctctcgctacaattttttgttcttcatttgaatttgttactcttttatttcatttatattaatttgttattagagaaataaaatagtaatagtttttttttatttcgttgttagttttatgaaaaatatatttttaataattataaaatgatttaatattgaaaagtaaccaatccaaaatagtcgatctaatctgtacttttgcggattggattcgaactattgtgcggactggattggatccaaaatataaattctacacttgatgcggatcggatgcattttgagtaagataatatgcattagattggatgaacacccctaagaaatagtattgagagctatagtataatgttgcaagtggtagaactgaaattattctatctagaaagattgactttaaggtttgtgatagagtactctgtgcactttcttagcaactttgaagagctctaagaaagtataatatgaagcagtaccttggaaactttctcaattagtttagaaatatttttggtagatatcctttcattattattgaacttttagctattaaaaaaagtaaaaataaataaaaataaaagagaaatgaatgaagaagagaaataatattgtgactttatttctcaacatactattatttatatggaaatatttcaaaggctagtgctactgagagtgctaacaattttaatggtgcacatcaacttagtgaaagagaaaaagaaagagctcaagtagaaaccttggctactgatatagagaacctggaagctaagtacgatagagaaaatcatgaaggtacaaatgtagattataatgaattttatattgattatgaaagagttgataatgggaattgtaatcacaactggaataacttcatcaattgtagttgaaagtatgagtacaactaccatgcaccatttgagtagaattttgcagattgagcttataatttttgtcattcatctcaaattagtgataggaaatttctaaagaaaaatatatctacattctttgttagtctagagattgaaagaaagaagaatgaaaccaagatgcttttctcacacagttagttgagaatgataaggaatttatgaaaaattttcaatcaattatcttccttcaaaaactgagacaatcattttctcattgagcgaaaggtacgaaataaatcagattgatttttcgataaaaaaaagtactatttgaaatcttcggttttttcctctttctctatccttatcccgtaggtacagcatttgaatcaatagagaactttttcttctgtatctgtataaacgtatctgtataaatcaaatattattccattccaattccttcctgatacctccgaaggaaaatcccgaatcgaatcctaaattgacaggttagtgtgagcttatccatgcgtttaccatggcgttactctaccactgagttaaaaggtcctgttcaattcctgaataagccactagtcactatgtccttgtttaagtgtatatctatattatatcttatatgtatataaatacatcatatacattataatatatcttatatattttcaatatatagtaggggtgtacgtcggtcggtttagtcgggttatagcatatttttatcaacccaatataaatatcggg

SEQ ID NO: 378496 - DNA, 1226 bp, Cannabis indica
tatatatatataaaaactcaataaaacaaattatacagaaacaatataaataaataaagaatcaatgtccaattcctaagcattatcgcaaggtttgtctgttatacatacaaaaacattatcagaaggaaaattaaggtctacaatcctatgcaagaataattcaacatccaatatgctatagtaaaatgaaaagaacacaactttccttgataatcatggtctacatgcatgattttgactataattgctaatgctattataactcttttagatataatagaccaagagctgaagaatataataaaaagaaaggtgataatcataaatttgcacaagaaagaaagaaacaaaccttttaaagcagatttgttaaatgcaagagaattttattgtctgtgattttccttatttccaaaagaatatcttatagttgctttcctgagcactcaaagcatctatacattcttataacttgacgttttttaatgaatccaccaatccactattcaagagttttgtcgtttcatcatacaatatttcctagccaaagcaatggtgtgctaggaataaactgaacacagcaagagcacacaatatgcaagaaagtttactcaacatagatggctggagatatttatcagaaatgataaacaattaagacagtaaccaaagaataaaactgtcaaagaaatctagaatagaacacatatctgctccctataggaccaactaattgcaagcttaccttaagaaaactttgctaccttcagttgaattattgtatactctataacccaagtcatcggcttcaaacaggtaagaacaaccacttaagtcacatagatcgttcgtgccagatcattaaatatttgtggaaatttaattttaatagagaatatgaatatcttaaaatcgtggaaacgactcattagtcattaccatttgaggaatcactttttgtatatatttgtgcataattttctcaatcgtaatcctcaaccaaatttgatttttagatcgctaaagaagaagagtcaatcgcaatcgcaatacagtagctcacctattgcttgctccagcaacccaaatcagatccaccaccaatcacaaagtttacatatgcccatatcggctccaccaccaatcgcaaagcccaaatcctccatcctcaatagcagagtttcatattatatatctcacatgaatattgttgggttttatgc

SEQ ID NO: 378497 - DNA, 1543 bp, Cannabis indica
tattttaagttcattttttagactaacttattaattaattgctcaattttaattaaaatgtatagtcaaaagtaaacaacttataaaataatggatgaatgtgtgaacatatatcaatgtcatgtaattatgtaggtttatctctttatataattggactaaaataactaatgacttttatttaatataatacaggagtttcaacaggtatactgattctaattgtgggaagttcatggatttattggggagcaaaaaagagaagactcatcaaattaaaatataaattctttcaacaaaatggtgggcttttattacagcaacaacttcaatctcatcaaatagagacagcccaaatttttacagctgatgaattagagaaggccacccttaattatgaccaaagtagggttattggccaaggaggttatggaacagtttacaaaggaatcttaacatgtgacaaaattgttgcaatcaagaagtccaagatctctaacactagccaaattgaacaattcattaatgaagtcattgtgctctctcaaatatcatcgaaatgtggtcaaattaattggatgttgtttggagtcagaagttcctttgttggtttacgagtatattacaaatggtacactttctgatcacttgtttgacaagttaggtaaatattcatcgctttcatggaagatgcgtctcaatatagcaacagaaactgcaagtgcaattgcatattttcactcttcaatttctatggcaatcatacatagagatatcaagactgcaaatattttattagacgaaaattgcatagcaaaagtttctgatttcggagcttcgagactagtccctgttgatcaaactcaattaactacgttggtgcaaggtacactcggttatttagatccagagtattttcacactagccaattaaccgaaaaaagtgatgtttatagttttggagtcgtgttagcagaattattaactggacaaaaagcactttctttcgaaaggccagaaggaggtataaatcttgcattacacttcatttcatcgatgaaagaagatcgattactccaaattttagacaagaatatgattatcgttgatgaagatattgaagcaattaaagtagttgctaatcttgcaaaatggtgtttaagagtaaggggtgaggaaagacctagcatgaaagaagttgcaagtgaactagaaggactaatacataaagagattcatccatggggacctaattccaataataatcaagaagatatgaatgtagaagagactaaatacttgcttgaatcttcatgccttcatgcccatattggctcaagcaacgactcaagtgttaggtttaagagcatgcttaatgagaacttacagtcatatcgttctggaagataattaattaagaatgatttgttataaataaaattgtatatgtttaattgacattctttccttttctttttcaaaatttctaagtgcatgtttggcatcataactaaaaaattgttttttgtttttaaaaacagaa

SEQ ID NO: 378498 - DNA, 3750 bp, Cannabis indica
ttttttgttgttttttttttcaagaacctcatgttcaagatattaaaaatgggatccacataccctttaccgttcataatgccattagaagatgttagccagggccgaccctcaaaaaagtgggcctaagacagttttaataaataaaaaaattggcctttttgtatatgtaatttctttttgtatgtaattttttttctttctttgcttgcattggacccacaccttttggagtgtaagttggagttggaccactccatttaatgcttagttgggccggctgggagtaaaagctgactgggcctggttttttttttgaagatgatgaagagtttacatggctgtttttgggccttgggatatgggatgggccctaggcacgggcctagcctgcctatgcccaaggccagctctggttctagcatatgtgacacaagattgtcaataagagttaaataataacgattcataaaataaaagcaacactggttaaaaccagtcttaagcttcaagactaagaagaaaagagaagagagtttccagccaggagttctatgattgttaataacttgaactgctagctgtgaatgagagacaatagtgaaatcgtcccactagtggttggcgacccactccaaagctaactcaacagccttcatttcagcagaaatggcatcaatacagacgcctcaagcaattttgaagagccactcgttagaacatgaatcaagtgacacaaccgcccttccccagttaccatttttgaaggagccacctattggtgaaattttggaagtattgatgctgggggcatcgccacacacagagtaggacttgactatttgagactacacgctgaattccgagaagctccttggaacttcataaatgatctttcccaagttagaaagctggaagaattatgagtaatttagtttatgagattccaattcttatccatgatgataacctagggcctaattagtctatgacctaattagtttcaaggcctaattagtctagggcctaattagtctcagggtcgatcctagattagacctgctcacatcatattaaaatacaaaaaaataaagaaaaataattattgaatatatgtgtacttaaaatacttcttcagttaaccttcagcatggctattgaactcaccttccttaacacctataggatacaatactcttaatcctactatcacactagaaatattgtctaaattaacacataagatagcaattctcttcacccttttggccacaaatcattttaacccattctacaagcacaatgattattgaatagcatgttgcttaaaagataaacttcttggcaaaataaagattttggattctcgtgctaagactaacaaactcatgtagtcgacaaagaatgaaaaaattttctgcacaagtaattaaataatcttagaaaacatttttataaagtagaacctacatctctagtcaaatagcccaaagcacacacacaaaaaatctctaaataactagtgttataattctcatataagtaagtatatagcttctaaatttgaaacaccatctctctttcactcactataaatatgtatgaagtaattaaaaagagaaacaaaactttggggagttgtgctatttatgaagtccaaatacatttcggttttttaaagtaaaattttcaacaatacacatattttgtatctaatttacacgtcaattaaatctagcgtagcctcaagtttaatacttgaattcccgtttttttaatttcctgcatttttaaaagatactttttggttattaatagtgttaataagaaactaattaattacatttacataaaaaaattatttttatatcatataatttgatattcaatttggttacatccaaaatttatttgtatacattttagtaattaattagttattttgaagttatattatcatagcttataatctaaaatacatttgagtagccttaaaaattattttcgaaactaatgagttgtcatataatataactattggccaacgacattgagtctattaaagcgataataattgtagagaaattaataatgagataagaataatgaacgacactcaatatttattgaaattcggccccttataatggtataagcctactcccctttagttgtattagtaagaactatcaagaacataaggtccgactaggtgagtttctcaatagctcttgaaaaacaatatttttgtagagtgattactctctttcttatgtgaaaaaatgtctcttgaatagtgtgatgacttcactatttatattgaaataatacaaataccttttgttacaaaataataggagataaatctaggaggatttgaatatgcaatcccacaattttctcaatctatcaaatcaagctcatgaaaatagagattcttattgagctataattgtggaggaagataaggaaaatatatcaaagtatctttcagtgaggttctctaatcggaacatcacctatctcggatcactactgttgctcagtccagggtaaggtgcagggcctatataagtctttcaaacattgtcggcatgtagaaatactgaccagagttattctccttaacacgtgtcacccaatcatctgccacatcacccatgtaaattttggaataaaatttgccccaagttcgtgtgggaacttctacttgtacagggacttcaacggtttacatgtcactcaaataggtgacttgcgtctgtacacacttgccaacctggatgtgacattagccttacccaaggcgtgcgaatctctacctgtctttcaaatctcaacattaaatgctttaccctgaaaatcgtacatgggagatgtgcactgacggttactttactttcgcaataatgagctttcattattttttggggggaaacatgaatttttgaatttgataccaattgtgtgcctcggtgactataaaaggataaaaaaaaaattccaatttctattttttttaacaattcgcaaactttagagctaaaagcgagaagtgttcttaatctatttgtgttattcatccctgatcagactatttcatcgagaagttttaatcaaattgcgaaccaatgagtaagttacttcttcttcattcttatgaattttgtatataaattctctatgacattactggatatacatgcttgtctttttgctgttagaatctagagtttttgaatttattttgaatgaaataaactcagaacctgattgttgagattgaactattctatgatagatacttttgagtaaaatttaacccaatttctctgtctttgttctctagagcttttggggtttcaaaaccctaaatttccttgttctctaaaatcctttcaataggacgatttttccttaatttgatctctttctcttctttggtcggagtatatggagtgtttttctttggaaagacattccagccttgttcggttcctcacctatctattcttcttcttttgtagatgaacctgggtgaattctagggatgtgataaccaaatagacgacgacctactccaagttgttttcgaggatcaaccaagactttgtgtagcgaaatcatcccaatcttcgattggattgtcatctacatcaagtttttctgagtgggaagccttaagtaattcgcgtagtaacaccctaatatagggacaccacgtatgtgattttataaactagtttaata

SEQ ID NO: 378499 - DNA, 5139 bp, Cannabis indica
atgtcttatttttttatttatcatatttgaatgtttagatttaaaaaaaatagtatataagtaatttagaaaaggtattaaaaataatttaaaaattaaacaatacaaaaaatcaaataaatataaaatataattcaacaaaacacttttatttagagtgaggatttaaaattgtcaaaaaaacaaaaagatcaaggaacaatttgttaagaaataaagttggaggtcaactcgccaagacttatctattgaaaaatcaatatgctaaaaatatagtttaaggatcaacttgttaaaatctatataattcaaagttttgcataacaaataaatcatcttaaataattacaatatatatcatcatataaaaaaattaaaattataactatttagatattaaaaatatgaagtgggtacattggtgcaccccattatcaatttaaagggaggtgcaccatcgatcaccctatcatcatttattaaatattatataggattcttcctccctaaaattacgacacttgtatagttttgatcactgattttattttatttttatttttttttatttttttttttgttgaaaactcctcttgaattgtacaaattgttataagtattctcctttagttatattttcttattttttaaaataatttatttatgtaactataaattacaggtataattatagtaaaaaaactttttttttgagaaagtttcactattattataagtcaacaatcatttacaagagtagtcaaataggatagggaatttcccctagccaacaaacgtcttaatccaactctaaagtatgtttagctaaaccatgtgcagcatggttaacatttctctttacatgagagatatatgcttcaggaaaaaaggataaaagacaacgaacatctaaaattaaatttgagaaactagataaatccgtagaggtagaagttaaagcatgaaagactctaagagcatcagtctcaatgttggtgatgtttatttgatgctgtaatgcccaatttaagctatgaaatagtgcctttgcttccatctcatctgaacgaaagcaaccctgtaccagcttggaaagagtggcaataacctgtccaccatgatcccgaacaatagcacccacacctaatttttttgctgcagaattaacagcaacatcaacattaatttttaaacccattccagtaggaggttgccaatggacctcatcatcattaatgttactgctggaaaaaggagcagtaggcgtggtaacactttgagcagggctgttttgcttcctcctagagtgaagtctaaacttttccaagtattcttttgcaaaagtagcagtgtgtttcccgtatgagattttgctaccatgtaaggatttgattctactcgtccatacagcccacattgtgcatataataagctcaaagtcaagttgggaatgaaaagtagatagatgaaaaaggtaatcattattgtacatttgttgtgcttttctagagtccaagatgaaaccagtgtttttccatactgatttcgcgtgcgggaaagtaaagagggcatgcccaatagattcccatgcgctggtgcacattgaacaggcagcagagtcaagtacttttcgtttatgcaaagcaacagcagttggaagagcattatgcataactttccacgcaaaaattttgatcttggatgcgagagacaaatgccaaaatattttccaccaagaactatgcaggtccgatgatgaagattgatgttgctcatccaaatttgcagcttgacagtataaatccccgatgtagtatgatgccaaactaatctatcagtcgagggaaagaaactcaacgagattgagagaattctttcaacatcaaattagccaaaataatcatttagaagattagtgttccactccctattgtccgtaatcaaattagcaaccgtcattgatggaggacctgtgtaagcgattggatagaactccgtatgtccaggtatccatttgtctaggccacattgaatatggaatccatttccgactttatactgaaggcctttgagaagtagttctcgtccccagtggatgctttgcgatgtaagagagggagagttacttctaagaatcagttgttagagaaatatctgctctttagaagtctacttagtaaagatgtgggcatgtcaaaaattcgccaagcttgttttgctagtagagtttggttgtaatggacaaaagaacggaaccccatgcctccttcaaattttgatttgcaaagcaatttccatcgttttcaatgaatttttaagccatctttagttgttccccaccagaaatttgccatcatgctttccaattgttgacaaaatgtcttcgttaagcaaaagcaactcatggcataggttggtattgactgaactactgccttcagcaaaacctctttcccaccaactaaaaataacttttcattccaagcattcattaacttccaaactcattttttgatatggctgaaaagaacctttttgtcatggccagagtaggagggaagcccaaggtaatgttcgtggcattcatttatcggcacgtttagagtttgatgaaaaaattgttgtgctgctattggagtgttaggagagaatgacataaccgacttttggtgattaagtatttggcctaaagtgttatgataaatactcagggctctccaaatagccaaagcagatgagttaatagcttcacaaaatagcaaactatcatcagcaaaaagaaggtgtgaaattgagggtgctcttccagtaattgtcagtccttgaagattgccaatagcctcttcgtcttgcagcaatcatgagagaccttccgaacatattaagaacaaatagggcgatagtggatccccttgacgaaggcctctagtaggctttatataccccgtgacatcaccattgatagagaaagttagacttgaggaggataagcatttatgaattaagtcaatccattcttttgctaatcccattttttccataacagcccataagaaagtccactctacttgatcgaaagccttgctcatatctaatttgagtgccaagaaacttttggttccacgagttctgtgttgcatgttgtgtataagctcaaaagctacaagtatgttgtcggttatcaacctattggagagaaatgagctttgtgtctcagagatgacaaggggtagagcttctttaaagcgcaacacaatcatcttggaaatgagcttgtagatggcattgcataggctaataggacgaaaatttgccatgacagtaggtgaattaatctttggtacaagagtgatgattgccttattaattaattccatatcctgaccattgtttagtactcccaaaactacttcggtaattgaaggtctaacaatgtcccagtagttttgatagaacattgcagacatgccatcgctgccaagactttcatccagactcatagtctttaacgctgtaattacttcagctaccgtgaagggggtagtgagggtagcatttatttcaggcgttatggtgctgggaatggttgatgtgacctgtttaattgcactttgatctactgtagtagcagtaaataaataagcaaagaaacttgtgatgatgctagtcattccatccttggaagtaattttggtaccattgttatccaagagagaagtaattcattagcagcttttcgagaggaggcatgtgcatgaaagaatttcgtgttttggtccccactctgcagccaatcaacacgcgaccgttgccaatattattcttcttgttccaacagttcatccaaaacactctccgatttctttaaatcatccataagtgtaggtgttcgtacatgttgattattcagtcttgaaacatgttgttgtgcattggaaatttttttcttcaagtttccaaagattgagacatgccatgctgaagagaagtagcacatgctgcaatattatgcagaaatgttttcattgtagaacccgaagatggagatacccattgttgttcaatgatagtcgtcgcttcatcttgctgaagccatatttgctcaaaacgaaatctgctacgcctatgttgctgctgttgttccaagtctttgagacgcacactgactgctatagctctatggtcggagttatagtagtctaagtgttgagttacaactggctcaaaagtgatgtccgacaatcgttcacaaagtaccagtccaacctttctttaattgtgtcaacagagcgtctgccttcaatccataaatatataaatattactttataggttttatatatatactaggaaacaattcgtgcttcgcgtgcggttatattttatttaatgatcattaaattttgatatttttttaataatatgagtagctattttactaatttttcgtattcagaaatgtaaaaataaaataaatatcatcatacaattttttatttaataaataaaagaaatatagatatatcttcaaatattatattaaaaagaaaatttgaagaatccttacataaaaattgaggtttaaaaagagataatcaataaatctataaaaaaaaaaataatgatcatatatatgatctcaaaattattctatcattgtcttgtagtcgggactacatttttagcggtataatctcaatatttacttttagcggcataagtacacaatatttgtaaaattgtaattttctttttctaatttcgtcagtacaaactctgttattttcttaaataagctacatataaggtccatattttaaattattgggtatagacagaaatatatagtatcaattactttcaaatgttcctttaataattttaaaacggagtttgtacagacaaaacaggaaaaaaattacaattttataaacattaagtacttatactgctaaaaataaaaattgaatttatgccgcttacaaacttaaaacttcagatacttctgctatttatccttaatttttttaatttttaacctaactacattaacttcagatctagtcatcaacaaattataaaaaaaaaaggacataatgcaagggaaatttgattttctatacttacatatacctaata

SEQ ID NO: 378500 - DNA, 6849 bp, Cannabis indica
attaccttgcgaggctccactaaagaggagcgaattaccattatgcgaaaaatggatacgagtaacaagtctgagtggttgttaaatggtaatgttgtagttttcataaaaatgttacttaacagttcttgagtttgggcaaataaaggatacatataagatcataggcttgctttttcggtccatagcaatgtataaattttatgtccggttttgtgaactgtatcttctttctggtttgtgctatattattaagggaaatgcagtatttagctactactattgtgagcaacaaggaacatttgtattgaattttctcatctatttgttctaggaatagtggtacctaagaaggaaattgctgaaataactgaaaggttcaacatccaagtcagcaatttgactcaggtaagtctctatatagatcagtgattacaactatgaagtattgcatgtacaacaagcgataagttcaatgaatgcatctttttttatttatgaaatctgcaattatttcaaagaaaaaaaaatactgcaactaaactctacatgttaaaattcatgcatggaatatatttttgtatgtgtaacatgtgatataatttcagatctacttgatgtaacattataaaagcttgtgtaaaaatgtttgttaaccttgcccttagaactatgtgtatatatagatatatatttatatatgtataaatatacataaatttatattagtttatgtgaatgtgtcggttgaactaattttggtgagatgttttactttgggtttaggccctttagggatatagttcactatcatttcattttaaggctaaattcaacttgtaaagcttgaattttttcgacttcccttagtttttttacgttatcattttctattttcttttatattctgttaaaaaaaaaaatctcatagcatatgattgttaaatcagagactttctttgaaataattaagctatattacttattttccttttttattggtggtgggttgtgagaatagtttctgcctcaagacagagtctgtgaatttgcgaggttatctcctgtaaaccttctaaaagagactcaaaaggctgttggtgatcctcaacttccaatttggcgtgatgcactaatagaaaaaagtcaggaagtgaagactttagagcgggtaagtttccaaagtaacagttttttcaagatgaggtttaaatttctgaaactcccaccttcttagctcattgcaaatcctctttcaggctattgaatcaaatgaaaaaactttggatcagcataaggcatatattgctgagcaacaaagagaggttgaacgagttcgtcaaagagaagaacttctagccaaggtttgtttgtgggtttttctttttgtactcattatttccaggcccagttatgcttgaaattttttgtttgctattatttgtaggctgagaccatgaaaaagaaagtaccgtggctaaagtatgacatgataaaggctgaatatttggaatccaaggaaaacgagaaagaggcaaagaaaaagctggatgaagctgcaaaaatactgaataatcttaaagaacctatagagtatgatgttttggtttaacctgatatttatgtgtcttgcatgaagtacttattaagtgataaattcaaatctctatatatcataacaatcaggctattctgaaagtcaggaagagttgtttcaggtgtttataaggttgagtaataaaccaaagataacacaagttataatgaatgtctgctcatttcatggtaatcataagatgcattcataaagacgcagcagggttaaatatttgtggagttcgtagcataaaaaattatcttatatgtttgttacctttgctatgtcattctattcagttttaattgataatagatgtggtataatatttgtccaatatgttaggtgtcgtgtctgtgcttgtttcttctagtctactatcaaattgcttgtttagagtttttctctgattcttaacacatggttgcaggaaaaaaaagcgagataaagatattcttaaagaaaaagttaaaaagatagctactcgcattgatgctaatgctgaaaagcgtatcagtactctggaggatgcagaatcttgtgtaggttttaatggcatacttttccgtttttctgtaatattttgcaatgacttgtttattctccaatgtaattattgtaatatacctgtaaaggataggctgagttgtcaggcccgtaagttgctccatgaaatctggggttcaatttcttgtatggatttatatagcaatttgctagagtattgttgtggaaggacaactctgtgtgtgtttagtctctattattcttaattctctataatcaccaaagtgtttatagggtgtgaaagtgcaagggagttacaaagaaatggaaaacttgaagagaaatgaagaatctcgtcaacaaaggatcttaaaagtcaaggaggagcttgctgctgctgaattagaattagaaaatatgcctccttacgaacctcctaaggccaaaattgtaagttgttgtatgtattgggtaaaatgatataatactagtttcttattgtagaaatgaactacttatttaatcttcattaaaattcaatccaagtagttcactatgttgtacattctgtttcccaaaaatgattctgttgaagtatcaaatatgtgaaacaactcttgctcaatcgaaacagcataatcatctgtatatattttagtcatatatttcaatcttttttatttttatttagtttctcagttatttggctatgttaatcttgttattcatttatttttctcatcaggaagaaatgcgcggtcaactatcagaactacgagtatccgcaactgaaaaaatgcgtcaaagacaagagaaggaaaaacttttgtttcaaaagaggaaagctcttggagagaaccaggagaggttaaatttagcaagatcatgctctccatattccctatgcaatgtccaggatttcatttgacccaatacttcttcgtactatttagttaatccaaccttactatttgcaggttaaaacagattcagggtagaaatatgaaacttctgcaagcattgaaaagatctggatgtcacagaatagttgaagcttatgattgggtgcagagtcatcgccaagattttaaaaaggaagtttatggtccggtgctgctagaggtacacacatgaaagccttggctgtatagtttactgattattgtttcttcacaataacttcattgaagtcattttgagcacaaactcaggttaatgtaccagagcgacatcatgccaactacttagaaggtcatgctcctaactacgtctggaaggtagtttcatttaaatattattgtttttgtttgtacttcatatttcagttttgtttgacaccgagcgctggtttctgtctacaattccattttacttgtggagttttcttcataatttcctgtaatttatcttgaatgaggcatttgaagtttattcttttttaataattaccttggtgaggcatccatttttagtttacttttgactaagctataatgttatatttgtaatgcacttcatatcatcatattcgagtgacatgtcaggaacaggaatttgtccacttatttcctacttataataacttgttcatgaatctgaatacttcattctgaatttatttttcacaagctttatctttatcttggaatacagattccagttttgacatattgtaagccactttagggttctagttttcctttggatcactttgcatcttgatagacttcatagataatttgttattattatctgggtgatagtgcagttttaatttcctccccaaaataatctcccctgttttgttggcttatattcttttgacatttcttaggagatacacagtaattaaaattgtatctaggattgactttgataagttacctgttcaacagtaatcttgtaacttttgtgctgataatatttctatgctatgtagtctttcataactcaagatcctcatgaccgagatcttttagtcaaaagcttaaaaccatttgacgttccaactttaaactacgtggcaaaccaacgtttttctagtgatccatttcaaattactgaccaggtatatctccgtagtcttgaagctctctatttttaatatcacatctgagtgtttctgaattcatttgtttatatttcatttcttcttcttttggtacatggcagatgagggcacttgggatagattcacgactggaccaagtctttgatgctccttttgctgtcagggaggttttggtttcccaatgccatttggataaatcggtatgattcatatgctttgcccttgattatattatagatactaggactgcataagtattttttagaattttgagtagtctgttgggatggtgatatgaagttggcaattgaaaatggtcgtgttttgcttcttggctttacttttcttagtatattgggtcagagaaaactgatcacatggctgatgagatctccaaactgggaattctcgattgctggactccagaaaatcactaccgttggactaaatctagatatgggaatcatgtttctgcaactgtagatatggtgtcacagtcacgactttttgaatgcagtatgttttcaacaatcttttttctatactggtgtgatcccagcagttacaacttttgagatactcgggattttttatttttgcttctatgttgcagatatagatgataaggaaatagagaggctcaatgccaagattacggagctagaagaaaatattacttccttagaaagaagtgttcgatcacttcagtctgagggaagtctcattgatgaggaagctgctagacttgaaaaagaacgggtatgcctgaaaaatattcacctatgaccataagcatccaatcatagttttatttgttgacacatgagaaatactgttcatcacattggtgaggaatttaaactctgggtataccttgtaggaagagattataagagttgcacaacttgaatcaaggaagcggcgcgatatgcaaaaccgtattggtaagtagaaattgtttagtcctttgccatattttacacttgaatgattattagaaactgaacatgttctgctgttctagaacaaaagaaacggaaagtagagtcgatagagagggaggatgacttggatacccttatggcgaaactaattgatgactgtgcaaaatataaccatgatcgtttccgactattaatgaaatttaaggtggagttgttttcaggataagttttgtctttttttgttttaatgtttttgcatggtaaattcataagatttatggtaaacttatcactttttttaattattttattcaattaaattcgtttttttctttttttcatttcacaggatctacttgttgaatctgttaagctcaaacaaactcatgctgaaaatcatatggccgccattgaatttgatgcaaaggtactttctgattaagtcttgagccgaagtaacatggtgtttttaagatataccacttgattttattgatccccgagtttttgatttaagtcttaaaatttgtttgctggataggatgttcaaatgacctttaatattttagccatactagttactgatccctcatcttcgttagatttatttcatccacaaaccaccatgatctacttaaataaaatctctaggttgcatagtcactctttggttcattctggattttgattcaattaattttatatttttgttggtaaatggtcatattgaaaattatgtttttcaatatttaaaactgcaggccttggttctttttgctatgttgtttatgcttctgattggattgctctgatgtctacgagtttattatgtttttagataagagaaatggagatcaatatcaagcaaaatgaaaaatctgctcatcaagcagcaatgcatcttgaggagtgtgagtagtcattttgatgtgcttccattgttttcttttggtctaaaatattggtaatctagttgaaaatttgtttgtgcagttgtctacatattattttgtcaaaatttgtgctgtatttatttatttatttttaaattattgaaaacaatatgttttaagagataaatattctacatgaaaggctgacattattccatttcgcttgtcaaggtaaagaagcagttcgttattgtcaagagaaactttcagctgccaagaggcacgcagagtcggttgccgtgcttactcctgaacttggaaagaaatttcttgaggtttgtttatgttaaggcaaatttttaagtatgaaaatgattatcggtattagttccatgttatgtgtgtaaactcacaagttgctcatgtgcaagtattttggttcattgtgtataaaccttaaaaactgttacagtataaagttatctacatgaattacacatacaattaaggtgagtttgcttacaattggctatacttgtactttgcttttggtagttactgcatactaacatttcatgccctgtattatttcttggtactgaattattttcttctggcccggctcgtggatgtattaaaaacaacttacacttaatacttgcttttagatgccaactacaattgaggaattggaagctgcaattcaagattatatttctcaagccaatggtattttctccttgaaccgcaatgtattggaggaatacgaacaccgtcaacgtcaggtataatcttcttctgttatctccaactattacttattataaaactgtttat

SEQ ID NO: 378501 - DNA, 3393 bp, Cannabis indica
aaagcaatggttttgaaaatggaatacgatcctatcaatccacttccactggaagaagatggaggtccggagaactacttggaggtcgaaactttgtccatggcgactaaaaattacgtcgagagcccaatcttgagcatttatcgacaaagagctgtaatggtagcctataaagtcagttctcgaaatacccccaattaatcactttctttctttataattgtttattagttagttgtctttcgattctttattagaaatgttctgaactctgtaattgattgttataaggataatacgaagaaagtactgtttataatggttttcattcattacaaattgacccatatacaacgcatgtataaagaacgaagaatttgagagaaagaaactacaattttagtcaatcttgttacaaattttagtcttagagttgaaagactgagagttcaatcatgcaagaaactgcccactatagctctctgtagttcaagtttgaaaatttcttgatttcttgcagtactccagatgtgaaaactttgatccagtcattccctatcttgctatgaattactttgatcgttacgtgtcagcgactcctgttattaaggtattcaaactagctctgattttaatgtatttggtcttgactgagtgactagtgatgttattgactgagagatactcttgttttcataggctgtaacgaatactggtcaacgagatctcgaactccttgcactctgttgccttacacttgcttggaagatgagagaccccagtttctttcttaccgagtatcttgtaagtatgaataaatatcggtatatcacatttctactatccttacattacatgatgaagttattagtcaaagcctttctttgttcttgttatataaacaggatgagcatccagaaattaatgttgttacacatggacaaatcctcactatggagctttacattgtcaagggaattgattggcatcttcgtcctgtaacacccttatgctatgttcctcacttggaaggaaagttaaatacaatctatggctttcgacgtagcactattaatcagatcattatacaatcagaacgcagtaaaatctcctcaggacattgccaattttgtttctgtttttgatcattgtagtggtagattttataaatcatagccgtactgaacttttattaacacaggcgtccgagtaaggctatgtaggccttcagttgttgcagcatcagcctttcttgcagcttcatcatttctctatccctcacaattttctggctttgtgaatcaaatgagttcagatacattctatggattggtaaaacaagttgaaacaatgagaactgtaattcattggtcttctcatattttcagaatttatgagagttgtaaccatgtttgcttttttactttggctcttcagtttcaggaggacattgaagcgtgcaccaatgctatgattgatgtttgcaaagagttgaagctatggattgaaagtgcaatccaaaagggccagttccgtccaagaaggaagatacgagctggagttgcatctcaagaattcattgaaatatctgaaaatattgatacttctggaagattgaaacaagtggctgctgaaccatctcatgaagttagctctggaacatctaaagaagggacttcgaaactattacctgaacaagtggttgatgaaccatctcatgaagttagctctggaaaatctgaagacgcgacttcgaaattattacctgaacaagtggctgcggaaccatctgaagaagctggtgccgaaaagtctaaagaagtggctgatgaactgtctcaagaagctgatcccggaaaatctgaaaacgtggcttctgaattattacccgaacgagtgtctgatgaacggtctcaagaaggtgatgccagaaaatctaaaaaagttacttttatattacctggacaagtggcagctgaaccatcacaagaagatagtcccgggaaatctaaagaagtgacttctgaattacctgaagatgtggctaacaaaccatctgaggaagctggtgccgggaaatctgaagggactgttgaattgcctgaacaagtagctgcaaaaacttttgataagtctgagacagaggttgttcaaacatctgagatgtctgagctacagcatgctgaaacttctgagaagtctaaacatgatggtgctggaacatctaaagaagctgcagaaacatccattggagtggcatcgaattatggtgagaaaagctcacagagaccagggaaagagaaggtggaagaggcagagttggtagtgtttccacagacggtagttgaaagctatgagatgcagtttaactttccagttaggtgggaaatagaagagagattcgtagttgcggatgatgatgatgatattgatgatgcttttctcatattctctcctacgcttgacatattggctccagtggcccctcagcagaatgtagaacctccaatacaagatgaagaagttcagccgaatggtccatttcaagaattctgtggcttctgctgcaaatgctgttgtgattgctgcaagtttttgtaatgtacctataagtagtagaatttttcatacagagagacaaagataattcttttggagaagagtaaaaacacgaaataagtgaaagtgaaagttaataatcacattgtagctatggataaaatgcattcaaagaacaccaagtgtatatggtttttacttttacctttttttttaggtaaatgattttaagcttttaccaaaactttcttttgatcttgttgttcgaaggtactaagtagttattttcaacaaaagaaggtactaagtagttggaagaaggctttaaaggtcccattactaactcttcattatgtaccaaatgcaagagggaaaatataataaaatcatttgttttttgttgtcatttgattttttgtagtttggtgaccccactcacattttctaatcaattaacattattctttgaaaaaaaagtgttgttcatcagaaatgctaccaaccactataagagatgtcatctatcgctatgtatatttcaatatcgagtattgttcattttaatttaatagaggattcaaattacctatctaatactatgtctaaaattagtgtctaaacaatcaatgcaacacgtgtatctctcttacttttttttactaaatataaaccataggtggcgtttggtaacacttttttaattagttttctgcttttaaaagtagaaaagtgaaaatatttttcaaaaacatgttctataaaactatttttacttttcaattttataattagaaatcaaaattttaaaaacaaaaaaaaaatcactttcaatat

SEQ ID NO: 378502 - DNA, 2595 bp, Cannabis indica
tgtttattatggcatggaaaacagggggagggggtcaagctagaaacataccgccattttcacaatggaaagcatcttttaatatcatcattgagtgaaatgactcagcatcctaggtcattgactggaaaaatgactcaacaccctaggccttcactttaagtttcctaatgaggtcggcaccactagctggataaggttattgcgagtgaaatgacaaaaccacctggaatttataaatatatcagactaaattggtgctcagaaattaacaaaaaaaaaaaaataatgatgatgatgaaacagtgatacgttacagcaccttagcaacatcttataggccatcccacttactaaattagtactggattcacaagagaagagagtcaactaacagactagagcatgacctctaggtgtaagcacatgagaattcgtggctttctatgaaaaagatattgttttcttccgatcccaagaatcacaggtgcctagctctattatgctgactcattggattgtttgtttcagctttcaccccatttatgaagttttatagcgacccggttgctctatcatctttaagtactcatctatatcaacattagtaccatatctctgcaatatttcttgcaatataaaacctacactttctacaggcttcttaacccacttctctcaaatccaagcactagggatctatgagtaacattatttggaagaatactacactgcaccatcctacacaccaagttacatgcatcatccatgttcccaatattacaaaatccatgaatgagaatgttgtacagcctcaggtctggattcaatccaattccaagcatcttctgaaataaagcattggcttcttccatacggcgttgcctgcagtatccactgaggatagcactgcaagtcacaacatcaggcttcacttggtgctcactcatgtagaaccacaccaggaaggcctcttcaaagctccccctttttgagaacccatctattaaattggtgaatgttacaacatctggggaaaaacccctctgaatgagctcatctaaaacacttttcgcctcattcacgtaacctcttatcacaagactatgaatgagagtgttataggttacaacatcaggacatacattagaagatttcatcatatccaaaagctcaaaaaccttctgtaactgtcccttctttccatatccgtacactaatgtattatatacaacaacatcaggtagcaaaccatctgtcatcagtttagaaaacaaacattctgccatttccatggttccaaacttgcaacaagcatcaatgagtgtcgtgtatgtggtaactgatggtttgattccaactttaaacattttcccaagatatagaaagcctttctgtatatcccctactttacagtatcctccaattatacttgtgtagctaaaacaatctggcaacaagccaaactcagtcatctcatggaagattctagaagcttttacaatgtcaccatccaaacataacatagatataaagctattgtacatgaaaatattgtgttgaagcttaaaaaccttcaatatattaattgcttcttccatatgtcccaatttacagtaaccatcaataactgagcttagtaacactgaatctggagagataccaaaatgaatcatcttaaacaacaaggaggtggctaaattaggacgagacattttgcaaagtgtatcaatgataatagtatacaaaacaacatcaggtttcatcccatattttctcatttggcaaagcaatttccaaccgctttcaagatcaccttccttgcaataattatgaatgaataagctaattgtagaagcatttaatcccattcctctactctggatttcatccaaccattcccatgccaattccaactgctgagatccaatcaacccccgcagtaacgcatgataaaccctatctgacggatagatactaaggaggttcttcatttgacatgttaacttaagagctttatttaccatgttctctttaatatagcaattaacaagcatgctacatacactctctaaaatatttctttcagaatgggtttcatataggactgctagcaacaaactgggtgattcctcatccacattctctctcacaagacgtagcagtagatccattgtcctatgcttcatgttcccagaagtcaatacatgtatcattctacatactgaccgtatagtatgctttgatccaatgaagctctctgaccacttaaaaaagtacaaagcaagattggcactggaactctcttgaaacagataatcaatgatccttatgatattgaactcattcagttttatactgtacccatttcgggatgtcaagttccatccgcaattcgtaagtattctaaagatatccatcacctcaggagcctctgcttttttactattgaaatacaacacacccttttcacaaacctcagccgcatcttttccaccagaaaaaccccatattcttctctggctttaaaagaactgtgcttagcctccagcaatttagaatcatcacagaaatgaaatcatcagacaataggca

SEQ ID NO: 378503 - DNA, 3959 bp, Cannabis indica
attcttattcttatttttattcctacaatgatgaggactatccctataccgaataggaataggataattccacctataaataatctcacaacgcaccatttcatttcattttcaacttcgaatacttctctctccaaacaaaccgaatacatttctctctctaaatcaaacccacacattccttcgtcttcaacctttttcaatttcgtaactttcagagttacctaaagctactactacttcacaagctctaatggccgatcgccgagtcgaaccggccgacccttttctcgtcaagtaccaaccttcagagttaaaaatcgcttccgagtttctcacaacttggcttccttttctctctagagatctttgcagtagttgcaccgacgtcctctctgatcgaattcgctctcttgaattaggtatttacccaattttgtgttaattaattattattagtatgtcgaaagttttgtttttttttcttggtttcaaagctttgaccttattgatctagaatgtttagtaatttctctattagaatttgaatttgtgtttcttttggatttttttagggttttcttttttggattgttgaacaagtatttttttttattaaatgttgcagaggttggcggtgattcagaattattacaatcggataatttgaaattgatggaaaagactagtgataatcaaacggaaaattttgatgggaattcaatagggagtgggaaagataaggaggatactaattcattgggtagttggaaagatggggagaatggattatcaagggaagggactagtgagccttcttcttctagggagactcatagtcctcgaatgtcttgggctgacatggcacaagaggatgaacttgaagaagatggtggggaagatgatgattgtgatgttgaaggagaggatgatcaagaatcgagtagtaagcgagtggttaatgttaattcttcaactggaaatctgaggatatctaaggtgattgaaaagcccaagctgtctagggagcagagggagtacattaggttcacgagtgtacagaggaagaaggattttatctgtttggagaggatcaaaggaaaattagttaacattgttgatgggcttgaactccactctgggattttcagtgctgcagaacaaaagaggatagtaaattatgtttacatgcttgaggagaaaggcagaaggggagaactcagaggttagtattacttactactacatgcctttcctttttttgatgcttaccattgctttatgttataaccacttaggtagaatttactcctaaaagactagtatattagaggaacccagcccaactagttactagttataaaccaccaaccaaggtagaaattccatatttgtggaatcctaacaaaacaatacacctcctgttatagccactctgttgtggtccactctaggctttgcatgtcgcccattttgcgacatcggtcccacttgagtgggtgcatggctttgataccatttgtgataaccattagataaaactcactctcaatacataatttaagagggtgcccaaatacttataagctaacaactaatgacattttctccaagtcaaaaattctccttccaatatctatgtttttactatgcagactgaagggtaatatgaagccattttaccctggttgtttttattgcttgttaagcttattcttttatatattgaatcattggggatcaatatcattcgattattgaaatgtctcaaattaggaactctgatgatgagaaattttgataaaatcttggtcaacagggaagaactaaaaataaaacctgactccttccaagatttgatgccaaatataaatattagcgtgctcaccttgattgtgtaattaagtatttttgaagaatatattgttaaatacttgttaacttgttcttttttttgttttgtttggagattataattgtgtcctcagtcccttaattccttatgtcaaccttattatcatgtgtgtagaagaagtaggtttattgaaaagatttaactgtttgttgtctctgaacttcatgcagagcgtacttttactgctcctcaaaagtggatgaggggaaagggacgtgtcaccattcagtttgggtgctgctacaactatgcaacggtgtggttttctactgttattattatcttttgttttttgcagtatcaatataattttaagaagacctttagtgacaataatttcctgctaacaatttcacttttggctagcaggatagaaagggtaatcctcctgggattctctcaaatgaaaatgtagatccactacctgatcttttcaaggtcattataaggaggctagtgaagtggcatgtacttcccccaacttgtgtacctgacagttgcattgtgaacatctacgacgagggggactgcatacctcctcatattgacaatcatgactttgttcgaccattctgtacagtatcatttcttagtgaatggaagatgatttttggatcaaacttgaaaattgctggtcccggtgagtttgatgggccatattcaattcctctgccgatggggtaagttagtatgctgtgcttatatatatatgtatatatatatatatatatatatattgttatcgttggttgccttaagtcttgccattttatttggtggctcgttctggaataaaaaacttttaatcttatcatcacatttattcttacagatctgttcttgttctgaatggaaatggagccgatgttgctaagcattgtgtgcctgcagtaccagcaaagaggtaagagttgaatctgttacaaattacagcatccttgttcggtttgaatttgttgcaccgttgtttatctcccacaccttttgtttgaaattatcaggatatctataacatttagaagaatggatgaatcaaaacgaccaaatgactatgccccggaacctgatttggaaggaattgtcccattgccttatgatgttgctgccgagaagacaaatggtcctaaagtagtggaccaccccagaaagagatattcagacagaagaggaaatcacaataacatggctgcaagggggtctgctgggagaggcgatgtatcccaacattcggattatcaccacccaattcggggtcaacgaggaccagcaaattggcgaaggtcaggttgaatattcacaaccggtgcatacccgcaccgccattataattcttagatagctgattatgcttgtttgaggctgtggttttcttatgacgagagaggtgtgtgtccaagggggttatattacaagtgagtgaggctccaaaatgatctgaaagcaggcgtgattgggttttgcatctttgtacatttatcgaataggtctaccatattttgttttgtcttagatattttttagctgaccaatatctataaatgattacacatagagagagaaagagaaactattattcatttttattttattttttatccctttgccttttttctttctgttttcctccatttaggaatttttaattgtaaaagtgagtcttatctttaagcttaaaaatgtctggatttcatttgatgagtattctcttgtattgatattgattattatatgctttgtcatgtgttatgttgtggttgaattaaacaccttattgggtattgaattaatgttcattttccccaatcaacaagtattttatgataaactcatgtgtgttggttatgaacattccatctatagagttctttttctaaacaaaagagaattacttggtgttgattccttcccaaatctttcggtttaggacaattttgaacttgggtcattggtagatttttcatcttattaaggatggactacttatgcaaactagcttcttataaaagggctattttaaaaaatatgggaaaaattattaaggtta

SEQ ID NO: 378504 - DNA, 2582 bp, Cannabis indica
aaaaaaaaaaaaaaaagcctaaccctaatcttgtccccttatttttaatcgccgccaccaatttcgatctcaaacttttcttgatcgattcgatctcaattcttcgcctgcatctccaaatcgacctggtattcgatttcttctcttttttctctttcgatcgattccaattttattattagccgttgtttctttctaattctagggttagggttccgaaacttgttcgatccaaggctagattcatagatcttaggagattgattcatagttagagattctggggttgtgggtattcgttttctcttcgatttcgttccgattttgtttttcttgtgggcttctgtgtctggattatttgtctgtttttttattgatctattcataggctttcgtgtaattgtaatcggaaatcgctgattttgtacatgaccggggttgtattatttatgattttctcggaattttaaatctagggttagggttttcagaaatttggggcttttttttatttaagttgggttgggagaaagactgtattcctggaaatttcacggttttgttcgttattgccatcaaattttagctccaatcttccgttctaacgttatccgacggagatttcttttgaggtatagattagatctctttttgttaattttataaaatacaagcctgtttattgtaattattcgtaaataataaaaataaaaataaaaattaattggcaattttatttatttatttatttaagtcaacgagataagtcatttgacataaatgccctctattaaagaaaatgtttatatatagtgaccaatcatctcttataataaaatatatctgacaacaactatcattttattaacaatgatgctatttaagattacatttagaagattttagcaaaaatgattacatttagaagaaacttctttttttttttgagaaagtagcaacattttttttggtttatgtgtaaatagaaaatgttatctgaagtctcttctttcttttactagtggcattaactgctcttcatatattcatacatcttaaatatatgtaaactgtttttctaagagataaaattcaacttagtatcactaatgtttgtagctatgaattgacattagataggacattggtataaatttcttttgttgttgatgggttgaattattcatttactttttgttagtgattcattgctcagtgaagtaagatgcaacaaagttgtattttacagtaatgtttttgtgttaagtagtagagatatatatacatgggtgaaacacttttctcaattgttagctcatatgatgactgagagaatgcatatatatatatatatatgtatatatataactcagttattctaaatgccagttaaagcattctatatttcagcttcagtagaagtttttccttttctgtttttaacttatgtttatcaatgctcattgtactaccttgtatctagatactattcctttttttttttgttttctcttttgaacttagtgacttatttttattcttccatgcagatcagtagatatggtacagaagcgaccttatgatgaagaagaaatcttcaagatttcttttaagcacccaagacagattgaagacagcaaacaacttttctcattctcagaatctgttttttctgagagtgcatccgaaatgatgccaaaaactttaggtgagcatgttgcgactttaacaatacaagtaaaaatggaaagtagctgtttttttaagccttgttttgttgtgagagcattttgtctatgaataattgtttgctcagtgaaatcaatatgtatgctgccacgtgtaaatgctcaggtagggcaagaacaaatgtacccctacgagtcagttgtccaattctcctttgttctatttttttttcttttgtgtacaagttggctttattcatgtttttttgttggtttatggggcgtctttacttgtatctgatagagtgattgtagcataagatgattacaaattttgacttggactctgaaaattgtagttatgacaagctgtggttttaaatgctaaaacaacctaattacatggtttccttttcaagttttctaaactcacagagttgtaatatgtaattgttagaggatggattcacaaatgctgatagcaaaggtgatggaaagttttctggtgacattgttactgatgttccaaaagattgtgagaacattgaaacaagtgcacctggttccatctcatcatcatggcctgctgccagtgaagaagaatctatgccagaagcacacttccgcttttcttttttcccagaatattttattcccgagcgtcccataaggaccatagctcactgtgaggacatctattctttacttttgaatcacccttctcggaagtcggttccgattggatcaaaccatcaagctgaagttccaccatggggtcaacagggcaccagtaagatctcaggttcttcctatctttcagagggagttttaaaacctgaatctgaggatgaaaaaagattaattggtaagtgcatcattccaatgcctgatttt

SEQ ID NO: 378505 - DNA, 861 bp, Cannabis indica
aaaaaagactttacagaaactattaaaaagaagagataaatagaatattaagtatctctaaaaacttaatacaaagaaactgaaaacttgagtgatacagtttaaaaatcaataatgaaataggtgacaatgaaataggtcttgcattactacaactgcattttaaaaataaataaataaaatcatatctttttgatttttcttcaacaattgtccactttcttgaaacaaaacttggagttttttcaatcatatgaaacaataaaattaacaagcatcatcagtctcaaaaaactcctttagttctttggaagttccattaatgaaattgagaagatcttctttttacaaaatacaaaactcaaaatgtattattaagccattaccttcgtaacagagaatttttaccgtcattgaagaatttcacattgtttaaaggtcattcaagccccttgcagaaagcactcaggttcaactttaagctaatcaaaaccaaacaacacaacaacatactaaactctcctcacttcaacagaatattctaaaaaattacgggaattatcattaaaaaaatcaacactttctcatgatgaaattttttgagaaccacatcagtatactcaaatccaagataaacaaaatgatctccagagtaagttatccaaacaattttttccaaattatatattattattattattattattattattattattattattattattaatattaatgaactaaacaatcttgtaattacacaagttcttcttccggaaacacaaataacaatattttttaatgttaaaactttataagattgatttttgaatttttattttaatgtttgataatgat

SEQ ID NO: 378506 - DNA, 2230 bp, Cannabis indica
ttggttttttttttttttgaggttctatttctttattgttaaaaatggaacttggtatggtttttggtaagttgaacaaatgtaattcccttaaatcaagtaaacctataccattcacaagattccctctaatgcattctaatctctcttacaaaagtttcaacttcgatcaaattaagcgaactccataagaacacaaagatcaagacaacccaactgttattatttttattatttttcaggggtgatcactctgattttcaaaaaacaaatcaacccctcctgtcaaattttcaggtttatgaaggagaaaggaaaagataaacttcctctcgattgaggaattagttactcaaaagtcaaaataactcctatgttaaatgtcaaaagattagaaggtctgtgttacaaaacaaaaattcacattacaaagtaccaaacaaaacaagtactctcctaagagaaagtaaagaaccaccatacaaacaagcaactagtttaatcagttaacatgaaaatgtagctaagatctttgatcaatgtagtcgtgtttcttgacaattccttcctttcttgcacctaacaaaatggccactgcaattcaacaaaaggaaaataaaaaacattcagcttttgcatcccactaactaataattaagaacagattaagaacaaatcaattgaagaaaatattgtgtatcaaaacggcattcgatgaacacccatgtatgtattgtttttgtaattggttatagacaaaaacaagtcaatattaattatccaattataaacctaaattgtccagaatcttaagcaatatacagataattttgaaatctaccttataatcttagttctcaaaatcaagatcaattttttttttcaggtaacttgtttcatctcaaaatcggagaccgaagcccaaaaaaaaataggtagaattaaagattacaatcggcggagaaaaacgaaagaaagaacggcatgcagagcatacctaaccagatccaacgatgatattgttgatgggaatgaagataagcttcacaaagaagcccacaaatcccatcaccacaaacccaatcgccgtacggagtgcaaccttggagaattctgaaattcccaaaattaaattaattaaacgaaagaaggaagtaatcggagaagcagaaaattatgaatcgaacagagaaaagaatttacctttgcgatcgggcttgtggcagcgcttaacgagacgtatgctatccttagagaattctctcagaggatcgaaaactgagtcaatggcatccattctctctctctctagaaaatattagatctctgaaaatatgacgatgaatagtaatcaatgggggttacccctcgtatatattaggacaatctttttttatttacatatataaccctgctttcaatttttttcttactttcgaccacttaacccaaaaggagacttttccttctcatttgattaacaaaaagataaaggatatctaagattttttttcggaactttgacatgtatcaaattatgtcttttgaactgaaattgactggctgtaaaaaatttccctgaaattattgagattgttagatttaaggacttttttctaattttagtacatgtcaaagttcaggggcatgatttggtacataatttggacaaaaaaagttcaggggcatgatttggtacatgtcaaagttcagggcatgatttggtacatgtcaaaaagtccttaaatttaacaatctcaatcgtttagggacgacaaaaaaagttcaagagcatgatttggtacatgtcaaagtttggggaaaaaaaatcctaattagcaaagataaaatagggttaagaaggaaatttaggatatgttaatgttacctttcttttttttttgttaaaaacaatatgagagcacaaaaatgtttctgaaattttcaaaaaatcatattgtttgttttttttacacctctaaaaattcgtaaaactctctattttaataatttttattttatataaaatttataactttaattgtattaaacttttttaacttttttctttcaaatcatatacttaaaaaatatatctattaaataaaaataaattatattttaaatattatgaccaaaaaattaaaataaaaatttatacaaaatttttttagaaaaaaatatacatgattcaaaaaaaaatatatgaaaataaaatcaaaataagtat

SEQ ID NO: 378507 - DNA, 4751 bp, Cannabis indica
tttttttccaaacagtttagtaaagagcataataaaacattagattaatttttttttttattttaaaccgatttatttttctcattatcctctttctattagtaaacgcacatgtcttgtaagcaactaaaatacttatcataatgagtactaacactttacaaaaaatattattttgtgtattattgtcgcttatttttttttatttgaatatttattaacaaaacatttaataatttaatacaaatttctttaaaactaactaaaaacttaccttctgaagattattattaacctttaaatgaatatgtatatatttatatatattacctgtccgtagttcaagactcctgctgcagggctcaagtgaatatttccatagggcgtaagttgtccatccacaaactcatccccttccttggaggagcacttcatcacgtacatgaaatctgttggagttaaactaaaaccaagctcatcccaattcaccttcgcatattcctcttcaccattattattattcctacgtacatacatatgcatgtaaataaaaaaataagtacataagagtaaatatgtatatatacaccttaacgaaaacgcacttattaaattagtacctgttcatagtaataggcaacaagattgttggcaaattagaagaacgagccataaatagtaataacaatataatactattaatggcaatgagtaattaaggacgatataacagtatagtgaagaaaagaaatatatattccaattaagctgttcgttgtcttccaaattcgaacatgtatttatacacacttcaaatgagtaaagtaataaatattataatcaaataggaacatattcctatactttaaatttccacgacaaaaacaattctatttttaatattaagatgctttttcatatgataatatagatagttgttcatgtctattattacttataatatcaaataattaaatgcataaaaaacttgtgcatgttttttttttcaaaccaaaaacgcgctgagtatatatacgaatacatatacatgcgaatgccatctgaatttgaatgatattaataataatataatcatagtgggtgcgggagttgttatatagaaatagttataattaatttgttatgaattctaaaagactaactaaaattaaagtggtaattaatttaaacaagtaggaataacaatctattgaagtcttttaataaaattaattttcatgttatagctgaaaactttcaatttattcctcctaatattccatttaaattaaagtacttattcacagtcgtactaaaatatgtgttcacacttgtaagtgaaagctccttctataaatatatatatatatagtgttaaatttaaatactataaacattctattatcaatcataataaacacaattaatgttcataaacatcccactattaataattttatttagagtattgaataacaataaacatacctcaatatttatcacttcctatttgtgacattttctaagcattaaagcatctcttaaaatctttactaccttatcaccccatatatatctcatattccactaaaattgcatacatatatatatgctagtttatctgaaggggcaaagtaaacatagtttttagtgcgtgtcactagctaatatagatgattgggaaattaatatttagtgaccctttagtgtggatcactaaaactctttagagattcttactatgcgtcgctatagacttttaaagtcccacgttgtcagactctaaagattatagccacccttccaaagtgtcattatatttacttttaaaattatattctatatatatttttttaaatattctatttatataatttaaatgggataattataattttttttaataatttgcctaaaattaatataattactacaattatattttttatacttttaaaaaaaaaaacttaaattctagtagaatttatgaatcagtataatcaaaataggtataaaatactcaatatctaatacatgatattcaacaaataatacacattttgaactaaaaattataaattaactcagattacaaaactcataacagtataagaattgtgagtacaaacccagattatagataaagttccataactgtatataaataaaaacaagaaaataatatagtcaaatcccattccaaatattactaagccactccgttcatgaaccaccaactgtcggggactacaaattgccacaaactgccaaccacacgtctacgaactaccactaacaagcatctatctacaaagtcaagatagattaagaatagtttcaacctgtgagaagctttacaatggagaagaatatttcaacaagaaaatcaaaccaaacgaaagtctcgacaaaggcttctaccccatcgagctatatcgaaaagagacaaagagggagttcgtctccactagcacaccatccatctttcgtctttattagcaccactattgtcgttcttctccaccgtcgagatctaggatttctttacagagtgagatatcgagtttatggagagaaaacaaatttttttggacagatatggatgtttcaaagggtgtagaactcatatttgatcacctagccgaattcggccatctgcctagtcgtttgcttggtcgtccaccttccttctgcctagaccgagagaggaagaaagagagagggggaggaagctaagaataaaaaataaaaaataaaaataaggatgggctaggatttcttggtttttgagttgtaaagtgtattagttacaaaaataaaaaataaataaataaataagttataaagagtattaaatgtgagctcagtaaatgcacaattttctttctttattattttttttaatttattttgaattcttacagctagcatttatatatttataaaaataaaaaaaaaaacaaaagtatattatttatggagtttatttttcaatttaggattatgatatagtgacgtgttaagtgggtaaggacacacttacctagtcacgcttgacgcgtcactataggtaagtattttttgttaaaaaaataataaaaattatgagagttatctttttgtgtggatcactaaaactcacccttaaccctttagtgacccgcacttttgaacgggtcactaaagaatgccactaaaccccaactttatagtagtgaataataataataataataataataataataataataataataatgggtgcggagttattatttaaaaatagttgtagttaatttgttattagttataaaagactaaccaaaattaaagtggtaatttgaaaaagtaggacataataataatatatccaagtctttcaataaaattaattttcatgttacagttgacaatctttaatttattcctcctaatattctatttaaatcaaagtacttattgatagtcgtactaaaatatgtgttcacactttctaagtgaaagctccttctaaatatatatagtattaaatttaaacacaatcagcattctattatccataatgataaatacaattaatatttataattatctaagatcaattattttatttagggtattggataataataaacatactttaatattgaacattccctattactgacatcttctaattaagttgagagagcttatggaaagcattccttaaaatctttaccaccttatcactcatatatatccacgttccactaaaattacatacatatatgctaatttatcctaaggggtaaagtggacatattttgggcttaaatgctaatggtgtgtaattgaatgggccaatttatagtcattaagatgcgaccatatgcctcaaatgcagttaataaaaccgaccatcccattatagtcctaattatataatcagcatcatactatgcatatatttatccacataggctaatattgttgtgtgagcaacgcaattatgtaagtctagatgaaatattctaacattctctgactttgattatataattacacaaatatgtgatcactaagcaatagtgtcaatacacaaaaatcttaagaaacactaataattataaaattaattatgcatcatattatattgatagggtataaatataatacataatgagacatctgagattcatatatgagaataataactaatgatctggatcgactcgatcatagcactgagactaagctactggctcacatcaacaagtgtgcacacgcaatattaaagagttatccagaatatacatgtattcaacaactaatatcaatccttaacatatctatcatacatgaaaacaataacttccattaaccaaatacatctttggcttacaacaatctaaacaagaaaagttcttagtacacacgttcaggtaagtcgtatcagtttagtgattgacatgttgtctataagtacatgttacgatattaacggaggaccctacgactttctcacttcatatggaatatcatcaccattaatggaggaataatactcaagttccaagagaacaatatgattgtaatatttatcacatgagtttagtgtgttcacaacagagtcaactactcttaatactgaaataaaatattgcaattgtaatgtgcaatcacttttgttgtaacacgccatacacacttgttggaaatattttaccgggatcaagatttactaccatgtatgtttcattaacatc

SEQ ID NO: 378508 - DNA, 11738 bp, Cannabis indica
aaaaaaattaaatctgtaaaaatgttgaacaaattgtagatatgtattttgggataagttgaggaatattttttttttattcattaattaaaaatatcttcctattatattttattaaagtatatcacaaaaagttgtccaatatatcttcatcctccacttaagtctagcatataatttacattaaactaagggtataataaggatattatctataaaagtgagtatatcttaacaaatatagaaataaaaataaaaataaaaattaataaagtaaaatgggtgttaaatataattttctcattttataataaatactaatttttgtttgtcgaaaatattcaggaatttttagacacatactattttgcaaaaaattatcaaagttggaaaatttacacaactaaaattacacaataccgtaggatatatatttttttttgtcattttttcacaatctcttgtctatttaagaaaagagcattatctaaggattatatatactatatattgaaattttcaattttttaaaatacagtatttttttaaaaaaaaaatcgtgtgataatatttttgtaaaaattaacaaatttcaatatatttttttttttggtaagttcccattatctaatcatcaaaatattttgtcggtatcgttggttaaccaagctccctcaagtttcaataagaaagaaatgggccgggagttagcccatactataaattcatgggcttattttccacaaagcccaatgtattcccttaacatataaaggggtcatcttcttcattctgttcgcgccaaaactacaaaagctcccgccatttcacaacatccactctaacttgaaaccttgatagagttagagtgagacactccattatcagtctgcactaagatctagagagagagagagaaatggcggacgaggaaccagtcgatgccgggaggcggcgggggaaaggatctgaggccatggctcgtgccggagccctagaacgcctcaaagctctgcgaagcggtggccgcaaatctgaaactggaggttaccaggtcaagatggagaatccgatctacgacatggtcgatgaagacgagtatgacgccctagtagccaagaggaaagaagaagtcaggggcttcatcatcgacgatgatggtcttggctatggcgatgagggcgaagaagaagactggtctcaagctggtcttctttcttcggatgaatccggtggtgaatcggagagaccgaagaggaagaaagtggagaagaaggagcctcggccgaaaaagccctcttcctcttctgcttctctttctgccgcagccgccatgatgggtaagcagaggctttcgtctatgtttacttcttcggtgtttaagaagaataaggatgataagggtaaagtagtgtcttctgatagcattgtggatgatgttattgctgagtttgcgccggatgaagctgatagagagaggcgtaggagggtacattgtgctccattgcctgcttcgaagagttctatttcagctaatttaaatgttaagagcgagaaagtgtcgaatgtaggtattgatctattggctcgtcctgaattttcccgtgttgatagaaatggtgattctgaaccgggcagcgatgttgggaacgatgattcggtgttaagttatgatgaagtttgcgaagaagtgaaagagaaagactcagttatggaattagatgaagaattgggtcaggctccatgctttcagtcttctgactctgcagaaaagggaggcgggattgaggagaaagcagtgaatgttgttgaagcaaaggtagagcctgcagctaaggaggtgtttaccttgaatgcgaaggctaaagaagaaagggacccggctttcagtgcaactgcaggatggaaggcagtcaggaacggagaaattgggaatactggtggagttgtggagggcaatggttcaatcagtgaagaaaatttagattttgatttggattcagatggctcgattcctttctacattattgatgctcacgaagaattctatggtgctaatatgggaacactctatctatttgggaaggtaaaactgacaattttgattattttgttgatgtgattttggttaggcactagcaaatgttttttttttccttggcttcatttactccccattttttttaatcagagttcatgccttttgtctttcatgtaccttctagtttctagaatccattttcaaaaccaaacacaaggcatcaggtcaagacacgaatttaactttcttgattgacgtattttttgtagttggctaattctttttttcaagtacatacgctagacatgatacttagcaacaaactaaggtagttcccattctcatattggatgtgatgcaaaattaaagcaaagttaatgctaattttcaactcgtaggttgatcttaagcctagatgttccccattcagatcttagcaccaaaattgcccttaaagatgatatttagtgagttgttagaatgcccctatccatatgtttgaaaatttgagaatttgctgtggcctcttcaaactaaccctgagaaaaaggccatttttttctgcaatataggtcaaagcgggaacagcatatcacagttgctgtgtagtcgtcaagaacttgcagagatgcgtctatgctattccgcaccaatcttcttttaatgcggatgaattgactaagcttgaaaaggatgctgaagagtctcggatttcaccagctgattttcgtaaaaagctgcaagtgtgtaaattatctaaatatattttccccttatgttagttgttttctattttaagcttaactgatgccttctgtttccctctcttagggtgtggcttctggattaaagaacgatgtggcaaaacatttgttagatttaaatgtatctaattttagtatggcaccagtgaaggtttgtaaattcttcattcttagattccaccagttaagtttgttatgcaactctctctttctagaaccattcagagtttacctcacatcttctgctttttgttcacgtatatatgttgcagaggaaatatgcttttgagcgatctgacataccagtaggggaaagctatgtactcaagataaactatccatttaaggtacatcagtggacaatcagatgatccagttatttttttcactacaataatatgtgctaaaattataaactgtcagtttgtgttaactgtattacccctcaccccctctactcttaaatatcattatcacttaatttacttatgcatatcagcatatgacttgtttattaatatcaaatttattggactctagtcttatcttgtgctgtgaaactctggtttcacttttacaggatccaccccttccatcagatttgaaaggggaaactttctgcgcgttactcggaacacataacaggtacttgaagatatttcagctttatttccattgcttaatgagtatctcaaaatttcctcctcacttcattaagtgtgatattatgcccaatagctggttgattaatacaagaatagaacctgactttgcattgcaatatgcagcgctttggagctttttcttgttaaaagaaagatcaaagggccatcttggctatcaattgcaaaattttctacctgccaagctccacaacgggtgagattttgaagtctgagaatcgcctttttattcaagtgatgtcggtggcttaatccatgcattttcaatttcatagttaacagtttgtttatatgttacaggtcagctggtgcaaatttgaggttattgttgattctccaaaagatataggggtttcaaattcatcaaagatatctggagagattcctccagttgttgtgacagccataaatttgaaaaccattatcaacgagaagcaaaatattaatgaaattatctctgcttctgtcatctgctgcaatagggctaaggtttgttataaatcatcgtcacacagcagctggatttttttatgatttttgacatgttatgatatagaacgaaacttggtcaatgatattcaaattcttggatttccactttttttcatgtctaaaaaacagatagagtaatggtgttgttacttcagttaataatctagtctaacttggaaaagtttataacaatattgctatcgtcagaaaatcttaaaatgtgatttgtatatcaattgttggagtatggacagcatggaagtttctgttggttttttattctttcagtatcttaataagacactttacttcaaacatatattatatttttattgtgtgaattaaatttaattttcagagaaccatttagatgtctaatgctgctatttaacttttcagattgacagtccaatgttggcttcagaatggaagaagccaggtatgctaagtcattttactgttgttcgtaagcttgatgggggaatatttcccatgggattcactaaagaggccacagaacgaaactcaaaggctggatcaaatgtattatgctttgaaagcaggtaagttttactcagacatcatgtctaatcctgtttttttttttaatcagccaacagaaaaactacaatttctgtattttatttatattgtttctcttttaagtttgcttaaccttgcttttgcagtgaaagggctttgttaaaccgtttgatgattgagttacacaaattagacagtgacattcttgttggacataatatatctgggtttgatctggatgttctcctccatagagctcaggtgggaaaacttcagtgtgattaatcaaataaaaaattgtagatacttgatgtgtcctttgcagtggtgataaaactgaatgaaggtgaacatgtaaatatcctttttattatcaagttcctcaataacaagttatatgtactggccgcattaaaccaactggcaaaaactttcctcaacatccccctctcccaagaggaaaaaataataattaaaggccattaatatgagtaagtagttaatactgtcctcataccgtttagcttccttccatgtatgtaataaaacaaagaacttcagcacgtttagaaaaaagcttaactgcattcttattatgcgcttttcaatgtatctaattttctcacactgcaaattcggctgtttttctggtcagatgcacatttagaatattattagacaaaaatctaatgtactgttatgttacttttgtgcccaaattctagtcatggtttctcactaatgcaagttcctcttatccaatcatatgtggacatgatttgctgccattcttttaaagaagttcaaatgttaaattttgcaggtttgcagagtgccaagtactatgtggtccaaaataggccgcctcaagcgatctgtgatgcctaaactttcaaaagggaataccatttttggatctggagcaagtccaggaattatgtcttgcattgctggccggttgttgtgtgatacatatttatcttcccgtgacctattaaaagaggtattgtacttttcactttatttaggagctattaaaatgcagtgatggtcaatttagtttcagtttctcacatgcaagttgattgtgacaggttagctattctttgacggaactcaccaagacccagttaaacaaagacaggaaggagatctctccacaagatattccacatatgttccaaactatggaatccctcatggaacttgtatatttcagtgcttaccgttgattatcatttctagttgattaatgtttctgttctcatatatgatatgtaaatgaatgtttttcctgtcaactaatttagtttttattaagtgttgactttcaagattgttaattccgacgtgcaaccaaggcccaaaaaatgtgacaatgctaaatgtagtggtagtaataccttaataaagcttaaatggtttatttctaataagggttatattgttctcttgatgtatttagattgaatatggtgagacagatgcgtggttgtccatggagctcatgtttcatctgagtattcttccactcacacgtcagctgactaatataagtggtaatttgtgggggaaatccatgcaagtgagtatatgatcgtttctttgtcttttatcatgaaaggttgataatgcacctgattgttatattatatctctaacgtgtgccttttcagggcgcgagggcccaaagagtagaatatcttttgctgcatgcattccatgcgaagaagtatattgtccccgacaagctttcttttaatgcaaaggaaacaaaacaagtaaagaggagactaaacaatggcattgagaacaaaaatgctgatgatttggatgcggatgacacaagtttggagaacaatgctaatcaaggaaaaggaaagaaaggaccttcctatgcaggtggattggttcttgagccaaaaaggggactatatgacaagtatattttactacttgactttaatagtctttacccttctattattcaggtatgtaaatcaatctagtacaccacctatgctgctattgtaactcttactatgctcacttttgtgaatattgactagttgttttcactattcgggtaagtaaatcaatctagtacaccgcctatgctgctattgtagctcttacgatgcttaactttgtgaatattgacttgttgttttcacaggaatacaatatatgttttacaaccgttgaaagatcttcagaagggatactttctcgtttaccatctagtagaacaccaggagtactacctgaggtataattttcttggatataatttaaatgtacttcttatcagttacctgctcggttcataggttggttatcactttgttgcaaagatatccattcttcataaagttggatttggcattaagaatggaagatattggcttaagcatgttgtgtcttatgcattacaagtgaaacatatttctaatgtggagtaatctgccttgtgttttttcttttattaactttctccatatcttgttaatgatttttcttattttactgtgtagctgctgaagaatctagttgaaagaaggagaatggtcaagtcatggatgaagacagcatctggaattaagtttcaacaatttgacattcaacagcaagcgttgaagctcacagcaaataggttggtgtgttttttttttgttctgtatccaatttttacatttcctttaatttgtgcttgttattcaataatgtctttaatttctttatattaatttctgtttatgactgtaccgtcgctgtgttcagtatgtatggatgtctggggttttcaaactcaaggttttatgctaagccactggctgagctcattactctccaggtatgaaataagctcgtgttacaagaaactgtaacaaatgtattaattgatgttttagactgattctatcaagtattcacccagatatgtggttgttttgcagggaagagagattctacagagtaccgttgatcttgttcagaacaatttgaatttagaggtcattccttgtatatcaggatttggtcaataagctcttaattaactgtgatctagttaaagattaggttttaaaggattcatcatttctatgtggcaggtaatttatggtgatacagattcaattatgatttatagcggtctggatgatatagccaaagcaagacccatagcaggaaaagtcatccaagaggtaaggcctcaatttgcaacttattcagaaaatactatgctacgtgtaatcccatttagaaatcaatttaagttttttattgcgttgagtctataagggttactttttgtaaaagagatgataacacagcatcctgtgctggaagaactttgaaatttgtagttgatacttaacatttgtataaacttttgttttccctaataaatttgtagattgttacttaacgtttctattggaaggatttgatgatttactccatgttagcttttggcaccatgtgcactacaaatactccataccattttggcctttttttccccactctatatgtttattccacagcaaggtataataacccttatttttttattcactactaggttaacaagaagtatcgatgtttagaaattgacctcgatggtttgtacaagaggatgctgcttctcaaaaagaagaagtatgcagctgtaaaagtgctgttcaaggatgggaaaccatatgaggtactgtaaaattagtttcaggctcttgttgtcagtagtgtttacaaggggaacaagcaaaagtcaaagtaactattcttctgcaggtcattgaacgtaaaggccttgatatggttcgccgagactggagtttgctctcaaaggaacttggagatttttgtctaagtcaaattttgtcaggagggtaggttatgccgtgtactatctattacttttcaagattttttttcttgttctaatggatttgtcttgtcacatcatcgaatcttatgcccccacagatcttgcgaggatgtggttgaagcaattcataactctctgatgagggtgagtttatgtcttttatttagatgggagttgggaatgctttccaccttttagtgtaaaaacaacgtatttatctaatagtcaattgactattattgtccctgataaacttaaagataacatttgatttatttgcatttgaacaggttcaggaggatatgaggaaaggacaagtagcccttgagaaatatatcatcaccaagacgttaactaaaccacctgaggcgtatcctgatgccaaaaaccaacctcatgttctggtgagtttaaataactgatttttaaaatgaatcgaactctcaaatcacattttctaatgttacactgtcatcccgggaaacattcctaggtggcacaaagattgaagcaaagtggatactcaagtggctgctctgttggcgatacaatcccttacattatctgctgtgaacaggtttgtgatacatcaaattcagttctctgttgatgtagtaggctgaacttgctaatggtgctataaaatatgatgtttatcatttaatatgctttttcttccccttcatcacattcccatttttggacaggggactagttctgttagctcaactggaattgctcagcgtgctagacaccctgacgaattaaaaagagaagatgggaaatggatgatcgatattgattactacttgtctcagcaggtggctttgtagtttcatgtgcaaaagataaattgtatgctacatcttctactttgtcttatggtatagtttcctcgtgcagatccatccggtggtgtcacgtttgtgtgcttcaatccagggtactagcccagaacgcttggctgattgtttgggacttgactcttctaaggtatattattccttttcctccctgacaatcaacatcagaaccacttcctcttttatatgtctaacaaactgaaaaattgcttcatgtagttcaaaagtagctcaagagacaatgttagcagtgatccatccagttcactcttgttcgctgttgacgatgaggagaggtaacctttatcttgtgtacttgtcctaacacatattcatatatgtcagtgcttccaaaccatacctgtaaaaaatgtgtaagattacctttgtaaccacaaaagtgtatgctaaaggatttgaacaacctgcatcttgagctatttgtagtttcttgttcaaatagtaaagagaatgaaacaaaatatacttgtgttgtaaattgcagatatggaggctgtgagccattgaacttgtcatgtcccagctgccctgggacttttgaatgtccaaccatctttacttcagtttgtaagtcagtgaaggaaaatctaacaaagccagaagaagagtctaccagcaacttttggcagagattacactgccccaaatgccctgcagaagcggatgcgggaaagctgtccccagcaatgattgccaaccaggtatttatcatgtattttcatttatgaaagtaatggacttcaatggtctccacagaaacttaatattttgattttgatttctattctcatagagaatctactgacaatgcgaactgggcctgttaatcttataggtcaaaagacaagcagaaaggttcatttcattgtattacaagggcttaatgacggtaatttaccttttctatttactattccagaaatgcagtactggcaggttgatttttgtggtcaattataatactttggttcttcttaagtgcttaatttacttttcagtgcgatgatgaaacttgcaaatacactacacgaagcctaaaccttcggcttgttggtgattctgagagaggcacagtttgtccaaactatcccagctgtaacgggcatctcataagaaaggtttgctcaacaaacttgttcaaatgaagttcatttcttttccttttattgcttatgttaattttgattacaaatgtatactttctccagtacacagaagcagatctgtacaagcagctctcatatttctgtcatgtattggatactgtacgctgcatagaaaaggttatttgaatttcattaaatggttttatcgacttgacatggtctgatttagaatgtaacgtaatgtatataactttcggttgcagatggatgctacagctagattgccggtggagaaagaattggtgaaaatccgtccagtggtcaatttggctgcatcaatagttcaaaggattcgtgaccgctgtgcctatgggtggatacagctacagagtttaaccgtatcagtatgatttctagcgtgagccactcaactcatttttgtttctctaattttattctttgatcttcatgtatatatataaaaatgtggaacattttattgtaccattagagaatgtccttagagggcatcttgtgtttcttgttgcgttcactaatttacaagccatgaataataaccgtctcgacaggttttgatatatatatataaactccaacacttgatagtggagtgtgtactgatgaagttatgcaacttttgggcctttgggactctagtatttctatactgcttactgtaatataagatacattattaaatacaatggtactgatactcgtgctggaatttagggtataatgtaaaaatcatctcactttccagtctttaaatatgatgctagacaaatttatgcactgatgtgcctgtaattgagcatgtttgaagctctggatttgtcctaacctatgtttgacacttttaagtttgagttggattggataattttatccaaccttccaaatttatccctagcgggactataaattcatataattatttagtctaaaattgggttttttatttatttttttattattttaaagtataatatatattttcttgggggattatttcatatattgtttttttaatttttttttaaatgggaaatttaattttttatgcttacatttgtttaaaaaaattcttaaattaataataactaatatttgtaggatatgataatttttatgatattcttaaaatatctcctatttacatcaccttcatttacacaatcggatcccccatcaaaccacacaatcggaccccatatcagaccaccaatcggaccatatttgctaccaatttttttttatgttttttatacataaaaaaaaatagcattaggtgactatcagaccaccatcg

SEQ ID NO: 378509 - DNA, 3245 bp, Cannabis indica
cactataaaatttaaaagtttactatctctaatatgacataccagtacacgatgagataagtataatctttagtataagcagattaggcctgcgcctaaggtctacttagtcaaggggtcccaaaaaaacctttttaaaaatacacataatcttttttactaatttttaaaatacaacatttctttataattaatggttcaaattttaattttttttatatggcccactaaaatttagggtataagaactaataaataaacttaattaagcttaaaataaattgaaatagataaaaattatgaaaagctcatttctataaaattaaacaacgacaaattaaattaaaaccattaataataatatatagaaaatttccaaacttcaatttttcttaaattaaaagggtactacattaattcgacatttaatttcataaaaacatcaaataacaaaaaaccaacttaaacataaaaataacaaaaacaaccaaaatacataaattaactaataacacaataataaattactccttctccttcttaattgccacattagagaataagccaaacttgacctcaacttcaacagcattttgtttcttcttcttattaccaataacaacattattaatattattgttattattaatcttagtttttgaccttataagaagcttggctctcttcctcatcatcttgtacttgttctcataattaggattagtgagcatcatcatgagtgcataattattcttcttcttccttggcttaaccatttcaagatacttagtcaaaccatacttagccaaaagccttttcttcctttgagccttagtctcatacttgtagtgagatcccatgtgagctgcaaaatgttgtgaagttgtgaaaacccttttgcatttcggacaagtgtacggtccatatttcttgtaaggaagactatgagttctcccatcaccagcaccctccatatcgaaatctttaagagcttcaagctcttctaattcggcctcttccagctctgctgctttcagatcttcctcgtcaacatggaaatccacatcacgatcatcttcgtcatcatcaccatcaccattctcgtcttgtactggagaggatggtgaggaaggcggtggtgggggtggggttcgtgaatgtttttgttgaaaatttttattagaaaatatcgggtaatgatgattgaaatcattgttattagcattattcattgactcaacatcaaaaacaattgcttcttcttctccatcatctttctcaataacatgattagggtttcggtgaaaaacatggctagggtttgggacatattgaaaattattgtacccttttgagctataatgatcataagtaccaatattatgatgatgatgaatagagttattaccattgaatatgggattggcttgagcttgatgagcttgagcttgatttggagccaattgatgatgaagaaacctttctctagttgagcttgaattgaggagttgagttctgacaacctcttgagttctgacaacctcagtgaaacaaaacccatcattgttatcaacatgagaagcaacaaattggttttgttggattgggaaatagtcaatgttgactgtttgaaccacttgtactctttgtggtacaacaagagtagtagtagttgtattaggactagtactaatattatcactattactattagccctaaccctagccctttgggaattattaagtgaaagttggcccacagttgggtgatgatgatgatgattgatttgagtttggtgatgataattagggctaaacaaaacatggtttagaatattggaattggaattattggattgatgatgattgaattgaaattgactcaattgaccattgatggggtagctttgactattttgaaaccctaattgttgagtaatttggttattggaatagggaatagaagaatttggtgactcaaaagaaaataaacccattttgaagaagaaaagaaaaaattaagaaaaaacaaattttggtgtgaggaaattattgagtgtaaatatgtctttatataatagtaagagtgagttcaaataaagactttttttttccactcaaaaaagagctatcttggcacttagatttcattagagaaaagaggagcaaataataaataatataaaggttaatttttttatttttttttcaaagaataaatctaccttttttggccatttaaagtaagaaataatgattatatattcaattaggtattaatgtttttgtatattatgttattatatatagtaaaaatttatatgacgtatcctcattataaatataaattgctggcatgtacaaaatttattataattaatttccttatatttatgaaaaaacggtatacatgtgtgtgtagagataatatcaaagtttatatagaaatgaaaattggctaaaaagtttaattaccatttatcactaatgacagctttttaatttaccaaaaatgattggtttttggattttataacaaaaattaatttaattaggtaaagttattttgcaaacgtttttttttttgtatggtaaaatccaacgcacggccaatgttttttttaccaaaattaggttaacataattgaggttcaaagaatccatatccaatatcatttaatatattgctaataataaaataatatatgagaatattaattttgtgattatcttccttacatagccatgaatgtttctagtgttaaaatatcaatttatatatgtttatttatttttaagtatattataaaaactgcaggggtcaacaataaaacattataaataataatgtattaataacataggatgtttctacaatacacctcattaaaataggtgtcctgtttttagtctaaataactatcaatgcatgtttcattaggggttgcgatgtagttttcgcggttttttagtttcgtggtgcgggttcggtttagaaaattgaaaaaaccgcacgtgcggattggtttaaaacaatgatcaaaaattacactacccgcaccgcgaacacccctaaattatatatacagttttaatcatatattctcttacttaaatatattaattattaatgtattttaatagtagcatttattttttagaggaaattacactctataccctttttatattgtcctcttttatttttaccttcttttttaaaatctatcatttttacctctttt

SEQ ID NO: 378510 - DNA, 1880 bp, Cannabis indica
gagagagagagagagagcatttgttggaaacccttatctcttggttaacatgatctagacctatggcaggacatgggcggccatacgttgggccatgcaaaaattctggaatatattcgaagacaggaaccttgacttgatctcaaattaattgcaatgtttttgcatttgcattacatattatacattgcagatccctattattattattattatggccatgctaatacgtatccacaatgctctatatatatagaagaagaagcacctcggtcttatagcatgtcattaataatatatatatatatacgtgtgtgttagtttgaggataatcatcatgagaaagaaaaggttcgtcctacatgaggattaagagcctttttgtttgtagccaaggatgacttgcctgcagcctctacaaggactcaaatcaagtcattattatgcctgcatcgatcattattaatgatattactatgtatataacagagaagtgaatccttgtgtggtattcgggcagtctccttggctaccaagacaggctcttatctctcatgctggacctcttttcttccaaaactcttcttctctattcccaggccgggactattctcatcgtcaaggaaaaaaaaaatgtatgtaacactaataacttactaattaattaatgtccttccttaattttgttggtttatcgttactctcgatcatttacctagctacagtaatccatttaagatatacgattgtgactttggtcatcacggacaccagtgcatgaaaatgcactttattattgttttactggtttaatgtgattaatttccatgctctttattagcatcctcatcatctccaaccatatactatcataattcttttttttttttttcattccaacaacaatagaacaatctattttttgtttattattgtattatacccaagaatatataatacgataataattactaaacttataaacacatgctgcctaattttccgtgacattgaaggagatttcagcagcatgttggtggttggttggagaagcttttactaacgcttgtgaggctgtcattatagtgaaagaaagaaagattagatatattattatcaattgtctgcgtctttatcttaatttgagtcaaaatcatttacaattcgaacaaaagaatgaagattaatgtactttaacttataatagggtgtgtgatgtagtgtaaattaagcactgtcttcaattctctgcaatgcatgtctacgcttgaatcttttacgaatccttcaatcaaacatgtaattatatagtacttgcagtaactaaagaattagctaaatacataatagctaaaagttaaaaatatgtcaaaaaacacatatgatagattatcttattataacttaaaaaaatttaagtgcttagctagatgtctgtaactctttttaatggtgttttgtttagttgatttttgagtgcacaaataataattataagtattgttaaaattagacctcactgtaacctttattattacagttttacagatgaagtgaaaattacaaataaaagcaaacagaatacaacagaccatcagatcctaggtggcttcgcctctagtgaatcaagaactagttgttagttacaaccgaagttgtaactaactcctagttctgtgatcaaccctagaactacaactataaaaggaacagaagagaagaaatgaaaatataccagatgcaaaaagccctaggttaccagatctgaaaaagttcttcagctccagatgtttttcaagtacatgcacaagaaacagaaaagtgttagtgtgagaaaccagaaaaacaagagagaaaaaaaaacagaaaacacaagagag

SEQ ID NO: 378511 - DNA, 1622 bp, Cannabis indica
atattgttcttgggtgaagattgctcatacattacatctgctaagaattttagtgggtgtagagggaattgcataatctatagtgattcagagttcaaagtttacaacttggatgaccggaggtttgtaccgatgaatcaacagccggaatacattaacatcttcaatccatttcagcctccttctctgccacactatggacacaactatggttagtttaattaggctcttttgttgctttattgctaagtagacttagtgagtttgtattaatcttccaaatgggttattgttggattaatctaatgtattggaggatttagttgttcttactatgtttagatttgatgtgttttatgtcaaagacaatgttcaaaatgattgacaagttcaatttttcatgtgtttactctatctaagattagctattttagatgctgaaaagggaattgtttgatgaaattattggagacaagagagtaacattatatagaaacaaaacaacaacaacagcaatagaaggagaagatttttacaaacttgttttggataacatcaaaagctgaatttccttagtccaagaggggtagttcaaatgctcagtcagttcgtggttttgctcccacgaagaccgagcttcgagtccctttcaaacatctaacatcaaatgctcagtaagtaaacttgagctactgaacatcaagtgctcagaagctgaagttcacccttaaaaatagattactatcttaagggtaatttgaggccaaattcccttatattttcatttttataaagttaaccccatcattcttgttttgggtggtaattaaatatttgccaatttcgtttcatgtgcacctatattgttggagttgattaagagagttgaggaagaggaccctttgtatgtatgtctcttgcagaagtgctttagggtccttgttggagatttttcttacttcaaattacaatgttggtgaattgattgggggtacaacatcttttcccttttgtcagtaaatatatgaatgttgtgtaagaaaaatagaacaacctatttgcaagaaagtgataagaaccaaacacaacaccaattaatcgaaaccagatcagagaatgaacaacaagaaaccagaaacaaaactcgaacataaaagcataaattgaactcaagaacttacgtggttgggcaacacaatcaatggagtctttgctcatcgcataaacctctcttgagatctctcaatcaaacacacgagagtatctttcacaaccctctaaccctcaatctctcttctgtttttccttctagctaaaggcctaactaacaaaactattagtagccgttaagttggttggggacaaaactgttaaagaaactgttggtaactgagtggttcaaggggtcaaacctcaacagtagaaatagtactattgttatcagccaaaagtttagagcttgaagatcttgacttgatgctatatggaagtgagaaggctattagttcctcttataactatatattttggcttatttgaaatcttcccttcgaagttccctatggttttatccttttttgttgctacgtgttaaagagtcctacattgataatgtgtagaaa

SEQ ID NO: 378512 - DNA, 2493 bp, Cannabis indica
ggttcttcttattcttcttcttcaggacctcccgctcgggagtaagatccttagctacttggtcattttcttatagctctacaaatggataaagtcaatactcgaggaggtttttagtggtagtcaggagagagatgttctgagcagataccgaaagttgaagaattgtctatgctcttgaccttaaccccaaactgaatggggaggactgtaagatggagccaactaaattgaaagatggtcaatattcatctcattgagaatgtaatagtcatggaggaagctaccaatcttcgaaatgtctttgtgcattgtaccacttaaccattgatattcattttgagaaaaatagaagtagcctatcttgttctattttgggcttgacttcaaatcaaagagccaattagtgtcgtgggcataaggctggccccatccttgtggggcatacaatatgaatggtgcggccaagtatttgatgcctttcgaggtgaattgggtcaggaaaatcttataatagttcacaatcttcctaaagtacggatgcaaagttaagatcaccccttgctcagcatgaggtccgaaccatgcacaaagtccctctctagggtttgtagctagttgtccaagattaggtagaaaagcttccactccgctaagaaggcatttgtcataaagggtctttaaactcttgtacataaggttggataggggagacccaaagagaaacctctctctccctagtcctcataggaagggcctcttcatactcctctttaacatagtcttggtccagaaccaagacacctctggacacagacacaagctctctaactttattgtagcctccaaaagaaagagcctaatgagcttctttctcatcttctgatacctcatctccatcgctgagaggaggagtggctgcacagaccttggcctgatcctcaacctcttagattttaatgtccctagctgttgttttagtatccaccttaggaggttcttttcattcgacaatggccatcacaaagagccgagaaaagtatgggtccttatctaaacctttcttataggtttgcttggttttaaccattactttatgcttgggaggcaggtttggttcaaaggtatgcctcgcaacaatgacagtaatttttgctagtttggagtgtttcttcaaaggctctggatgaccttctagcaatgtgtcaagcacgttagcccagaccttataagtccaagtagagggtaggtaatgcctccaaaacatttgttcaattcccaaatgaactagatgtatccttctctgcttatttggacaaggtaatgatgatgttgtaccacaaccttgggagattccaacgagtcactcataacctctcactcatcaaagctcaaagtggatgagttttcactcattgaagatgagtctacacggagcctaggctgggtctcgtaaagaagacgaagaaggtcactatcaatccagtggttaccttcctagtattcaccagggttcatctacaaaaaaaggaagataaagaggtaagaactagatagaagtacacatttttttgaaaaggaaaaacaagtttaatatgctgacttggccaatgtaaaagaaaaaaggaagaaagttcattccaattgttgtctagatttttgtaagcttgatgcgtggactctaaccaaggaagcctagatgataatcagctagttacatccttcgaccctaactcctgcaaggggctgcctaagctcccacaaagggcttctacgaaggatacttccatgtaaggcaaggacatgaggagcatccgcgatccgtgatatctccaagtcccgagagctaaagctaaattccctacgaaggctaagggcttcatcgaatacacctatgcgggtcatgaaagaactcaaaatgagttgtatccccattcagtgttgtgggagggctccatccgtacctgttaggttacagacatgagagctgtgctttttcaagcacgatgcccagttttgttccccacgccaggtcacagtacagagcacaccaatttgtacctacccaagtgatccaacagtcattgataagggcaattcaaaaagggaagaccctagggaaacatgtatgagatgtttggacagtacgtgctgacacctctaaacaccatgtgatgaatcggccacctacaaaatcagcggtcaaatttcttctaataggatttgcccaacaagcacgagaaaggggatatcacatataaatacccctaaatttcacaagataaagggcaactctttggagtttaagaaaccatattttacttataaaaactctactaaaattcctattgagcttcttattcctcaagaggaatgagagaaatacagagttccagtccataatgtaactacttgtaatattcatcacctgccaatatggctaataaaatggactcgtggactaaggattgttaatgcctgaaccacgtaaaa

SEQ ID NO: 378513 - DNA, 2635 bp, Cannabis indica
gccttagcattagggcgttaaaaacacccaagccaaagatgctctatttgagtgtcaaaaaatgttacaaaataaacctttaaaccaggagttgtagttaatggaatgtgaagccacgactaaatatgctttcacttataaagcatagtgctctttcatgcagcaaaagtctaaggttaattggatcatagaaggagatgtaaactcttcctctttcatttaagtatccgagaaagaagagcatagaactagatttattcgattaaaaacactccaagagttagaatcgaaaaagccaaaagtagtaactaatgtattcgtgaattactacaagcacttattaagaacttgactggaaggaaggagataagtattacgagccatagtcaagaaaggctagttgctatctgaacagcaggcaaacattcctatggttgtgtacactaaagaagatattaacaagcaatgcttaatattctagggattaaagtgcaagggttggatgggtatactagttccttctttcaagataattgagacctaattgaagataatatttgtgaagtaatttaatcttgtatgcactcgagacatctccacaaggaaataaactctacaatcttaacacttattccaaaaactaagtgtccaaatactttaagtggcttccatcttcttgtatgttgttatgtgatttataaagtggccacaaagctcatatgttctcgactgtagcatattttacctgagctagttgcacagaaccaaggaggtttcataaaaggaaagtttataactcacaatataatgatctgacctagtgagacactatggtataaaatcatcaaagtctaattgcatgatcaagcttgacctttaaaaggtatctgataccatagagtggggattcattgaagagatattgcaagaactcaactttgcaacaaagttcatcaatttaataataacttgtgtgctaacactaagattatcgattatgtttaatggatcaatgcatggtttttttaggccaagcggggcttgagacaaggagatcccatatcgcctctactctttgtgtatcttaccagaatattgcaatagataagccttaaagatgactttggttaccatgaaagatgtgaagacttaagattgaatcacctaagccttactgataatgtgctcctattttgtaaaggttactttaaaattatctattatatgttacaaggccttaaattattctcaaacacctctagtttgcagcctaataaaacaaagtcaacagtcaattgtagtgcaatggatgaaagggaaattcaaagaataattgctgtgtctagttttagcaggagtgaagtaccttttaagtacatttgtattcctatatgcacgaagagaattttagcaacaaaatgtaaagttcttgctgagaaaatgactgcctgagtgagagcttagagtaccaaaaacctttcatttgctggctaagtggtattagttaatttggttcctctcgcgatacattcttattggagccaaattatgctatttataaagaagaccattgcaataatagagattatatgtcaagctttcttatggaaaggccaagcaacagtcttggatccatgagtagttgcatggaacacactgtgtaagttaaaaacaactagggagatttgctttagtgtcattttaaactggaatgcttaaatgggtaaatattatcaacttacaagatgaagattggtgaaaatacaaggctaatgctcaaagtacttggtattgaaggaaaattgtcgagatcaaaaacaaggttagtcaacttacagatccaaagtatcgaactgcaaatggtgacaagatactttgtccagctcaagataaggtaagatggtgcaaagaattttggtgtagatatagtacacttaaaataatattttgttatgtggattgctattcaaaataggttaaaaatcaaacaaaggctacatcggttcaatataattgataactccacatgtttattgtgtggaacacatgaggaaacggttcaacacctcttttttgagtgtgatttcactcttgaatgtttggacctagtgaagagctggctaaagtggaaagcttgtataagctcgttacacaggctgcttagacggattgagaaagcaaaaataggagtgtttaagaagtaggttttttgagtagctttaacatgtttagtttaccatgtttggcgactctgcaatgaaaagctttagatgtcaacagattagaagtcagattgattagtatataacgttaaaggagttaccaaggatagaataacttgtgtaatggttaaaatgataaccgagaaagagttagattggtttgagatattgtaaaaaaaaaggaaatcataacaggttgatttggaatgtatggggatgagttatataattgtataatgatttgaggtttgttgacaagttctcattagtttgtaaaaattattttttagagtaattaatattcagtttgttcataaaaaaattataatttatcacaactaaatatatttttagttgcaacaaattttgtgtatgtatttttttagttacaacaaatcaatggatagtactta

SEQ ID NO: 378514 - DNA, 2106 bp, Cannabis indica
ttatttagaccctaattaaacaaatatgtatatttttcaaaaaatatttttttctttatttggccctaagcgcgggctaaggcttaacccgccttaacttagggtcggccctagtgttagaagacacttattagcactacgatgaagttagttagcgattttttataatatttgttaaagtaaaacaagtaagatttgatattgagttgcactaataaggatattacttcaaaagtgctagacaccaaaaataccttttactatttctcaaatatgacaaagagtttgtccttgcatgtcattttcccactttccttccttgtatttcccttataaaaaccacccaagccctcactttctttccctccaaatcaacaaacacaacatatttttctcattatcactttcctcatctcctcttccacaatcaaaatcccttgtatcacaattaatacacatatatttccaaacaataaccacaatacataacacacaatctctacatacaatacacatattgatatatacatacaataccatgtccatatccatgtgtagctccgattccaaagtgaccgttggtgtttcaatggcaccacccacagtccccaaattcaatggccgaccagttctccaacctacttgcaaccgagttcccaccctcgaaaggcgtaactcagtcaagaaaatcactactactactactccatcatctctcaccttaccacctccatcaccaaattatttctcttcttcatctcttaccagtccaagaattaatactactaatagtaataatactcttaaacccgtggctaaccataactccttgactccaccaatttctcccaagtcaaaatctccaagaccaacggctattaagcgctgcaacgacctaaacacgagctcagacaaggttgtcatccctggaagcgtcggcaaagcttccgcggctaaggttttggagagaaagaaatcgaaaagcttcaaaattgttagtaatggcggaaacggtgatgttttcaattgttctaataattctccaccttctttggctgagtcttctttgagttactcgtcgtctttgatcaccgattcccccgggagtatcgccgccgggagaagagaacagatggctcttcaacatgctcagagaaaaatgaagatcgcccattatggaagatctaagtctgcaaaatttgaacgaaacttgatcgattcaaatcctttggattcaactgttaacaaaaccaatgatgaaagaaaaaagatgcagtttcatcactgctaattcaggtatataaataataggggaattattctatatagtatttttttagttttttttttaaatttaggatttggggttttaaaggaatttttccggtagtttttacgtgggttgctatacaattttttgttacgatttaaattgcagcgttaattacaataagaatttttacttcgtaatcaagactctgtttttttatataaatttgcagtttcattatgcttaattaattatttcttgatcagatcccatatacgttgcttatcatgatgaagaatggggagtcccagttcatgatgacaagtaagctttaccaattttcttactctattgttctttaatttattttctaatatagaataaatttgatgttttttgattattattattattacaggatgttgtttgaactggttgttctaagtggagcccaagttgggtcagattggacttcaatattgaaaaaacgtgaagaattcaggaatgcattttcagggttcgatgcagagagtattgccactcttactgataagcaaatggcctccatatgttctcaatatgggattgatattagccgtgttcgtggagttgtcgacaactctaatcgaattctagaggtatactattactatacactactaaaataaatatgggtttttcttatttttatactttaaattagttttaagtagaatctctatagcaattaatggagtaaactaaatcgcaatcaaaatccatatagcaactcacttattaactacaagagaaactacttgaaaaacccaaaccataaatttaaagaagaaaaaaaa

SEQ ID NO: 378515 - DNA, 2002 bp, Cannabis indica
agttcaattactaagaagaatggatggggatcagagggagatttccctccccttaaaacaaaccaacaagattgccagaaaatttgactctttttgctaaaccatccacacaaaaacagttacaacgcttaacaaagaaaaaattacaaagactaaagctattataaggtctaaaatagaaaaagatagatctaaaagttgccaattaggaatacgcctcctctattctaaagcttggactgccactttagaatctgagattacaagaatcttatcccaattgttatgagccacccaagtaagagccaattgaatggtctttctctcagcctctaggggggttgaagcagtaatatgctgcagattaaaggcctaaaaactatctctcaggtcgattttaactgctgcaatacctactgcatctctcgaccacaaagcatccttcatttctgtcatagtcaatgtgtcatttccttacaaaatcgtgtctgaaaaatgttcatacatcttgagcaaggagctgagctatataatttcttggtcttcatcatcaatcctcactctaagataattaagataatggaagatcttgttaaagtcatctaaatgtttcctcaattttctgttttcatccaatcgatgtgtccacgatttcttcttgagatacaacttatttgcaagatatttcttcatgtagattaatgatataacttgttccatagcccaagacctttttcctcatttgtaacctcccacaacatttcttttatgaggctaagaagaatggaattatgtgcctttgcatcaatatcaaatttattctttctatctttaatgagattcattgattcaacatctagagcatttgagataccttaatgaaccagaaaagcattcaacttgagcctccataaactaaaattattggaggcgccattgaacttgtccaccttaaatttggttgtagccatttcagacttggttcgtgaatgattaaatgtggttcttgaaggtttgtatttagatcttgaaaccttttcttagagcctgtagctctgataccatttgtagtaaaattaattcactcgaacaaagctgttatgaacaataacagcaacaagaaccaactaaatcgaataacaataacagttatttaccgagattttgggaaactaaatatttagaactaaagaaagaagtgaaataataaataacagacacgaatggttgaagtgtgcatgtatcaagaatttcttgaggtgattttctcttacaaatgaaatcaatcaagaaatacaactatgtgtgaaatatgaatggttgcctatggtgtgtgcatcatgcaagatgttggtcatcgtactaaagagtgtcgtaagaagaaagagctgaagaaaaagtgggttgtcaagacccaagaaaccatcaaacaatccttggtggaagtgcataatcaaatggataatgaaggtttccaagtggtaaaataaggtggtaagaggccacttattgctgaggctctagctattattgtcattaatagtttccaatcattagagattgttggcgaatgctcaaaaattatggaaaaaggaaatatgaagaaaggagggggagtctcctactgcaattggataaggtgatgtcttggcatgtctaagggatcaacagtttccaaaaacaaaaagaggtcaagcaattaatttccaaacacaaggtggatctggttggtcttctcgagacaaaaacaaagattgatagtttaggggttgtatatgtaaacatgtctgatggttggtattttttgtcaaataatttgtgccacaaagggggtagaattatcataagttggaattctttgatgtttttagtagatatcaaggaatgctcatgtatgtgacagtcagtagtcccgtgatccgtaaggggaaataccgggtaagctgtgcaatcccacatcgcctggggaaggtcaagtgggatgattctgagactgtgtagg

SEQ ID NO: 378516 - DNA, 3295 bp, Cannabis indica
ggtagcacccactttcttaaaaactctagctagggcctagttatgggaaactgactcccaagcatgatccataattaggatactccacgcgtccatggtccaccaagcctcaaaacgaaagggcctttgcactctagactcaggattcacaatactaaaacaaaggggtcactcatctaaatttcaagtgtagagcggctgaaccaccgctttagaaaaagccattaaccaactttcattaactaaagccttgtcgagtgctgacttaacatgagacggaccatctctatggttattccaagtcaggttgtcacattttatgggcatatctgtcaaagcatggccattaatgaattcagcaatgaaggggaggaactggtccttccctttggatcccacccgctcagagttactcaaaacaaaattcacatctccaaggatcaaccagggcccgccaaacttaaaaccaaggtccatatagttcaactacaactttttttttctcatgaaagtacggaggcccataaacacaagacaacaaccaagaattatgctaagggtaagaatacaaaatacctgaaatttggtttttcgatgtacataagaattcgaaaataaaatccaccttccaagcaagaattaaagcccccgcattacccacagtaggaacaacaatgttattataagaatataaattcttaagagtacgtaccaaattagtggattccacttttaattcggtatgaaaatatagttaggtgagcaagactgaatcaaagctttcaattccaaaactttagaggtctgccccaaccctctacagttccaaggaacgccaatcatggctcttgtggaggggatggaccatccacctccacaggggtaacgacagcatccggcacaccaacagtagattcctcatcctcaatcaatacaaaatcgtttgtcaggattgcaatgtccatcaaacgagccttggccttccacaccgtaagtctaattggctatcccaataaaatcaatttgtcaacctgctgggtattaacagtagtgatcttagcacacacattttctccatttcattgctagccatcggttcatccaaagttccatcagaaacacaatttaccttagcatctttaattgcaaacaccgggcctgttccacaaggaaaatctctgactactctcattactcttctaatggacaagcatagcttgttcccaagagaacaagttttaaaatccaaccttcgtttcttggtaggagttgttcgttcattaatttttgatgaagcttgggcgccaatgttaacacaaaaacttttcctcttattttggctagaagacccaaggttttcaaatttctagatgtaaccttcctatgcttgaaatttttttgatagtgatctcttctcatcaaggtggtctgaaacatcttggcccaagcaagagctacttgcatcacatttaaaaaatccaacatcaaaattagtttaagagcccaccactaactgctcatttatattcgacccaattaaaagaaagtttttaggaggcccattatccttacccatcacttggctattgcatggcacaagggccatctctccatcagcattaaacacatgattttcaaccatcaaaggcccactaaccaaagcaatagggttcgactatccattctaagaatttcattgacttttctccgtatacagctggcctcacccttatacacatttgaatgctcatcgaaaaacgacatatcctcataggtcttttcaaaacgcaaagaaaattttgaagagtagttacccaaaccatcgaacccatgagagatcttacacggcaaggccgactgtggcttgggaacccacaccaaactaccctttttccctgttcggcccgtagctttcacttgagttcccttcctcgagctgtgagtaggacgttctgaagttaccaagttcgagatcgaattccctcgcaccgacgctggagaagaagaccccaaggctatcaaactcatacatgcacccttggatcccttgccattctcggactagttattggaaatatcaagcttgcttgagaaacaacttgggtaagaagatgatcggttaagctagaaaccataaaaagggaacgggatacccttagtgtccaaaatagtgaccggcgagatgagagcgcaatcacctctcaggtgatccaactatccacaaaggtggcaaaagttccctattgattcatacttgatttgaacccagctatttttaccgtttaatagttcgaaaaaacacccacagatgaaaggattgttcaaatcaacatctatttgtactctgatcaatttatttcaagtaactattttagatttatccaattcaatacaaacaaccttacctgcctgagctcctaaaatattggcattagctctagagaacaagtcatgtggcagataatggatttggattcataaccgaatggtgtcaaaagaaagcttctttgtaccaaagccaaaagaccaagcaagaagcaccgagatctctccttcgatgcaccaagggccattatctaggacacatttcttgtctgccaccttttcgaaaccaaaacaaataatgtttgaagagtctcagccaaaaaacagtgtgtcaaccttcacttgaatcttccacaacttagtacaaaaggtttccacttccacatccatgaactctctgttagaaatcaccttactaataaggcaaaatttcaaaggtacctgaatgtttgcgtcactagagactaaagaaagaaaagcttaattcaatgagatacatctgcccctattaacttttggctgtgcaatgacaccttccataataacaactactaccaaaaaaaataccaaccaaaataacacgtgaacaacaacaagaaaagtacacacacaaaacaaaatacagcacccacaacgaagaagtaggaaaaacagtcaaaagaaaggaataaaacaaaggactcaaactaacccaactcactcaacctcacaggggacacaaactaacccatcatttatatattacctttattgaagcgtctataaatatatgtataaataaggctaattagaaattcccccccccccccaacccgaacattcacatgtactaaatcatgccccctgaactattaagattgttaaatttaaggacttttatctaattttagtaaaaaaattctaacatggatgaaagttcagggggcatgacttaatacatataaaagtttgaggggcatgatttggtaga

SEQ ID NO: 378517 - DNA, 5564 bp, Cannabis indica
aatgctcgaaaaatcccttgacaccacatgacatggtgacatcatctatggctaaccccatcaaaggaactatccaaccacctagatgactatctttggtatgatgcccggtgctacctgctccacaagacttaagcacctcaaggcatgaccctgaaaaagagaagtggacgtacctgttgagcccaagctcctggacttactattatgaagacgagataaatgagctccaccggaagaaccaaaggttggagactacagtggccgtcatacaaaaggtgttgagtggtatactcaaaggtaaaacctaagcctcgctctccaagtacaaaagaaaatgacaagagaggagtgaatcaatcatgcatgctagtggagggaacttcatgctctatactaatgatatctcttgagataggattagaaaatacatgtcacgagataggtgccctatgggtcagcagagacaaccaaagagctgacactcgcgtagaaggtcacattgaggggaacacctcgtgacctaaagaagaaacttcactcaaaaggtttcattctaggggacaactcgtgtaacggccccactttaagcctctattgggccttcccccacggactaatggctcttatatacgagtacataactctggctacttactggactaatgaatggccctacaaacaaacacgagtcttttcagcatgctttgtcctcactcgcacgctttgtgggaaaacttcttaggaggtcacccatcttgaaattaccccaggtcaagcacgcttgactgtggagttctttcatgatgggctaccagaaaacaagatgcaccttattgatataggtagtacaaatcaatccatttaagccctcttcaactgtgtagtcccttacctacacaatctcagaatcatcacacttaacctttcttaggcgatgtgggaatgtatagctaacctggtgtttccccttacggatcacaagactactgactgtcacacctcgcctatggctccctcctaagagggaagcaaatgaaaggccttatcccctaactttggtgtaaaatcaaacacaaatgggagaagagaagtacatcacgcagcccgcgtgtaaaccatgaagaggatcaaagccccacttgctaacctccaagcgaggatgaatgagttggaagtagattcaagacctacgccgaaagataattatcacaaaaggagacttggacgatgatgagaagtttgatgaagaatactttttctcaaaggagattcaagtagaaccacttccacccaacttcaagaagccatgaaggaaaccatatgatagtacaactaatctaaagtaccatcttagtgcttttaacaaggttttatgtgacgtttaaaacttatgggattaggcgggttatttatcaatgagcaaattacccctgaagtttaattaagtattctatttttttgtaagggaaaatttgccaagttttaataaaataagttttaaatgatttctttttctattatccttttctttttactattattattatgtttatagatattaagatagaattctatagagtttttatagacacagagcaaaacacaaaccctttctctctcaacttctttctctttctcgactcaagaaaaaccataaggaaaccacatcttttctatccaattcttgcaaaatagtcaaatctaggagttgtgcaaggttagggtaagatctctttatcttttgtgatattaatgacttaaagttagggttttataaggaattttggtgattttgggtcaggggtattttggtttgtttaggaactatttctagggtttatttagcttagaattaagtttgagtggttgttgttttgctactggttgtgctgaagcttcaagcttcaagcttgagtttttgaaactcgaagcttgagctttaatggtgattttgtgaattttatgtaattctatgttctaattattgggtaagtttaatttgagtgcttgaactgttctggaagtgttgaaattggttggagcaggtttgggacaaaattgagtttaaattttgcctactagtgcaatctagtcaaccggatgggatctgggtacttggaacctgtgaatctgtttacccgaatagggtttcaacgacaggaatgaggccaattttaggtgcctcaatttttgtattttctcgatgtttaggctatctccacactatttattgataggaaaatttttaatttgagtttaggtcctagaacgggttataaggagttatttactaatttatcgcttttggaatcatttttttaatgttagtatacttaattgttgagagattttactagagctataaatatgagccatagtttttgacatgacatgaaatctgcacgagcttgatcaagcatgagcccgatcaaacacaaaatggtatgggcttagacacgacacattacaatctactaattaacgcaccacggcatgatgctataaataggcacgacacgaaatgatgctacaaattggcaccacatgacacaaaaaatatgtgcttaagtaagacatggcacgacaatccctaaaggcacgacgcatatgcacaaataaattagcacgaaaacacgacacgttgaaaaatcttatactttgatgatgatgatgataatgacgacgacgatgatgatgatggtaaatatttatcaattataaaaaaattaaaatgataataaaatataaatataataacaaataatataattctatacttaaaactattgaaaaatgtaaatctaaaactaaatatattaatttatttgtaaagtcttagcgtatgacttaacatttgagtatttattattaaatattcaaattcttattatttatttttatgatttttgtaaactattattgaaaaattatatataaatgtatatatttgctaactaattatataaataattgatgttacaaaaaatatatattttagtaataattcataaatgtgaaaaaattgtggaaaagtaaagcacgagtttgagccaatataagaaaacgagttgacctgattaagaaaaacagttcgacatgtgtaaatcacagcacaactcatactttgacccgatgttgaacactaaattgactccagctaagactaggaccctgacccttatagccctcagcttggaccctggacctggacccagttctaaaccacagacccccgtccccccgcctagactctatgccagatcccaacctccaactcaaacttgaaccccgaccccaacccagacccaaacccaaaccctagtcctgacccaaacctaagccctcgaccccagccaagactagatgggccaaaccctaaaccccggacacgaacaccaaaccccaccccccgtatcccggtccgaactcagaccccagctcaacctcgacatagacttcggactcgaggcctctggcccactttctctcacttcacttaaataaaaattaaaacaaaaaacaaaaataataaagcaaattacaaaacacatttttatttttattttgttttaaaataaagtaaacacataaatatgaaacacatttttgtttttcaaggacaaaaattttatttttatttttgagatttaaaaaatcaaaaaataaaaatattaccgaacaccctaaatttatcaagaaagaaaaatattaacatgctcttaataagtctagttaaattaattaatggaaagataagacatggaatacatataaattttaaaacatgtagaccaatgttgaatgattttatcaaaaacttactttgagccaatttctttgccctcctcaatttcaaacatacacatgtggatatgaagatgattagacccacaaaccccacagcagacacaacaataataataacaattgttctagctgatgtgttactcttactatccctttctgcaaaattaaaaaattgatcacataagtttcatgtgtaatctctcataaacataacatatatattgtacttaacaagaatcactacaagaaatgaaactttatcttttatatgctgataaaagttaagtattattctaatgcgctggcaaaagtgatatttgttgtagtgaacaccaaaataaatcgtatatgaaaagcataccagaataaaatggtggagaaggagatggcgctggttgttgtgatgggggtagggatggtgttagaatttcaaccgcagtagaattatagaaaaggtaatcctcatatctaaatctacaattggttcccaatacttgtccaccttttttcccatcgcaacaaccaggaattttttcaaatgcaacctccaaacaattgttgcagtcctcctgggacaggtcaggtgtacactgcacaagtccatatatggttctaaatcttggagctgtagcatttgctgcagcaaattttcgaaaagaaccaccagccgcgcctcgtctcttcagatgttctaacaatccattaagaatttgaaaatattcaaccacaatatcagaaggcacgtcttccgtattatgataaattatgtttggcttagtttccatgacaccaaacaaagagcggtttgagtagcgcaacatacaatcgtcgtaccataagagtgtctccttttgattagggcaacgctgtgggagaatatatgtagagtcattaatacatttcaggcacacatcgggcaaggtgtcgccgttgcatagtccgattgcgtaaacttggttggatgagttgccgtaggagagattgtaaaagccgaagccgttgttgttttcggggttaggaaggtttgagaggaggtgattaaggttatcatggtatgtagagttgagagtgtagttacctttctctttaacacattcgacactttgagtagttgctttttgaggtacgagaatgagtattgaacaaaggaggagaggaaaagctagtggtgtcttcttagccatatagatcgtaggtagatataaatggtgtatagtttatattgttttattatgtttaataaggtgattcaatgtctaaattagatgaaggttgtacccaacttaagttaaagtttaattctagctctttacgtatggtacacgatcgatcaaatggctaatatggatggactacttttattagagatatcaacgcgggagtcagagtcagagcctatgatcgtgtatggatataccatgttgaatagccaacgactatttattataatggaacttgtcaaagaagaataataattacataatgaaacgaagttgtcttcgtccatggatctctacttcatttatggatcgattgccctttttttctttctcttttatatatgaacaagtgaaataatgcagaacttgtcccatgctatctttttcgttttgaaaaatgctaaaatggctatccacgtggattgaaaaataagtatacaagtccacaatgagtaattcccacttaaactctttaccttttaatttttatacacttaggtgtcgtttggtaacacttttatttttttaattttt

SEQ ID NO: 378518 - DNA, 3506 bp, Cannabis indica
ctagcacaccatactaatcctaatgcctaacataaataaagtagctttgagatacatttataaatggtagaacaacatgcagtagattgacagtcaatagtcttagtaggagaatctacctagtagtcttactgaactcagctaggatacttcctgttttgaagaaaagaagaatagccttgctcacctccattcctattttagatcacatttctttgaaaaattcaaagccaaacccatctggaatgggcttttagtacttggaatactaaaacgaataggtctaatctctatgtaagtgaaaggtttgatcaagaagagcaactgctgttcaaaagatagcttagtgccgagagccaagcaggacagattgagtttaacattagttgtacttttattacccatgaagcttcaaaagtgagttacaaagtgatccaccacttcagagtaattgtcaataacttaaccatgttcattcataaagctagcaatcatattttcttctcttctcttcttgatactaacaaagaaataggcagagttgtcatcacctttttgcagccaattgatcttgcttcattgaataaaaagtctctgaaacattctaacttgagtactaaagttagtaacagcatcgacctatgcttttttgaaggacaagtctctcgaatttgcttgagtctaaagcttagcaacttgatataagtctttggctgttggtaattaatctccacatcctgagaaaaattgtctttaaacttgtaccaccaacaggttttgcccaactatccaacacaatctttttgaaatccttgtggtctatccagaagttaaaaacctaaaaggttttatcccaatatctgcaatacagtagaagtaatgatacaagaacggtgatcaaaaacaatttcccattaaagataagcagtagaagtaggaaacgtattcaatcaagcttcgttcttaaaagcatgatctatcctagaatagattctatcaattccaacctgattgttggtccaagtataatgagatccacttttgttcagtaagtccaccaaccccaagttaatccagttgttaacatcctcaagctcattcttagaaaccaagttttccccaatcctatcctcatagtgaaagataacattgaagtctcctaagattatccaaagttttatagggaacttaagcttagttaaatcatcccaaagaatcttcctctcaacaagagaattcgagccatagacaaaagtaacacagtcagcttcattgtgactaaccattttaacataacagtgcacatattgagaagatttagccaaaacaatcactatcacaaaggttttcctccatataagaattattcttccttctatagttggactagagtagtgattccaactaagaaatctagttgaaatcatttaccctattttatttcatttaattttaatttctggtaaggcaccaaccccaatattccttattctacacaaatccaatccagcttcttgtttattactactattcgaaactctaacattccaacttagaatattacaactttccatatcaaaaaatggagagagaattaccagctttatccccaccaagctattgttgtaaagtctcaaccgtattcttagtattatgttcaatctctgccttattccttgggtcaagataagctctctagtcttgtctttttgtgctcaattctttttaaggtttgccactggtcagtctctttccctttctcagtccagtcttaattcgagctacaactttagaaggatcccctccttgttcagcattaggaatattcaagctatcagcctaaagcttgtcccctgtattcacatcaataatatatagcttttcacctttcctagagtctattgcaccatgtccaaacccgttgcaggatttgcacttaattggtaaccactcatagtccactccctgctcaacaagttgtccatgttcattaagaaaatgaataattattggaggagtatctgtaatattcatttcccaagcactctagaaaatttaaccattaatctctccttagtgacctaattaaccataagcggtttgcctattgtactcacaagagaattcaagcacttattgccctaataatgcagtcctagatcatctaatcaaatccataatggcattaatttaaccaaatgaatcacatccaaatcagtagtccatggcgggactatgacatgttttcgatcaaactgaatcacaccattctcaagcatatgatgtctagtcgcatcatcattgaacttcacaattgtaaattccccattcctccaaacaatttgtgaaatccctaagttcccaagacacacttgaggaatccctcaaaaatagcaatagagggattagcccctgacagcaaaattgaaatttgctacttaaattttgacttactctcatcaacttgagctattttcttcccatctttaatgatcagagttgtgtacaacattttagcatctatattcaaatgcttacctgctataaattgcttccaattttgttgcaaattagtctggtagtctccatgttcaacctcttcaatctaggataaaggagtcgcacaaggttccttcaaactagaaccagtaacttccttattcaccgccatatctacactaataatatcctagcttgaatagccttcgatatcgaatcttgactattatcaccaacatcctcaccaggatcgtgatctccatcgcaatcttggattgaaggaggatctaaatctagaaatctagctagctttcgaaccaaacacacacgccatgtaaaattttttatagttttttattaggaaaatgttgtttatattttatagttttgggtaaacatttcagtctccaatttactccttataacatttctctatttaataaaacaggtagtgttgttttttacctcaaaagaaaaattaaaaaaaaaaaaaatcaatgtgattattcaagttcattttactttcattttaatcaaggtaagaaaaatgcaacttgcattacaaagtaacctatactcctctccaaattggcgaatttcatcaacaaaatagttttaattagtagtttttattaagaatcgtaatttgaagcagacattattattgtaatagtacattcatctgcacaaaagaactacttattacaggaaattgagttttcgtaccaatcataaatacatgttgctattgctatgataagattattggcataagttcattcttccctcgaagacgagaaaaactgcaaagcataagaaggatacaatttaagtgatgtttgctttgatgtaatataatgtaataaaaatagcgatagtataatggatgataatataatagaataacaattataatgagaatgatattatgatgtttcgtttaactctaatgaacattgtaatcaaataaaatatattaacaaaaatattcttagttttattatttt

SEQ ID NO: 378519 - DNA, 6059 bp, Cannabis indica
gtataattaaaagaattatttagtaaaaatagttaagaaaccgaaattttaatatggaatgtttattaagttgatattgaaatttccctattaaatgcataccttaagtgatatgattgtatcttgaatgtcaaggccagagtaaaagtacaaatcatgtaaaagtagcttaataaagtatgaagaaattgattttgttactaaaatttaaagacaatttgtaaaaactagatacgaaacaacaataaaaaaatttgaagtatttatttcagtcttaaaatgtaatactctaaccttacaaaaaaaaaacatatatatacacattagatattactctatcagaaagtttaagagggaaaaatagaaaacagtaatgacaccgctgataaacgtcaaaagaaccacagtaaatagctatcttcttattatctttctactattacaaccgtacatttgtcatgcaacttttacaggagggcacagcaaaattcctcgagaattaagaaatatcccattcaattaagatttaaatacaatcaaaatgttttatactaaagacaaggaacaaaatcaccttgatctacttctacaaagaaaaattaacaacgacccactaattaactgaattgaatgttcacacactgtgtccagaggaataggtatttggtaggaagtggttggtctcttttgtcaatgaatatcttcattgttcatgagaataccacaccaatcttcttagcaaagtcatcatcgccttcaccctcaccctcaccctcaccctcaccctcaccctcaccctcttcatagtattcctcttccaccttcccacgttctcaccatcaaactccccctcctcaccttgttcataatcatattctccatggtcttcagcttcaaactcctggtctattgtttcatcatagatcatcccatcttctacttcatcgttggcattaggggtttcggaagacaaaacattagagcccttatcttctattccaactacctcagcagttgtagacttggattctccttcattgcttagcacactatttccttgtttagaaacagcagacctagtccccttgaagtcaccttgattgcttttcctgttttctctctgattatcttcttcagtgacagaatttccacttctaaaggctgctgagtcagcccctcctctctttctcttcagaatctcactaagaggttttggtccttcaaatgagagatcttcagaatgctgagaagcctccatcctagtattcttacgctttccaaggtgtgattgctccttagtttctgtaacccgccctacctttaattctgacaaacgctttggaccactaaaatctatactttcatcatccatgtcatctctccttggccgcaaacccctgaaatttctatcttgattactgtaatcatcctgagctattccttttaatctgtccctaaaccttccatggttggtagagatttgaggcctgctgggagacaatctcccccgactcctactcctatcaaattctctgtcaaagggcaaatcaccactattggtagaagatcctccaggaagctttattctacctcgaaggcgacccccaagagcaccctcatgttgagatttttggtgtgaatctcttcttgaagaacctctataatttcggtcatcaacatgattgttgacagcatgatcatgactaatgacagatctcaaaccatcaactctcctgtgcttggataaccgatgtcttagatctgactcattaatgttatctggactatgagacttacgataaccccttctatcaaactgtgctggtccaactaacaatctctcagatgacaccctgtgttggtcccaagcatactgcccttgcatgtgatcataagagtcgtacccacgagaatcacgaagcctctctcgatcaatttcagcagctgcaccataatcagcagacttttccatatcatattcatccaccaagttcacgttccttccatcatgaccttgcccgaattgatcttcgccgtgaaaatattcaggatctctaagctcatcatcaacaagaacatcaaaaccaggagatgattccctcaagtactcgtccgcatccttaccattctgaaagctattatcatctgatacattaactatatgtgaacgactggacctacttgtcaaatttccattaataacaggagtattcactgtcttgaatctaagagacttatcatcaaatgccttgactgatggggcaaccctctcaaaactaactccgtttctagaaggagcattttcaacctttagagtattgttagcctttgttggtggtacaactaacttcgagctatttgcctgaggaatcctttgctcttgagtgcacttctgaaggccaccaaaagctttcttaacaattgatggctcagaaacaaatgtaggagctgaaggctgtgggactttcatactgtgtgtactatttggtccatgcaaaaagacacatttatctcctttgttgcaataacccttttggaaaaatatgcaggagacaggctgcttactagagttttgagtaccagcagcagctgatgccgctgcagcctgtgatgaggggggcccagatccaactgaaggtaccgacggtgctgcttgggtccccaatagaccatcaagaggctgaaagaacaccaaaaacagaaacggtaagcagaagtatttgaccatagagctattgaatgtaaaataaaaacttatatcacatagccagtggtcaattttaaaccaattaaaagatgaagtacaatgtaaaagaaaagtaggtttagtacaactaggggaagagagcttactggatgtcggaacgagcactttggattcaagcagttaccattcaaccaataccaacaatccctgggattgatccgagcatattcactatggcgatattcacattcacttccctggtgcaaagaaagaaagggaactgaattaacaacaaaaatatacaatgctaggtaagaatttaagtaaaatccttgaaggatagaacatgatccagtgtaggtgagaaggcacaaaatgaaaagggaaaaatactatagggttgttcaacaaaataatcatgaagtcgttatggttttcattttattcgggcaaaaatctgtttgatgaacaatagttttaaaacaaataacagactgctgctgctctgattcaaagaaaatagagatgatagaatcaaggaaactatcatatgcaactacaccaggtaaagtatagcaataacagcaacaatcaagaattacacgttcgttgttgcaatctagtgagttcaacaattacaacttgaattatttcctttcatcagaaatcaacataatactatcaataaaattaagaaaaatgtggtaattaaatttgaaaaacatgacattcaatcctacaagatataaatctaaaaaatataaggaaaaaaacttagttcctacagatcaaattatttattgtcacaaaaatctattgcaaaaatataatttacaatgatggtaattgtgtatttctattcttagttttctacctatggccggaaatcccaaacagttagattccagctaattcagaaaaaaaaaaaagattctccaaacagatgcaaattcaaagaagaaaagcctaagatttaaaggatacaacaaacaaaaccttgaagtacaataagaccataataaagaagtaaatgtactacctttttacatgtgagaggagaagcaagaaagtacacacagtcagtatttctcttcaatgcctcctcctcagcagaaataggcagttgctgttgttgtggtggctgagtttgcagcagttgttgcgactgttgctgcgtgcccgctaccatggcggttcgtctagtaaaatcttgaggagtggttgaggcttacccttgaattaatgaatcttttgaaggaagaaaaaatggatgcaaatccaatctcaaagctgccacagagatcacaaataatgtcagataagctgataattgtgctacaactatcaattattaataaactatctattttaaaatttaacgacaatcataattgaccataataatcacatcccatcatcatatgaatcagtaaaatcacaatgcaaaagagaacaaaaaagaaagaaattctagtctctgccctttaaaaaaaaagtaaaaacagtacctaatcagagtgaaaattagttaaaaccaaaagacctaagctcttcttatagagtgcagctaatacattctcatagataaataagccaaaatctatgtcagacaatcaataggacagaatcagttaacttgcccatataaacaatgacggtcaaagtagcttaagcccccaataaacctctcaaaaagttatctttccaacatcgtattataatgaccttacttaaaaatattccgccaatgaagttcccgatcgaagaaaacaaaagaggtaaattcaaggcatataaagaaaccaaaagaatcagggccatggcatagcaaatcttggaatatatgcataataattagaagaaaattacgaaggtaataccttgcaacagtatgcctgagtggaaaaataaaccctaggggagagagaatttaagtatagcagccgcttatcgaatctgtaaggagtaagaaaaaaaaaacatacatataaatatgtatacagataaatgaatatcaatataaagaaaagaacaaataaaagacagagaagatactcctgattcaatttaataaaatcctaaatcatgtatcacaaaattatacaaaatgaataacaactaataggtaattacagacccactagggtattcagatctggataagaaacacgtacatgcttacataaatcttaaaccagcaacagactaatattcctcaaaagacaaaagattacatttttttggctgaaaacaaaagttcaaacttaccattgtcatttaattttttttccataaaatttctcgggaaccagcagatcgaaatccaatccattaatatacagttatatatgttacgagaaaaagaaagcaaaccctaaatcctaaatcgaaatcgacgaagaataggggaagaagaagggtttggcgtccgtacctcttaagagtaagcgcgtagcctcacgcagagagaaaaataaaatggagtggaaaaagtggtggtgcttaaaaattgtcgcctatgagaagtggaagtgagtaaggtcaaatgagaataagacacgtgtagtctgtagatgacggagatttaagataaacggaggttgaatctaatgtccacatgatttgctcctatgtgttttattattcttgaggttcaagacttgaagttcaatttgggaaactagctaaatattaccgttttaaaacctttttttttctcgaaatgtaccgttttaaaacatgtagagactatttcacactatttattactatatattacattttgaatgttttttttttgagcaaaaacaattttgaatgtttaatctatattcctttttaagtattagaagaacatcacttcatatcatcatggtatatatagatattaatcttgttaaaattatttttattggtaattatattttgtgtatgttatatatttttttttgttgtatgatatattaatattattatttttaatgatattttatttttttatttagttatatgtaataatagtatataattttgttagtataatatatgcatttcaatgtaggtatttaattttattgacatgttacgcagggccggccctgaaaatatatgggcccaagacaaattaaattttggggccctcaaaaatatataaaaaaaaattaaaagaagagtgttatgggatttgaacccatgaccttggactttatgccatccacctcaaccaactaagctataaatatttattgtttataatacacttaaattttacttaaataaaagcctaataatttttttattttttttattttcgggcccccggaaagtgtgggccctaggcacgggcctagcc

SEQ ID NO: 378520 - DNA, 890 bp, Cannabis indica
tttttttgctttctcatttattctaaataatgaaaaacaccacttctttctgagtccttcctattatacaaagaagatcatatctatcctccctgcatacttttttataacccctacataatcaatcttttcctatttccatccttcttactaaactaaataaatcatgataaaagaaggacaacatgtgtctaccaatttatacatgtgtgggcatgataaaaattctaatgatattcttttggctgaaaaaaactcacgcacaacttacaatgaacgataatggtacaaatagagaaagagtaatgcgccataaaatgccatggacaaatatgtaaaccaaaaaaaaaaaaaccttttcgagtctaaattcttcttaaactaaaagtacagaaacgaaagtgggatggctataaaaagtggtcgatgaaaaactccatgatcgttacacatgctccacgagtttaattttgatttttatgttatagttagtggatgtttgtgccacaaaatgtaatgatgatcttagccatttgcttttaaagttctttcctttataatatctaaagtaataatttacttaagtttaacttgcagttgcaaataaatatttaagtttaattttttgccgtaataatacttaaattatatttatggaactcgataggtatctaacactcaaaatattatgtcattatccacgtgtcattttcttattgatatattttaattaatttttttaaaaggaataaaaatttaatgacttggaccaattaagaattaccatatggcaatttaattgcttaacaattaacagtcaggtacctacaaaagtttcagaattataactgtagaaaatagtgaatcgaattatgtgtgtatttcataga

SEQ ID NO: 378521 - DNA, 1640 bp, Cannabis indica
tttaatgcaaaattattatatattgtctttttcacccgaaacaaaaaccagccacatcgcctgactcttcagagtcgagatgggtccacagtgagagaccgaggagagtgtggtgggatatacaggccctacctacgctactgtttctcaacaaaacgacacccaatatgaattattgtccactttaattgtttgaatttgaacaaatgtaatgttttatattacaagtattcacgattactactcacttttctcttgatcttgtcgacaactctctaatttaagcttcgcaataatacattcctttaataacatagtcaccaccacaaatgcttcttagtcttacatacatatataagagtccatacgaatacaattatgttattataatacacaattgatccctttctcaaaaataataataataaaaaaaattgaacacaatatacaaatgaagaatatgaacacaattcccaatgctaaataattaattaataatgggtccatttttgagataacgtatgaagattatcacttattaagaaattaggataatgtccatatcaaattcaagactcaaactattaactactctcagatatgtataaactatgaacaaatcaatcaatctccgccagtgaacaattttgagacaacaacacaaatttcacaaagaccttttaactcacgattccttgcagtcaacggcgaattacgagttttctcgaagccagattggcaatcctcggctgagctggcggctacccgtgccatgtcagcaagctcaaagaaggtctccgagtttagatcattataagccatctcaagcgccgacaccgctttcttatagtcccggctacatctctggaggcgcgtgagaagcagcgattggttttgaccgcttccgccgccgccgccgcgctgggcgttcttggagaggctgacgatcagatcttgggtggagctggcattaaggtaggacatgccgaacacgacgaacgcgaggccgtagctgtcggcgcgtggcgttcgaggatcggcgtagagagactggacgcagaaggagtaattggaggtttggttgcagacaccggagaccaattcggtggggtgtagcacagtggtggtggtggtggagccacggccgttggaagcggaggagaatgagcgtgacttagtggttctacttgcaattgcagtggtggtcaataggagaaagaatactgctaacaaaaatgagagagaaaactgagttgtggtcatttttttctgttctattttttgttaggttggaaaagtttcggggtttattgatgagcttgtgaatgtggtgtggggttggacttcataaataggtgaatggcacgtgaactatatgtataggtgtatatatattaagtttagagtaatttgcggcaaaaccttcctaactattaatttaattgtaaaaaaccatcaaacctcatattttggtgggaaaatccttcaaagtactccgtttatattttaaggtgccgtctgtcaagtctcgttaagttttaatttcgcctacgtggtaatgacaggtcactaaaaattatcctatgtggccatattttacaaaataaaaataaaactttaagattaatttgcggcaaaac

SEQ ID NO: 378522 - DNA, 1413 bp, Cannabis indica
agagagagagagaaatgaataaaaaaataaacaaacaataaaactttaaagttttcctacaagtaaatcaaaaatttgcttctttaaaatgaagaagagtttaaaggagttaatggaagagaatgattcattaaatttttaatgatgatgctcttttaaaggagttgatgttaagaaatgattaagtcactaagttactattaacctataactaatttattatccagttatcctctaattaactaattatttcttttatttttgttatgggttgttctagaattgtgtgagtcatcacgtaatttattatatgaaatattctcttgttgtacaattgttcaatcatgagctcactctgtttaacggaacagtaacactcaataccaattgagttgagttttttttctctgcatttccctttttcatacttttcaaacttggtatcagagttgtacaacccacgcctcaacaaaatggcatctccaaatcaaaccccactcaaagacggtgcctctcgcacaactgcagaagaaaacaactcaactctccaaaacatcgttgttgttactccagctttgcaacagatccctgatcgtgcttctttttctaataccccctttggtaatactctaacacaaccttttgccttgaaatttgacataaataacttcactctgtagaagactatggttagcactataatcagatgacatcggcttctatccagtctaatacattcctacatgagctgttgcaagaggcaactcaccgagttttggagttacaatcaacccaaaatatgagcggtgggggtgtgtgatcaattgctcataggttggctctatggatccatgatagaaacaattgcaattgaagttatgggttgctccacctcaggtttatggagagccttagaaagtctctatggtgcacattccaagtcaactaggttgaaacttcaaactgtcaaaaaaggcttaatgagcatggtggattatctcaaaatgaggagatcttgagcagatatgctcgctttagctagtgagtcatttcctgtgatttctaacttagatagagagtatctttccattattgttcaaattcaaagggagcaaaacatgacatagcgagaacttcaagaaatactgcttagttttggcagtgcactcgagagactaggtggagtctcatctggatccaagagtaatactcctcttgttgcttgtttaagtggagccacggcaaaccttgcaaacaaaggttctcctcatccagggccagggagaaagccaaatcaccctcctcacaatcctagaaacagatccaactgttgggttttatgccctaaataaaactcatttcaatataatcagatttgtttattaatatagatcagaaataacatttaatgtt

SEQ ID NO: 378523 - DNA, 1772 bp, Cannabis indica
aagtaccaggtatgggccttcctcttacgggtcccaagtaaatgatttatcaattcagataagtcaggaggatttgtgattaaagaagggtgggcctggaacttatttgtgatctcccacccataaagactcatgaagactttctgtaactcagggtcattgatgggccatttaataggcacctcatcaggatagttatgaggcctttgagaggcacagacccacgaatggggtatttcaagagtttgggctaaagtaggcccagtatcagggattctgtcctccccagcatttgcaaagtctgggttaggtaggtccaagtaattgggcccaattggcaaagggactctctcatttccaaaatttcccgccactcgatcaatagacatcttctgagacgtcgtaccatccacaggaacacgatctctgtcgttcacagaggaagtggcgtgaaccatcctcgacaccatactgacagtctcagtaccttcctggcggccctttgtactgccctccccgtcggagtttagcttgccctgtcttctcttccaagacccttttctttcttttttccggctacctagagcattttccggtagctcaatcatataacgagagacccctttcccagccatagagaagcagttgcttcttcctgtatcgttcttgacccacgggccgtacatttggacagcattaccattttttggaatcaccatagccgttggtacatgacagatcctttccaaatgggcaagcttaccacaggtaaagcacaagaatggtaacttctcgtacttgaactgtatccatgattcctcccttccttcggctttcaaaaagaaaccaacaacaaaaggatgagttatccaaacatcaatccagcatcttagatatccacgtcgaactagttcgactttggattttccatccgtcttcacaaactgtcctgctttcttggcaatgatagcagtgttctcatccgataaacacctcgttgggagaccgtgaaactgaacccagaagcgagccacctcgaactccgccacacggacttcaccttctacaggccagggttttaggttaagaagcattccattaaccagccatggcctcttgtccataatgtaagagcaatcttcctctgtctcaaagaaaaatcctaaaactccctctccacattttttcatacgccagcttccaatattcctccagacccccatgagaattttttttactacagatgctggcatatccttgcatcccatgactttcccaacacaagccttgttgagaactacatcttccagggtgatatcttcaaatagctccagcatctccatctccatagcactatctctttcaagcagcttccccttctccatgtcgaccatatcaacaggcacatctatcgtagccgcacttcctttctccatcggtggaaaccaaaagccacaaaaacttagaagatcgaaaacaaaatagtagcagaatgcactcccaagccacaaaaacttagaagaacgaaaacaaaatagtagcataatgcactcccaaacgccaaagatatcagtgtttagcacccgcaactatgtcaataacagaccagaccctacttggggacattcttctcctatccattttgttatagtatttctagcaaagtaattgaatgcaagaattagaagaaaaaaaatagcagcttcgtccatatggtagataaggaggtcatgtagtaagtggtgataaacaacatgaagtccctcgtgtat

SEQ ID NO: 378524 - DNA, 3675 bp, Cannabis indica
aaggcttcggggctttatggctcgaagaattgcggcgattctcagactgtttggatgagccatggcgatgaggccgccaagctgcctgaagggtttgaggtggtggcccggagcaagcagggggtcgtggccgctattcagaatcagttgagaaggttttatggccttcagtatcatccggaggtaactatattcatttcgatttaggcttttatattctctatgatagattagaaatgtttggttgctttatcttttagtttcaaaatgtactgcctttattaaaaaagcaaaatggtactttttttttgttatgatgatagtggatttgcatcttgacaaagattctttgaagaaagcttctttttgggatgtgtggataatttggtattgggaaagtttctgaatgagcaatcgaatccaccatctagcaacagtgtttggtcatgtctaattacttttgtgttgtaattgaacttcaatactataatctgtgcttctgtgtaggagttttagtttgaaattatatgtcatggtctactttttgtgaaactatgtgatttgcgcaggtcacgcattcaccagaaggaatggaaacacttcgttactttctcttcgatgtttgtggagtcaaggctggctggaaaatggaaaatgtgttggatgaagagatcaaagtgattaatcagacagtggcacctgatgagcatgtaatatgtgccttatctggtggtgtcgattcgacagttgctgccactcttgttcacaaggcaattggggatagacttcattgtatttttgttgataatggtttgttgaggttagactaagaacagtttctttttgagggaccaataatgttagatatttcagtacttgtggtatggaattctatatttatgttctacatcttctttcttggatttcttctctgtaggtataaggaaagggaacgtgtaatggaaacctttgaaagggatcttcatttacctgttacttgtgtaaatgcaacggaacaatttcttagagaactaaaaggtgtggatgatccagagaagaaaagaaaaataattgggaaggaatttatatgtatctttgatgattttgcccaggagttagagcagaaattagggaaaagacctgcctacttggttcaaggaaccttataccctgatgtgattgaatcttgtccaccacctggatctggcagaagtcactctcacacaatcaagagtcatcacaatgttgggggacttccgaaggacatgaaattgaagctaattgaaccactcaagcttctgttcaaggatgaggtttgcttctacattgcaaccacatttaattctcattttcccttatactcaaatttgtaaactagtttactttttctgtttttgtataaaggttcgccggttaggaaagatattgaatgttccagaaggatttctgaagcgtcacccatttcctggacctggtcttgccgtacgtgtcattggggatgtcacgctggagaattacctagatacactccgcctggtatgttatgctgaccatgtgctaactatggctaggaaattcatatttttctgttttgttttaattgattgctttttttcctgtcaggttgatgagattttcatccagtcaatcaaggatgccgggctttatgatgtcatctggcaagcttttgctgtgtttttacctgtaagaactgttggtgttcaaggtgaccaaagaacacacggtcatgcagttgcccttagagctgttacaagtgaagacggaatgacagcagactggtaagccttcagttgtccattatacatgatgcttgctgtgtagctttctatccattttcctttttggtgaaaaagaaatgtagatatagtcggctgcaattgctcttatgtaggtacttaagattccaacatgttccttaacttattttggaagtttcctgttacttagactgatcttgagttttgacctgaattttatcttatccaactcaaaaaattggtgggaaacgcagagagagaatgaagttaggtcctcaaatttattattgtgatccggcattgtacaaaattctttttaacaagtgcttctgctaatgtgctgaagatgctgctttgcatgccaattgattcatcttaaaccctttccttgattacctgttcatttatttacattgcttctgatcttgtcttgattccaggtacccttttgacggtaaatttttggccgaagtgtcacaaaagatctgcaacagtgttcgaggcataaaccgagtcagttacgacattacatctaagcctccatcaacaattgagtgggaatgaggcagtcaagatgttatttttcatcatattggaagaataacaaacattaattttgtatacaagctcaaggttgcagtcattcaaattcacttagtgatattctttaaatggggtattgtggcaaacttggttctcatatttatgatgagtttcccataattttactgtcttcttcacaaacaagcattgtttattagctattctgtcagccaataggtctaaattagataacttaattagaagtcttttaaatccatgatgcattgctgataacatgaaaaggtaacccaagaatattgtatagtgtagacattctgcaatttttataatgacaactttggttatagtttcaaccaattatacaagtgaatttatatgacaaacgtgtatcactaacatcatggtggttgcatggcaagagtggttgtctcctttgtctaaccagcaattaggatcgtcgaataacaacattaatacttgggaagtaggagccactaataggtagtcgtacatgtgaagaactcagttttactttctaaacaatggaaactaatgcatttggtccacttaaaacatgcatttagcatataattaggaaaaacatcattgcaattagctatcatcaaagagttttaagcatccaccacagtttataatggggtttgactcattgtggaaacacatgacaacttgagcatgccaaattgcaaatacaaagagaactttaagttttgcaagtaattaagtggcgtttggtaatacttttgggtgtgtttgataacatttttttaattagctttttatttttaaaattagaaaagtaaaaataatttttaaaatcatgttcaataaatttatttttacggttcaattttttaattaagaacctaaattttaaaaacaaaaaaaattacttataatatttttaaacagttttttttttttaatctatatttttgtctccgatctcaacttagaccttagaaatcgaactaggacatgaccttggacttagacctacccctagtctcgacctcagactcggccctaggcccgacttaaataaaatcaacaaaaagaaataaaaaggaaaatttacagaacatacttttgtttttcaaaaataaaagtgattaaaaattttagaaataaaagtggtaccaaacaccacctttgtttttttaatttttttaatcacaaaaataaaaataaaatttttgtttttaaaaataaaaatgtattctataaccacttttgttttttaattttaaaaatagaaaataaaaatgtgttatgtaacttttattttcattttcatttttttttattaaag

SEQ ID NO: 378525 - DNA, 3140 bp, Cannabis indica
tttttcttttcctttttttttgtcccttttaaatttcaaagacacaaagcaatttttttttctcagtacccactccgaaaagaaataaaagcctaattgacatcataatgacttaagaccaccgtcaaaacagtgtaaaatttccagcgcttaatacagaggagcttcgtgaataagaatgaccctgcgatcatagtaagacatagtcaaaccatgactcccatttttatactatccacatccagaccatttcaaacaagaaaaaatgtatcatttgcgcttccaaaaaaaattcttaaggcttctatcatgacttcaatacacaaaacataagattaaaacaagaaagtggaaagggaatggttgttatatagtttgtgaggctgccaagatgagctgagttgattagtgaagaaagggacaaggcagacagtaatagcagacagacaaataattataatcatagtaacttcaaggagctgcagtcagacaagcttactgaggctactagaaaatgggaatgactacgaaaagtgcaacaagttattaatatcttaatgttctaaaaatcttaaaacacaaaaaataagaaacttcttataactaagcttaaagaacaggtataagttttaatttgctcctatataagaaagatcaaaataaaaaacgccagagaggcaccatccaatatcaagttcaaagccttgtttaaatgagcttgattctaaaactcctgattaaagaacttacatcacgctgttcattttccaattttcttttcttttttaaaaaggaacattttgaaaggtgctcccaaataagcttacttccatttataaattattcatattcaccctttcttcaacccatactaaaactatctcaagtttctaagaaatatttcttacagcagagaaataggcttcaggataagattgattagctaaaaaggaacagcaacaactgaaatagccaacttgcattataaatgacggtgacaagaaattggttttccaacaaaaacttagtagatgctaaattccattaagattttttggatgatattgctttacgtaaactaaatagaaattctgacatgacatacctgtctagctaatttttctatttccaagttcaaccctcaaagtagttaagaagcatgtctgactcacaaacttcaaagtctaattgctataatcaacccaattattaatcaaatgtctcatatctaacttaaagttcaatagtccgtgaaaccatgctaatcatgttaagagaaattcagcccaagaaagagaaatataacgttgtgctattcaattactcacatttccgacaaaaacagatcgtgaatctacttcttccttgtttgcttgagaagcagctgcactagcaggatctgtaaaagttacatttaataaggaaagcaatacatgaattgaaacaacaaaataatgcaggttacttctttcttcctattataacacatcttccttggaaaacattcaagcaggcactaaatatttcgtcttaagattacgcacttactctcaaggaaaagtaatcattttgccccctcttttttgtaaaacaattactaaagcctagtacaccaaaaatatgttccttcccgttctaagcaaaccagcagacaaaattaaagaaaactaaacccattgtcagaaaggtcatccaatcaaagtaacagaaactcgaaaatctaaatttagtgttaacactaccattaggtcgaacttaaggttaataatttcatagaaaaaaattagtaaataaataattaggaggaaccttgaacagcacccatttccttctcgaccttggcctgcatttcgcgaagagcggcagcctcctcctccatctctttcaaccgcttcttcatctcgtccaattcctacaaagccaagaacatcataagcattatgtcaactgagggtttcgataaatttagcagaagaagcgattgaaggcctagggttttgggcttcatggatgaatgttggtacagaaaacaagaggaagaaaataagagagaaaccttgacagcgtcgtcatcggcaacggacatatcgacgtcggcatggtgagagtcgacgtcaccttccaattcgccctcgtcagggatttctccaccatacacctcatgctcctcttcctccatttctctctcactgctacgcacccaccgtctaatgaatttccgcactataaagctacatacactatatataaaagaaattttgacataaattaccacaattcttaaaaaaaaaaaaaaattataaaaatgcatagatttttatttttgctatttaattttttttatttacaatataaattttagtaaattattaattgggctaagatctaaaataatactaaatttaaaagctaaagtagtaaatatttttaaaaaaaaaaaatcaagaaaataactaaataataaattaactaataaaaatacatttactacatattattatttttaaaaaatataataattaaattaagtaatataatttttttagtattacatattattatattttaataaaaataaaaaatatatatgtatttgatcattacatatatacaacaatatttaatatatcatattactaaaaattaatatacgtaataataaaattatacattacaaaaaaattataacaatactaacttaatactcaaaaatatatatatcatactaatgaaattatatatatatcactattaaaatatatacatataaataatttaatagaaactaaatatattcataaataaataatatactataaacaacaaaaaatcatatatcatacaacaaaatatttatacgtacgataaaaaataaaaaaaaataataaaatattattgaaaagaattatatatacttgttgaccgaagttttcggcaaccaataaaatattataagtttaaagagctataagaaaattagagaaggatttttacgtggttggggcgttaatgagccttagtccacgagtctatcttatttatggatgtatttaatacagaggatgtatttggtgagtgtttcactcttataaatacagagaatgttcttggtgagtattttctcttcttgctcttatgca

SEQ ID NO: 378526 - DNA, 3259 bp, Cannabis indica
attagtcaagagactaccatggataattgatattggtatttagatctacatgttgattatactattaaagatgcatataaaatacttctcgaagttgatgttatggttattaatgagtttgatatgaagatttggaaaatagtttggaagttacatgttcctccaaaagtccaacaacttgtgtggtgtgctttaagtggttgtttggctacgaaagttcagctcgctaccaagcatgtttcccttgattaggtgtgtcctctgtgtcaccaagtgactgagactatattctatctttttgtcctctaccattttgcaaaatcttgctggcacagattaattttgaaatttggtcgaattactggtgtggattttttaggattggtttagtcagtccttgctgtagcattttgcaatagctcaaattggtcatggttctttgggctatctggcattcccgtaatgagatggtttggtaggaaaaaactacctcgattgctgaggttattgtattggcaagagaggtccttaatcattggagaaatgctcaacaaaggagaatggggtctttgtttgtttctttggattataatggactggagcattgggtgaaaaagtttcgggaatgattaaggtaaaatgttgatggagcaatttttgctagtgaagagaagtttggggtggttggtgtggctcgtgatcactacgacctgttcatagaaggttttactgtctcacttgttggtcgagtagatccgactatggctgaggtggtggggattaaggtggctttgagttggatcaaacggaatcaatggaatcgagtacaagttgaaactgactatttggttgtcgttcaagcagtccaaggctcttttgatatcccttctccttttggtcacaatgtgattgcttgtcgatcaatgttggcctctttacccttagtaaagttatgttttattaaacattcaataaataaaactgggcattgtcttacttgtagctcttgtttgtatccagatcgtattttcagtgagagtactgctcctactcatctcttatctattatctcttatctattataatggttgaagcttatgtttaaataaagttaccatttctcttcaaatatatatatattttaaaaattttaagtcaatttatatttatattttgaaaatttattctataataatattatatttgttaatatttattaatttttcaaaaaaaaataaaagtttaataatatatttagtcgatttaaaaatttaatataattttataatttaattatcattaaataaaataattttacagtttgtttcttagtatatatataaacgcacaccaagtgctattttatttcatgttctaataatatggtaggctgaaacattggtatttcaccctttataaaactcgagtttattcagaagaaaaatatgaaaaattaaaatgcattataacaaaaactatatgatcataaaccataaaactgaagaactaatatcctcgttgaaaaaccaaataatgttccatgtgttcgtagtactctactacgaaatatttattggatggaataataaaccaacaaaatccaaaaataaccaaacaaattcccagaacaacagtcaaggaataataatgaaatcagcaacaatgatcacaagtttctagcaatcctcttcgataatgtggagagtctgcttcaatcctttattggacactttttccatgtcatcaaagaatttgaccagctcctccttcagtggagtactttcattgctaaacatccctgagcttgactccttctgcaatatataataattataaagtatatataaatgaatttaattaaaaataattaaggtgcgtgaggatttagtataatgtgtaccatcttagttactgaaaagtcgatttcacagtgaaacttgtcccagacctgaaattgatagaaaagaaaaaaaaagggaaattacatttaaatgtaaagcaaaatcaataattaatttataattttgttatgatatataagataataattgcataccatgttacagaatttggttttacaaatatcaacgaataaaggttttgaaaggcttaaattgaccgcaactttctccacatgtccaaatataatatggagatttcttttgtattcatctagctgtgtccattgcttagcaacttcaataatgaaatcttccccaatcttatcttccaatgatggaatcacctacaccaaaacaaacaaataataataataataatttataaaaataaaatctaattaattatcactatatagtcacaaagcttacatagtttgaaatcctttctgtcacagtgtgctcatatttttcataatactgactcactgcgtaaggccaaaacccttccatggctgccgagcagaaaatgtcgtacaccgttctgtataacataaaatggaaaagatttatgttaaaaaaatactgtgaaaataatatgtatagagtaaaattattatatatatatatatgcttacgtgtatatgtttattttttcctccattttccaagactgtgctttaacatcaagatcgttgttgggattcagcttcacatgtattttctcaatcgactcatctatgggcaccattgattctcttatgattcttctaacaacttgaagacgaaaatttctctcttgttcagtagtgaataccccaaaattcaccatcattcttgattttgctaatcaatcaccaaagatgtacatattacaactatatattgatttatatataactagattatgtaaagagataaatgtttttgaagaaccgattccagtcatacaaatctaaattatctctttgtacatatgggtgtatatcgattgaatgattcaagactatacaatattccttgagaaaataataaaaacaagattaaagacaacatatgataatgaatcagctcatactatggaaaattaaagaagaaaaaaagacagaagagagattatgggtacctatgcaggaagaacaccgttttgctcgaaatctttatgttggaaagagacagtggtctgtggtcgatgacttaacccagtcagatagtatatatagtgacatatatgctagttagggttgtacatctggaatcgttttctacttaattaattttttcaaaatcgccgtataccaaaaataattactgaaattattaatcccaataatataatattgtaatattttttttaaaaa

SEQ ID NO: 378527 - DNA, 4657 bp, Cannabis indica
atggttttatctgacataataatattttgaattgacataatcataaccataatcatgattagtaatggtacataaaaattaattatgcttcaaaattggattcttctgacaaaggaaaggaaaaatataatccctgttggccttttgcaaattttttcattcaattctcatctatatttttagaagaattgctgttaaacattattagtaactaatttgcagatggactacataaatacttcccatccaaactttattggtgggagtaaagccgttgaggttgccttacaacaggtgaagtcctctcgggtaacactgccgattggtaggctgaaggtatatgcatcccttattcataataatcgcgaccaatgtgtgtttgcatattgttgtaataagctttttacttgctcttccctacatttttcatcaaacaggatggtgtggaacctgataaggcaccagcatctgaaagaagtctgaaatctcgaggaattcttgctagacaagcaaatgggatagtgtctgatcaggtagagttgagttttttttgttggtaaacagaattgtagtctctcaccccaattcacatgattcatattttgagttgctggcatatgtagtttcaattgtacttacaatttatataatcagattagattgatatttgttactactaatttagtctaattgatgtttttattctctttggagtttggattatgagcaggttgttcgaccagcacctgatagtgacaaagttgcacccggtaagatattacattatagttttataaggttttttttggtttatttttaattatatacatatccttagaatttagatattgtttcacacttcgcaacaaattatgggcctgtttacttttggctttacttatacgcaatagaagtagtgaagctaaagttcatatacgtacaaatatatatgtatatatacgtttatattttgttattgtatatggattgtctattttagaataattttcaactcacaaaaagaaaaagttatgtgtgcatatacatttttttttcttcgattagaataaggataaattagaagttcgttatcagaaataaatcaaataggaaatattaaatttcattaaaacttatcagtgtcttgttttgtcaaaggactttcgttgacaaaccagacactattttcttagtcaggagcttcacatatatatatgactttcgaaaattcatcccaacacgcctaaataatgctgtgttcatgcctaaaagtgtgaacttttgttgtacaaaagaataaagttatatatcaacatgcaattttctgagaaaagagttagtatttatgcagataaacatcaaatggaatatacccaacgtcattgttgcagttagatttatttttttctttttaagaaaaaaaaaaagtcgacacaagtctatagaatggatatttatactcaacatcattgttgcagttagatttatttttttctttttagaaaaaaaaagtctcgacaagtctatagaatggatatttatactcactctcgtctctaatctgcctagattttctaaggatatttttgattgtatagggtgttgtctcctttttttcttctgttgttgcataaattgtactcgagtgaaattggtatcctagtatccgatgcatctattgataattgcaggaaaccctagcagttcaacgtggggtatttcatctatttttggtggaggtgaaagccgtagtacacctgctaaagagagcacaacaatcaatattttcaatgaacctattcgcaacatggagcaaaccttatcaatgatccacttaagagaggtattacctcttgcttctaatttgccttcactaatttttcccccttacataaattaaaaattcttcttttttccccctgttaagcctccaactgtcttgaggccttcggaaacccattcagaggaggagactaatgaaattgcaatcacaaaactactgttgagatcgtactatgacattgttaggaagaatattgaagactttgtgcctaaagcaatcatgcatttcctggtaacattttatttctgtgtataagcttagtcatcttatacttctttgcagcctttttcatactattgaaactcacaagattggttgtttggattaactggattccaggtggaaatctgttttcattaatatggaatttttctcaatgtatcttagactttgctatttgttttgttctaaacccttcaagcatacttatgcaaccttgtgttttttggctgcatatatccgtgcttgcatctgcatcggcaataaaatggctgtttgtatcaaactatcttgcatatttgtgttcaatttcttttatatttatcttgcaatataatacatgactgctcttttgtggtttacactttattctaccgcgcgggtgtgggctgtattatcaacaactgtcttaacaatgtttgtacacaataaagttgcttgaatctcatgaatgtactgactttattgatttctatatatctaggtaaaccatacaaagcgtgagctccacaatgtcttcattaggaagctttacaggtaccattttaggttttaaaaacaagcaagcaaaatatcaaatcttagatcttttgaacaaactactctttatattatatctttttctattaatttgtttattgttcacttttgattgggaccctctttgttttttatcttgaacagagagaacatgtttgaagagatgctgcgagaacctgacgaaatagcatcaaagagaaagcgcaccagggatacactccgggctcttcaactagcatttcgggtagtttttctgattttttttttttttacattaacagtttcagcgtattatgaacttaattacaatctctatttattaactactgtgcatctactaccaatcctcttatccctacaccttaaaattttaagacttgtttttttttctttccccaacttgtattttcaatgtttctacagctttaactgtatgctttctttaattgtttccaatttttatgttggtggtaaaagtgttggtggcgtttggttagaggtaatgaaatagaacggaatggaaaggaaataattttcattacattcttttgtttggttgtattttaaagtattgaattatcattccaatagaatggctttttcaccattggtggaatgactattctattttgaaatggaaagaaagaccattcccattctcaaccaaattccacctaagtcaacacgccatgaaattaagggatgatactaacattttacgtttttggggcagacgcttgaagaattgcctttggaagcggaaacagtcgagaagggttacagcttgggaggcggtgatacaacgggtttgccaaagagtagactccccacaacatcaatgtatactactactggcagttatgctgattcctatacagcatctactaagaacacaaagtccagaaaatcatcccactctggggagcttccctcacccttttagttgcagattccaacaacagtggaggactctctcctctcccgtgccgggtctctatccatccaactgttgatccatgattgttgagttggaattagaagctcaggtggaaatcattttgtctttacattaattttcattcaattatttcatgcagcttagaaggcgatcgggatctatcccgccactaccaagtattttgctggggtattcaaattttcttccaactagatttgtgtgacagatattttgtgttgtttgtcctccaatcgtcgccttttttttctttgttgtttttttttatattaggctctaagaagaataatagggagcagattattatgactcctccccagttttccttgcgtcttactatttgtcatctcaaagctaatgtaaaattcccctatgataagtattttaccgttacgattaataaacaaacacggttaaaataaagttttttctttaattattattatactgtgtagtaaaaaaattatatttttttttggaagaacttcaagttcattaactagaaaaaatagctgggaatcacaagggatgtccctccccttgatacatagctttttttgctaagccaagaaaaaattacagactctaaaactaggatacatatctaaaattttcaaagaaacatttaagcaagaccattttggaggacacttgcccatagccaaagcattcataaggacctgagaatcagagagcaagcataaccgcacgggtttttgctttcaaaacaggggtattttttgtggtttgaactttaaacgcccaggggaacgactgttgcaattctcgccaccccttgagaccaagcatctacaaaccgaataagattcgcctcttccttccttattttgtttgcggtataaatacttattttgtttattttgttgataaaaaattagattttggaaattttagcaaaagtattcattactttattagctcaattaattgtaattgtgacaatattgctttgttatcgtgtcatcacttatattattactcaaataaaataagggtaaataccattttggaccctgtgttttgcaaaagttacagattggaccctgtgttttgttaaa

SEQ ID NO: 378528 - DNA, 1756 bp, Cannabis indica
tagactcatcgggatattacaattacctcttccaaagtgctagctcctggggcaccctcgtccaggtacactgcaacatatctctatgaaatttcctcttcctcagtcaagagatttgggtggcaaagcatccaatgagcttctaggagcttatcttctttgccaagtcatgagccatcacctctttagcctctttggaggcctggctttggcccctaccactaacattgtctatgctttggaaaccaaaaattagcccgtgttcatagagaagttttgtggtaaccaagcctttgactttcaattgtgcttcggtgaaggccttgtacaggactacctttttgggcattacctccattttagtgctttgaggcacaagctctgtcaaaagtaagaagcataaaagtccaattagcaattaaaccaaagtaagaaagattttgaaagaaggaaaagccaaaacaacaagtataaacatactttcctcggacctgaaagctcaatggtagagtgggcaccctcttcactcgaaatccaattaaaaagaaccaatattcctagaggtcatgggagcgttgagtgtggctggtagggtaatgagcatcgaagtagctctccaacttgtagaacccctgcttcttacgatttgttctcattggttaaggcttcacaccatagaagaacaagatcttctctggagtagtcacctgtagcttattaattttttagatgacatacaattcagctaagagcttgtaagccagaggtatcaattggaaaggagttatcccaattcgcgcaatgaattctgcaaagtaggttcccaagggaagatgtgctcaattcgagatgtgggcccacctccaagtgttgaacccatctatgctcacgggagttgattcttcctcgacatcagcctcagaatgttatgtaggctagattcagaggcatacatttgttgcatgtcgtatgaggggaagctgttgattttttggtccatctcctagatggaagcattgaatgcctatgcaagaggtggggttttgacattcccctttcccttagatttcacgactaccccggacagaacagcctctggtatagcctcaaagataatgtcctattgaaaccctgtggcaggagcctatactgggaattcttcagtagctacatcctccatgggaacatcacctgaattttctacaatttccaccgcatcaagttggaattccttgttcaaatccattactagaaaaacaaagagaaaagaaaagccaaggaattagacacccaatatctaaatgaaaatatgggcatcggggaaggcctcccccaaaatttcttggagacgtccccgtcagacctgtcactcctagaaacttatcttcgttaggcaactcaaagtgacagatcaagactcaaaagataataccgaaacaagatttaaagcaaattatagaaagtaagtctattcaatgtcctaacaactccaaattgacacacaaaaaatcgacagacgtagtcctcacttaaaagttcatcctaccttgttcaactgtaattccagaatcataaaacatggaaatgtctacggagtttaaacatccatacccttattatccacacagtatcagcactcccctagtgcgtaaatttcaaacacaatcctatactagaaatgtaattctacaagcatcatttcaccattcaggcataacaaatatcctatacctagcttgaactaagcatttctatc

SEQ ID NO: 378529 - DNA, 6308 bp, Cannabis indica
aaaaaaaaagttgagtggcacacaaagactagaacaataaacattgtaaaagaggtcattatacatggttctaatgaaagaaacatagaaaatttaacaagagaattctctttaaaagaacaaattgtcatacatcacaaaagtttgtaagactcaagtttaagttccaatgacaatatttaatgttagactaagctagagtcaaacaacaatatgtgattcaccaaaagttaaatataacaaacaattggagggtcatcaaacacattgtcaaaaagcccaaaaaatagttaataatgtggctttaacacagttttacagtcaaaatccttagagaattttcaataggaaatattgtttactttcctggttctttgtttgtataattttttgtattacatttttggacttccctttactccttgtattatattctttattgaccaatacatttttccattgatgttcctggttgaaaaacataaattttgacattgaaattgaaaataaatgacttaagtttagcataaatatcaccactcagcattctcaataacattgaaaacaaatgacttaatttcgcaaaccaagtatgtgtacatgaattacatttagctctatcacaaaacactaccaaagtaagctattgaaacattcacatagcaacaggagtcaatgcaattgcagatgtagaacacatgctaacaagaaaacattatacaacccaacgggtgatgcttaaaagtccagcttacctgaagccaatcagcaacagctcctacgtttggcatggttgcactcatccctactatctgcataccatgagcagggtcttgtttaccgctgcttgtacctgaactttcaccactgcttcctccagaattgccttcaccagcagcataacgaagttttgtcaacatgagttccaacagataacccctatttcgatcaccaacctgttaacactacaagcatgtaaacaatctaatgggatggcaaatgtagagggagaaatttaactataatagtatataccgaagtaaagtgaaactagaaataccatgtgcagttcatctatcacaataattccaatttcggatagacgaccttcctccagcaatctgtttaacaatgagtttgccttttctattgtgcacacagctacagaagtgtctttaggaagcgttccaccaccttggtttccataataactacgaacatgcttaccgagtggttcaagaagaacctcaaggtgttctgcctgcactaatcagggcaaagcttcatagataataataatctaggaacaaataaaaaacatattcatcaattacttccacaagaagaaaaaacgagttataggacattaccttttcggcacagattgacacataaggaagcacgagtagtgccatctttccaaatgataagacacgccgcaacattaaaatttcagcaacgaaacttttacctgcactgttgaaaaggaaaattatcaataaagagatgcctcacagaaagaaaaaaaaaatctcaaggatatccagaagaacaaatctgtgagaggttagatacttcatataatataagtaaataccttgtggatgcacaatatacaagatttcttttctgcaatacaccatccacctgaaggcagtcaacctgaacaatcaagaataagttcatatcatgctctagactacttatggtagaagtaagatacattgactgcattctaaatatggaacccaaccatatcaaattcatcatcagggagaaaagtgagcatttaaggccaaaaaccatatgaaaccatttagagcaaagtggaaccatcaatgccaaaactaaacttaaatagacattcaaaaacagagaaaggacagcaagggatgcataaagaacaagaaaataaaaaatggctgtaagaatataaatcagaaataacagaccacttaaagataaacaaacttacaaataaaccagttattaacacactataaggggttgattaaatgtgttttgtgggttctcctcttgatcccaactcatattactgtcgaaattctggtttcagcttattgtttcttaggtatttagttattttaacaaagaattaagttctcaattaaatctggtagagtaggtggtttgttgtgcataccatagtctacgaaaaggtcatttatttattttttgttctttcctatggcagaccagcttcccctatttcctttatattgccatgtattctgtactgaattcattcataataaagcatatatcatttcctatataatctttatagtccattaatctggttatacttggtgagaaaaatatataaactatcagtgtcatttgctttgtactcgtgttaaataatacctgccattgatacagtttagaaattcctttctttctgtatatgctgcatatttcagatggcagccaactgtttaagtctagccaatctttccttggcataatacttgaaggagtatcttgcccacattcagaattaacaattgacttccgaattccatcaactggagaattatatttcatgctttcatcatccctgtccaataaattcccctttttcgccacagcaacaacaggagtcatttcttgctctccacatatctctttatttctttcaccagtgttgcgatggttcaaattattgtcattttttggacaactatgatcgattagatcagaactagattcggatgacaccccaccttcatgagatacctttatattatttgtgtcaccattacgtacaatacttccatccaaatttttgtcgtcaaacaagaaatcaaaatgcttaacaggaaaatgagatttttcttctaattcatttccaggtcttcccagcaacccttgcaaggaagtagatggagcagtacttgcaccttcatttatcttttctatcaaattatcggagttctttttacagcaccggctttctgcaaaaccaacttcatcagcagcttttgcacagaagttaactgttggatgacacaagccatcagcaagttgaattgcttcatcccaaaatgcttctcctggagaaaataaagagcttctgcatgctgacttaggagtttcccgaaaacaaattttagcagtcagagaacctggtgtatggagttcaatcttgtctggagatgatttagagatattactgcatttctttaaacttgactgaaatgtaaccaagtcattcgactcatcctcagtagtaacctagtcattaatgagactgcattattagatagaagttagatataatgaaagagagaaagagactagatgtaaatttcataaatacacattaaaaatcgacgacccatctatgaaagctaaaaagtttgtacctcagttttaccaacagttgaatgaatatcttgagaattcttctcgttagagcaagttgtttcacattctaaatgtgactgatcggcaacacaatgcctctttttagagttatcaatcaataatgagctagcttgtctcttatggtcactcacttttaactctgggttcaaatccacatttgattgaagatcactaaataaaatcaaaaactgtatttagcatgggagagtgtgctatttaaccatcacaaattcattccagtagagaccatcaaaaaagtagcaataaaaagacacaagatagctaaaattgcaaaaacaaacttgtacattagtatgtgaattcagagtacaatacctacagtacagagacaaaaagtcatttttaaacttctttaattccgagttttctgcaccttgcaccaaatctgagctgctaccctttccagaatgtccaactgcaacaccagccacttcaagtaattctctcgatgtttccttctgatttggttcgaaatcatcagccactcgagattgaaatgacgaaagctgcctttcacaatcatccttcctagacttattaatctctaatgacaaacttctttttaccgaatcttgcagagctaatgaatcatgaccagcacgcgaaggcttatctgagttactctctccttgtgaagccaccaagtaactgtccaaggtgcctttggcactaggagacccttctatatttttcaaattcttttcttttctctcatgcttcaaacaaggtgacacagctttcctcttcttcgaagcgaaaaactgcacagagataaccccaaccaacaatgagcctatttccaataaaaaagaaaaccagaaacaactcaatttaaaagaaatctaatcaagggtttcatagtttcatataaaacattcaactaaatctaaaactagggtttcaatctctacccaaaaaaaattgttctttcttcttttcatgcaacctaaatacaaaaatttcatctctttcccaaacaacaaaccaaaacagagttcaaaaacgaaacaaaaatcattacaagaggaccaccgttgaccaattaagaacaaactacatacaataacacattccaaaaatgagataattcgaaaaactcaaacttggaaaacaaacaatcacaccaagattttctagggttgtggaagtgagtttaaatacaaacctgatcaatccgggaccgtggggaatcggaggccatgataagaatggtgcaagggatctgtgaaaaatgcaagctttgattgttagaagagtttttgaatcaaaccgaagtgggattggccaccgcgccaaatatcattttctttgggcactgtttcatctttctcactactcaaatactcatactcaaatactcattgcccccaaaattcactctttcaaatttcaacttttcaagagctataagattttgcaattctgccctctgttcttagattttttcagttgcaaccctgtgtcttttgtttgtagtgacctagggctgagcatcgggctagttgattgggttttgggttttgcatttaaagaatgagactcatacccacccgtgaaatgaacggattaaccgagtttcgagttcatgagtttcgggtttaaagaatgagacttgtacccgcctgtgaaatgaatgggttgactgaataattttcttttctttttttttttaagtaaaattttatatgattttttttgctttatttgtttatggaatttaatataacaccttaatttataattttttataggaaaaaaatattaatttcaaattcaaagttcagaaatcaattcaaaaccaaatttgatgcatacagtttgtcaaacactcgatgccaccacaattcttccctcgctataacacaaagcatgagacccctaaagaaatcttcatcacaacacacaaagatctcatcaaagaaggtagcatatggctaagcaagacttccgagtcttgctcttttgtggcggccctcattgccactgtcgcattcacaacttcatccaccgtgcccggtggggttgatcaaggaaccggcataccacttctgaaaggagaatttgctttcgatgctttctccatatcgtcattgctcgcactctgtttctcgatcactgccctagttttcttcctctcaatcctcacctctcgttatgacgagaaagatttcgcaatggacttacctcgaaagcttctttttggtttgacattgctttttgcttccatagcttccatgttggtttcattttgcaatggtcatatctttactcttacacataaactaaagtttgtggcctttcctttatatgcaactttgtgctttcccattacctattttgctttggctcaattgtctctctacttagacctcatttgggctattttcaaaaaggttcctcagcgtagtaacaaggcatttctacacttataagatatatgtacataattttctacaaatgcccaagttttcggtgcaaaattgtgtgtctcgcaaaattcttaacttgggatgattataagtaagaataatttttaaattgtattaagtcataagttttttaagtctcgaatataattctctattaaaataattatatatatgcagtcaaatatcatttctactttctacataaaaaaacattattgaaaattataaaaaaaaaacaacaaattaaaagctttagggctcgtttgtaacgttgtattaggtcgtattgtattgtattacattgaatttgattatatatcatatttttatataatattatgttaaactttaatttatactaaaatagtatatatttaggtgtccataaaaattaatatcacatatagttttacataaaaatattgtataaaatacaattcaatataa

SEQ ID NO: 378530 - DNA, 2304 bp, Cannabis indica
ctagtatatatatatatatatatatatatatatatatatatataaagctcatctccaaagtccaaacgacgtcgtctataatatatttcttctgtatttcttttcaggcgcacaacatcccaaccaagatcagcaaagcctctagtggaaatcataacccctgttgagctcatcaagaagggcaacaaggtgggttcctccgaggctgctctcctctccaagcttggcatacgacccttctcttactccttgatagttgtgtctgtctatgaaaatggatcagtcttcagcccggatgtgcttgatattacagaagacgacctcgttatcaagtttgcaggttccttggccattgttgcttctttatcgctgggtatatcttacccaactctagccgctgcgccccacatgttcatgaatgcgtataagaatgttctgggtgtggcagtgagtacagattattcattccctcaggcagagaatgtgaaggagtacttaaaggtttgtacgtagtccttattaataagaatttatttgtgaattatttttcaacttttagctaattcctttgtggagctgattgaaggagtaaattaatatgcaggatccgagcaagtttgttgtgctgattcctcctcctgtggcagcatctgctgatcttggtagtggtccaacagcttccaaggatgaaaaacccgtcgaggaaagcagtgacgacgatgaaccaatgttaagtttgtttgactgaaaagggacagtgatgacatagcatggatggaatgttttctctatttcgaaatcagaagcttttcttcccttttctttctgggggattatgcttgaattagggtttttattttcaattggcagtaatgtagtatgttcatgttgaatcatgatatcaacaactatggttttagtgcggattgtatagtatatgtagttgctactatatatagctgaacgtttatccgagttattaatgttgcttttgctgtttcaattatgtgattcaatgttgttatcaaaatatatatatgtgatttaatgtattatattatcatataaaattaatatcatttgataattagaaactttgtgagattagaactcaacttttagttaataaagaaatgtaacgtatattggaggttagatttgtaactccaaaatattcaaagcatgatgtgtaagaagaattatatatagaccggaaagcatgtagtgcaatgcacttgtatatattttgtcagtaaattgttaaaacttaaaaaatgttcaaaaattaaaaaatgaccaaaagttctatagtgtcttaattatgacacacataataaaaaaaattgcattattattattattcttttctatttatctttgtattatatttacttttatattatttttaatattttattattattaataataataaatactatacttttatatttatttttaataatttaatattaaattttaattaataccattttttgcattgaattttagttaatacaaacataaaaaagcgtattaattaaaatttaataataaaatattaaaaataacataatggtaaatataaaaatataatatttattgtgataattaagacactatagaacttttagtcattgccacatcaccaactaacctaactaactaagctatttgcaactgtattaactatcacgtaccaaaaacaaagtgtgagagttgttctaggaaggatgttaaagggattgcctattcatgaaatagcttccctcatgtgagttgaattgtaattcctgcctaggtagtcttttggtactcaattttctaagtgtctctccaaaatattgtaatcaatgatcatcaataaaacttctctgttaatagggtgatatcattctttttcttctttatttattgatttggtttcttgattcttgtctagttttacattccctatgtttgatcttgttgaggttttattcttgcactacatcgtgacatatttacattataatttggtatgtttggagtaaacttttaataaaatgcactacattttatatttgtatcacttatttatatttccattttttattagtttatatagttcaattaacattattgtctatatgaaactgatgtatacatttaaatatttagacacttgttctcaatacaaatctgttcaaacaaacaaccaaattatattcaaatggttcatcatcttcttcttagaatctaatataatgagttcaaaaaaaaaatatatctttatatattaaaagtgtctatctaacggcattt

SEQ ID NO: 378531 - DNA, 1532 bp, Cannabis indica
tgattatccagttagataatgacacctgaggctgaaaagaacagtcttatgttttgcttgggtgtattttctgtgtagagatatttattgtgggtaaaaatgaaaaaacaatagtttttggctgcacatgggcacttagaaataagttggttgacatgggaacatgcctagtttaatagaagttccgagccaagcattttaccggacaaaaatctattttggtgttctattagaaggaatgtaaatggcagagttggttgtttcttttttgctgcagagagtgtggatttaaatctgtggcagcaacttcttctgatgattctgatctttgtgctatttgtcttgaaagaacatgttccgtagctgctgaaggttcatatcttttactagtaaattatctccttttgtttttcccttgagaatgatttagatcacattcattgcaaatttatgactggtagtatactttatcctcaggatgtgcgcatgagctttgcgtaagatgtgcgctgtatatttgctctacaagcaacattccttctgaaattactggcccccctgggtccattccatgccccctttgtaggcatggaattgtctctttcatcaaattgccaggctccccagtaaagggaaataagcaacaaatgtcccttggtctttgcaccccatgcatacttcatcctcgtgatttagagcgtcagtcttcagcttctaccccagatatccgaaagaaccgtgtagcttcagtttcttcagaaatattctgcccggttacctgtagcccgtttccttctgtggccattcctttgtgcacatgcaatgatggtccatgtccatcattcgaaccccgagagacagaaactgaaggtgagtcacctaatcgttcacaatcaacatcagttgagcaggataaaatggaaggaccgagatttgacagaacaacctgttcaagcatgttctggggcagaagaagctgcagcagggagcatcaatgcaattcagaaataaatgcttgaatggtttgggaggggcaatggctccctgttgggtccttgtggaaatgaatttttggcttccaccattgcagagccctcggtattgtgtttaattaaatttctagtgtgttaaaactgtgggttatacaaatccatgtttgcttgcagtttttgtcccgctggctacatggtccattgggggttctcacagcatattggctatcattttagatttgctcttatgattttggagaggaatgtataaaggaaaaatgtgtttgcaagttaagtactattgtaattgaatataaaaaaacagaattattcaccatctataattaaatccaccatggccggctttggtttgcaaatgaaatttagagtttatgattttgtatatttctccacaaccctcagtcaggtggagaatctctcgtatttatttacttatttttttaaatggagggcgctgttgctaaggaaaatttgattttctatactaaaatatatgatcactttatctaaaacccaaaa

SEQ ID NO: 378532 - DNA, 5114 bp, Cannabis indica
aaaaaaaaatactaattatatatgtaatgtaggtaaggtttgtataggtgggtggggacctagtgcaactgtgctatgccccatggaaatggaacattgtgtagaaaaactttgtttacttaacaactacttaaacagtacacaatgataataatgatgatgtgaaaaaattattatggctttctccatagtcatgcatgattatgcgattggtaaaagaaaaaatttataggtaaggttcttataggtgcgatggggaaatgacaaatactacacaaatgaaattttattttcatctcaaaaaattattataagcacattccaatattaaaaataatacaaaattaattttactaaattactaggctaaaattaaaaaggaaactcaagtcccttaaaggagaattgaacaagaggtcattgggtcatactggaccttgcccctcgatcgctccaccctgcacaagaaggcccttgacctcgtaccaagcccccgtgtgagaccaccaccaagctcacacttgatccctcctgcgagaccatctccaagcttgctcaccctcccatactctctctctctctctcgctcgctcgctcatacttaacactacctgaagaaaaccacacataaccccagttcaccacaagacattctctaatcgatcttattactcccaatttttgttcacttgacgtggtaattgcacgtggcttaattcagctgacacttagcataacgtgagacttccgaacaaaagcatgtcgggtagttcctagataaggctgatatcaataaaatgtatattaccttccaagcatcacctagccgaattaccaatatgacggctaggagagagaagatcaacataccttgcgagattgcatcgtaggtaatcttaataaaaaaggtaagtcttaaagagagtctggcccagctatcaacacaccagcgaaggtaaaagatcccaaaaaggtcggacaggactaaacggactttgatttcttcctcaacaaactctgcgaatatgtctaatagcatcctacaaatacgaattcgactctttagtccgaaagtataggagtttcaaacagattgttaactctccaaaaaagagaaatttgtatatttcaaacatttaaaatgcatttccctacttcctatatatagtgaacatattcacaagaaaaaaggacatgaaatcattatctcgactctaagagcacttctgtgaacaatattctatgtaagcatcttgagagttgcagttagaattcactttgtctttcttagtgatctccataacattatctcaatatcaatacaactaaaattggagtaggttcattaccattatcaaaggggtcgaacctctataactcctggtgttctttttatttacttactatttttaactctttattgatgattgattagtgttatttagacttcgagtcagttggaaaatttcttagtcaatatgttggtgctttcattgagagcttcgaaacctcacaaaaatctcatctttttcacccagtgatcaatcactatggtcctgacaagaagggttgtgtccattgaaccctaggatccaatggttgtggaccccagcgtccaagttccacccactattgagaactcgaccaattctattcagccacctcgggcaaacccgactgcaatgtcccgaccagaaggtctgatcaataccagacaagtttcagtcaatggtggacaatcggctgttcaaaataccacaggagctccccaagcaagaaccatcccctaagtgtacgctggagaattcgggcctggagttgaccaaactggcctcaacaagccccatgtggacttgggagatgattattaactagccaggctaagagaagacgtgggccaagttcaggatcatacggacctcctccatcatgagcaacaagaaatacgggctattgtgggcggtgcttttgctcagtagagacacaaatttcaagagtggatggatcaaaaagcaacgatcctacaagcccaccacatggagttaaaccgccgaattagggagataaatgaactgattagacggatcaatcaaagggttggatccagggtggaagaaccattagttgtaaaggactcctttcagggaaaaccatctatatctcggaagaaatttaatgccctagggaccgtgggcaaacctcacgcccagttggcccaactacttcccaaacaagggtccctcctaaatgtccgaatgagaaaatcatgcccaataggacatatggcaggactgactagttcttggaccttcctagagatgaaagaaggaaggaagatatcctacccaagcaagatcgaagtaggtctcgcagtggggaatcttatcccaatctcaatgaggatggtgccactagctaccctattgatgcacgcaccaaccggagaaattgtaataacaacatcgggcgtaataacgacattcctccccgaaatgctcaaacaaaatctaacctgaggcctagagattctgtgtttgatagaatgggtcccagggtagaaggagaccttcaagatggcttaaatcgaaaaataactaatcaaaacggaaacatcccgccctaaaatgaccaacctcctatcaacccacaacaaggtctggccagacaagggacgaccagagttgttcctgcagtgcaagcacaaatgggtcaattcaagaacctaatacaaggcttctccgacccaaagctttttgatctggaacttgacaggactcgaggatcccctttctctacatgcatcaatacgttgcccttgccaaccaagttcaaaatgccaacttgaaaaatgtacactgagaaagaagatcccttggcccatatcaaatactttgagatccaaacggatctacaaggggtgatagacgatgtctgttgcaagatttttccaaaaactttatcttaaattgcatggtagtggtacttcaagttgtctacataaagatttgattcttaggaagccttcactgctcgaatttacacacaatttttgtcctccaaacaaataccatcccacctagaagacttggttgaaatataacaaaggccaggggagcagagcctttgaaagactacatccaagggtttatgacaaccacaaaggtcaaaggcctaactaaagaagggcggtatacagttatcttaggaggtattatgcctctgagtgaccaatttggagagacattatgaaaacatcaaccaacaacatgaaagaatttttagactgggcagactgttttataaaacttgaagaagttgttcggcaggtacaaattggcgggcagaagacaactgcccccagcaatgcacctgccatatatggggccaataacatcgtctagccccaaaccagcaacaataatgtagggaaacaaaaaaatagtggttctaaccaagggaatggcatgaaaggaaaattcaataatccccctacacaacaacaccctcgcgaaaatgaggagaagtttagatacttcaacaggcagacagacaatcctgagactattctaatggccatacaggctattgttccgtacaagaagccccctccaatgaaaaaaatcattagtaagagggatgttacaaagttttgtcaattccataaagatttcggccacgacaccaatgagtataagaacatgaaagaagaaattgagttcctaataagaaggaacaatccccacttacatcgctatatccaagccgaccaaaaccaggcccaggtccaaaaaaataatgatatgttgcccccaccaactgctggccatttataggttgtcatcgatggaccccacattgatgggtacacaaacaaagcattggaccgctacgcttggactctccatcacaggcaaagaaatgaagtcctggctgtagaggaaagagatccaaagcaaccaaaggtagaagagtctaccatcatcttcactaaagaagatgctacccatgtcagattctctcataacgatcctttggtcataaccaatcaactaaggaacatgacggtagctcgttgtatggtggatgatggagcctcttccaacatcatcttcgaaactgtatatgtgaagatggggttccatttgaaggatttaacaccctgtacgcaactcatgcacaggttctcgagccaaggactgactcctttagggtacatctggagttgatattattttacttattgcaattaaataaattatttttttttatttttatgttgctttgtaattatatttttgttgttttatagtttgtttgttaaattattttaaggtttttttttagttattttaatttttatttttttagaacacaatatttttgtaattttgaaactttaaatatattatttttgtaaaattagtacaataatagtgtaaaaatttcttatcacaatatttttgtaaattatttcttattttacagtatttttgtaaatatttttgtttttattggattttatttgtttttttttaatgagattgtaatattattaattttaaaatcacagggaagccagaaatttgttttacgagagtcaaataaagaaaatattaagaaaacgtttgaaggaaccaaacacatattatcatatcataacataattattatttcaaaattttagtacaacttggtccttgttgagaatgtctgtcatcaagttggactttgatatcaatggatttcttgattatttatcaggaaaaataaatattaatttatttttttatttcaaatttttataaatattttttaaaaaaagtttttaaacagtttaaggcattgaaatcttctagactaaaaatctgcgaatgaaattgaatcgatttgcatatttagagcactctcaactggtattttataatagctaaaatgtgaaatttttaaaaaataatgttaaatattagctccatcagatgagataaattcatctttattttagctcacgagattttaagctaaatctttctccagatttaattacatgaatagcggttctttaaattttttttaatattattttgacttttctaatcacatcatacacacattac

SEQ ID NO: 378533 - DNA, 2654 bp, Cannabis indica
gatgaatcaagcttgtcaggtgagagtgaaccaggttaatgtagatgaagggagaccttttcctctatgaggaaccaaagtgcaggacggagcagcaaaaatgttggtaaccacagttggcatgaggactgaatggggtaagttgatggagacattgagtgaaggaggtgacgacgagaccccactacaagtaaagttgaatggtgtggctacaattattggtaaaattgggttgacttttgctgtgctaacttttctggtattgacaacaagatttttgataaacaaagcacttctcaatgagatttctgtttggtcttcagttgacgcgcttacgcttttggattactttgctattgcagtaactattattgtggttgcagttcctgaagggttaccattggctgtaacactgagtcttgcttttgcaatgagcaaattaatgagtgaaagggcacttgtgaggcatctatctgcatgtgaaacaatgggttctactagttgcatttgcactgataaaacaggtacattaactacaaaccatatggtggttaacaaagtttggatatctgacaaatcgatagaggtaaaaggtaaagagagtgaaaatgttgtaaaatctgagctatctgaagatgctttaagcatcctattccaagtaatatttcaaaatactggttgtgaagtttctgatgtagatggaaagttcaccatcttcggttcccctacagaaacagcaatattagaatttggcttgcttctgggtgctgaatttaaagaacagcgtaaagatatgaatatacttaagatagaaccttttaattcggccaggaaaaagatgtctgtacttgttgctcgtcctaatggcggtaagcgtgctttttgcaaaggtgcatctgaaataatactaagtatgtgtaacaaggttatagactcaaagggagaacctattgatttatctgatcaacaggcaaaaaatgtatcggatgttataaattcgtttgcgtgtgaagctttgagaactctctgcttggcttaccaggatatagacgacagtattgttgaaaataatattcctgataatggttatacattggtagcagttgttggaattaaggatcctgtgcgtcctggggtgaagaatgcagttgaaacttgtttagctgctggaataacagttagaatggtaactggtgataacataaatactgctaaggctatagctaaggaatgtggcatactcacaccaggtggtatggccatagaaggtccagattttcgtaatttgtctccagaacagatgatggagattatacccaaaattcaggtctgctcaaaaacaacttttctctttcttctatatctaaatgtgaaacataaggtggctcaactttctttatgctttatatggatgcaggttatggcacgatcttcaccttcggacaaacacaccttagtcaccaatttgagaaaaatgggtgaggttgttgctgtgactggtgatggaaccaacgatgctcctgcattacacgagtctgacatcgggcttgctatgggtatagcagggacagaggtttgtgtcctttaaactacctcttttgttttccttcttaacttatctatcatataatttcaagtcttgttccgtgttttgtactttaaactagatattcagtatgaaagtacccaaaatactctcattttcaagttaaaatcttattttgagctcttttaatatcttgctttcctatcaactaagctacattatttcaaatgttgtaaactattatgccactattggagttatgaactcgtagaacagccattcgaaattagtaccattttctccagaaatgaataccattttctctataaatacattttcttactgataatttttgcaggtagcaaaagaaaatgctgatgtcatcatcatggatgacaatttttcaacaatcgtaaatgtaggtagatggggacgatcggtgtacataaacatccaaaagttcgttcagttccagctaacagttaatgtcgttgctctagttctcaatttcttctctgcttgcatctcaggttccttactctatatctcattctttttctctactcaattatactaacattagtacttaaaagtaacgttaaaactctatatcactgatcactttcaggagctgctcctcttacggctgtgcaacttttatgggtcaacatgattatggacactcttggtgcattggcactggccacagaaccaccaaccaatgagctaatgaaaaggccaccagtagcaaggggtgcaagcttcatcacaaaggccatgtggaggaatatcattggtcagagtatataccaactcattgttcttgcattgctcaatttcgatggaaagaagctattgggactcactggttcagattcaactgcggttcttaacacactaattttcaatgcatttgtcttctgtcaggtacgtcttaaccaaattttactcactcattagctaaacactcaactaatcaattcaatctttgggttacaaggcataatatatgtgtatagaggtccttattgaacgtattactacatataataatgacttgttggttgtttctaactatttcatcatacatattaattatttttttttt

SEQ ID NO: 378534 - DNA, 2053 bp, Cannabis indica
cggtcatacaattgactccctcaccatgtcattctagtattttccttattaccgttgctaatattaaaaaataataaataaaaaagtcagcataactaggagagactagagttgaatcaaatagaataagaattaagaattaaaattaaaatttaaaattaaaaaaaaaaaacgaaaaaggaaaatagcagcgaagaagaacaccaataccttccttccaagacatccaaagcacttccttagctgaagacgaagaagaagaagaagaagaagtaaaacccacgaattctcttcttcttcttgttattattccttctctgcattttgttttgtaattttcttttcgcagagtgaaaaaaaaaagtatataaaaggaaaaaaaaaatggccgaaatagatggttcgtcaagaccgccacaaatctctgaaatgtttcagaaattcgctctcgctttcaaagccaagaccttcgaattcttcgccgacgaagaagcaggggaagatgctgatggcttctcactcctcgactctgccgaagaggtaattactgaccagaaagttgtcgttattaaacccgactcggctttcgacttcactccgtcgcaaccgaagctcactaagtctgtttcggacgagacccagttgaagaagcatggcgaattcgcaagaacgaggtctttgagccagactcagatcagacccatcaatacccaattgactcaaaccttgattcgtcgatttcgctacggtttcttctttcgaggcatcttaccttcaattacagaccgcccatgtcccctttgttgaagagaatatcaaagctgctgatcgagctctcgtctctcatcttcagaggctctctgaattcaaacgtttctatgtcgatttctgtagatgtcctgagttccagactgatttgcccattgggtcttgcttggaagcccaggttgaggagaaccagagcaagcttcgggtactcggaaccgtttcagaccggttacaagaagagatggatcaaaaagacaacgaagttatggcgctaaggaaaaagttagatgagattcacaattctaattccatgttatcaaagagattatcgggtaatttgaattcgtctcgtgaggttttgttatctctgaaagtttttgattctgtcttacatgatgcttgtagtttaactcataaatttactaagattttgattgagttgatgaggggagctgggtgggatttggatttggcagcaaatttggttcatcccaatattgattatgctaagaaaactcataatcgttatgcatatttttcctatgtttgtatgggaatgttcaggaattttaactccaaatgctttggcttgtctgagaacaatggagattattctaatggccatattgggaatgattctgatttagataaaaaaggttcttcactgaagcaattactcgaacatgtatcaagcaatccaatggaattgctgagtagggaccgaaattgcgaattttctagattttgtgagaacaagtatcaagagattatccaccccaccatggagtcttcgatattcagtgatatggatagaaaagaggtagtgttaaactcatggagatcattgagtgtgttctatgaggcctatgtaaacatggcaagctcaatatggacgttacacaagttggccttttcgtttgatcctgtagttgagatatttcaagtggaaagaggtgtagatttttcgatggtatacatggaagatgtcaccaagcgattattgttgccaaaatcgaaggcaaaggtaggcttcacagttgttccgggttttaaaatcggacgaacagtcattcaatctcaggtttacttagcaggattgaaatgcaatggtgagtgagatataagctctttgaagtgaagagtggaaatgtctttacgtatgcccccaacttgaaagaacctactatagctcactttctgtgatatatggtaaatatagaaatagaatttatgatttctggtttgtgaattgttttttgttttttctatatggcagttttccccc

SEQ ID NO: 378535 - DNA, 9545 bp, Cannabis indica
caagctggctcatgttttagccattattcttatttctctccaagttgtgtgcttcaattggagaattattctaacgaagtgcgttctattgttattaacgattgcgagttaataaaattgctaagtttattaaaaaaaacactattataaaaatattttttttgaaaaattattacaaaaattaattaaaaaattataataagaaattgacaattcaactatcattattttactattgacacttataaaataaagttgtaatatttcgaataaataaaataaaaaaaatacttaatataaaaataaagaaacatattttaataataataattatttttttcagcaaataataataataattattttagtggcaaccaataaaaaacccgatcacagagagtaaaacaagaccgcgtcacagaggatcacaatcactcactctcacttctcaaggaaagtccaagtcttctttctctctctctttttccaacagtagagagagaaagtcaggtagagagagaaagcaaaaaacctagagagagaaacaaacaaacatatatatttatagagagagaaacaattatttatgcataaagggtatatcgtagtttgtagagatagagagagaaagtagaaaaaaagtgagaaaaagaggagagagaaaataaaggtactattttatatatatgtatatatataatataatatagtgagagaaagatggttgagtgccctaacaaaagccaggaggaggaagaagcagcagagagaggagagagagagagagagagcaggatatagttagagagagaaagagtatatatatatataaaatggtatatagagagagaaagtgagggttggtggtggtgctgcagcagaacagagtttagctaggagagagagagagaaaaggaataaataaaaaagaggctttcagaaaccctaaccctagaaaaaatggttatttctcagtgagaaagacaaaacgatttttgtatatatatatattattattgtatctttgtgttgtgtagatgagattagatgagatgagatgagatgagattcgagtgaaacttttgctctgcgatttggtttgtctttcgagctctctttcgctctttctctgtgtgttgagatctttgttctgcaacttcaaaattttagggttttttgttttgattgagttggtttgaaaaggttgtttggttaagtttgaagttgaaaattttcttgtgggggaagtgcatttcctttgattgttacagtttcttggctcttttttgggggaaaaacccacaaatataaatttttggtggtttaagcttggatctttgcactggagcgcttaggattaccggggacaatgtcttcgttaagtagggaattggtgttcttaattttacagtttttagatgaggagaagttcaaggagactgttcacaagtaagtttttccttttctttgttttggggtttaatatttgtactcattttgtttggaattagttaaaattttgatacttgttgaactggggtttaagcattttcgtgagaattgttggattttgttcatgtgtttataatgctgtgtgtgtttaattttggaattttagattagagcaagagtctggtttcttcttcaatatgaaacattttgaggatcaagtccaggctggagagtgggatgaagttgagcgctatttatgcgggtttaccaaggttgaagataatcggtattcaatgaagattttctttgaaatcaggaaacaaaagtatttggaagctcttgataggtgaggatttgaattatgtgtttatgtattggttgtagattggtatgcattggtttgatgaagaaacttcataaactaaaatggttacaaatttctcttttgcatgttggtataatgttctgtgtctctctaacaggcaggatagagctaaagctgttgagattcttgtaaaggatcttaaggtttttgcatctttcaatgaggaacttttcaaggagatcacacagttactgactctcgataattttaggtaagttacattttgtctgctcagttaatttcgatgattgattgattggtttttattaagttttgttgttggtatcgtgtataaacaggcaaaatgagcagctttccaagtatggggacacaaaatcagctcgaaacatcatgcttatcgaacttaaaaagttaattgaggcaaatcctttgttccgtgataaacttgcattcccagctttcaaaagttcgcgtctaaggaccttaattaatcagaggtgatacttgcattgtcctgatttatttagtttttcgttaaattatgaactttccccaatgttatattctgcataagctttgtttacttgaatctcatttagctagaatttcagtctaaattggcagcatcaactttgcaagaatcctcgtccaaaccctgatataaaaacactatttaccgatcattcttgcaaccctactgctaatggatctcgtcctccacctacaaacaatcttgtcggaccaattcccaaggctggtgcatttcctcctattggtgcccacggtgtaagtgcagttctctttttatcttttctgcccaagtaacttgcacgatttcctaacactcatgctgtttcgttttatcttgtgcagccatttcaaccagttgtgtccccatctcctacttccattgctggttggatgtcgaattctaatccatctttgtctcatccttctgtggcaggaccacctcctggacttgtccagcaatctagtgcgggtaagaattcaacgttatttgctgaaattaacaacagattgtattagaggaccatcgagcttttgtcgacaatgtatttatgtaaatttgtttctttgttcttacacaattttctagagtgaatatcgtttgctagtctgtaattcttaattgtttcctattatgttatttgtttgattatgtcagccaactgctatttatagtttctttcttgtgcctatgattgtgtacaatatgttatgatgccagtcgatttattgtatgaatgataattatgaactctctcccatagttattttaaatctacaacttaatttatggattgctgacttattttgagatttgatgtaactttcaccattttttttccgatgtagctgcattcttgaaacacccaaggactcctacaggtgtgacggggatggattatcaatcagctgactcagagcacttgattaagcgcattcgtactggaccttctgatgaggtgaggaagaggttcttatgtaatttccatgtttaagcttcaattatcaactttaggttgctgcatgtgttttcttttcctcgccctctttgagagacaccgaaagagagggggagcaggagaaaatggaaatattctcacagttgctttttacaggtatcattctctggtgtaatgcattctggtgcttattcacaagatgacattcccaaaaatcttgtgcggacccttagtcaaggatctaatgttatgagcatggattttcatcctcagcaacaaactatactgctaggtttgtgactaaatgttttgctgataaaaaacaattttgtaaaattgtttatttattggactttttgttactttgtagttgggacaaatgttggtgacattagtctttgggaagttggctctcgggagaggatggtacataaaccgtttaaggtttgggatatacaatctgcttcaatgccattgcaggtacgcttttttttttttttaccttcattattttagaattcccgataaatatatatttttccattagtacatcctaatatacgcattcaattatggatgatattccttttaacttttttttttttttctttcttatgcctcagtcagctttgttaagtgatgctggaatatctgtgaatcggtgtgtttggggatcagatgggctaatgcttggtacgtgtagccttttttattcagggcgagcatgttattttgtttctattcttgtaggagaatactattaaggttcttactgcatttaacatcttataggagttgcattttcaaagcacattgtccagatatatacttacaatccaactggagaactccgacaacatttggaggtaaatcgtattccttgtaatctctttctccattggcaattgtaggatattgattgtctcatttttcagatcgatgctcatgtgggtggtgttaatgacattgcttttgcccatcccaataagcaacattgcattgttacttgtggagatgataagatgatcaaggtatgggctgtcataccctcgtcttttgtttagagtatctttaggcttcgtagtataacttgtataagctcctgtacaggtatgggacgctgtagctggacgcagactatatatatttgaaggtcacgaagctccagtatattctgtttgtcctcattacaaagaaaatattcaggtatatctcattaagatcctcattatcattgtagtacatccaatttttcattttactacaatcaccaatttgtttttgtaaattttaacactgtacatttgcagttcatattttcaactgctattgatgggaaaattaaagcttggctttatgattgcttgggttcaagagtggattatgatgctcctggacaatggtgcactatgatgtcatatagtgcagatggaactaggtaaagcttacttgtctcaatagatgaacagatgctttgttggaaagcatcgtaatttgtattaatttagttttttctcattttctttacttctattggctataagctgaatagggtatttcgttattaatcttcatattagaaaacatatcggttgtttatgtatatgcaatattaattagaggttttacaatatagtttgtgaattcttcttgtggcaggctcttctcatgcggaacaagtaaggagggcgaatcccatcttgtagagtggaatgaaagtgaaggagctatcaaacgtacatattctggttttaggaagagatctttaggtgttgttcagtttgacacaacaagaaatcggttcttagctgctggtgacgaatttcaaattaagttctgggatatggacagtaccaacatgttgacagctgttgatgccgatgggggtttgcctgttagtattgctgttcttcacattttttttgtcgtttgtaaaataacactttagaagagttgagctttaacagtagttattgtttacttttatttgcaggctagtcctagattgagatttaacaaagaagggtcattgttggcagtcacaacaaatgacaacggcattaagattttagctaacaatgatgggttgcgcctgataaggatgctggagagcagggctatggataagagccgaggcccttctgagcctatcaattctaaggtagctctcttcaatcctaaaagcatgacatgtgtgagtgaagataaaatatctggatcgttctgacacaaaggcttggatatagttggggttacctatcaattacatgaaccataatatattttccacaattttatttgttaatcacgaaatgatttcttaaattagtcatcgcatcatttccttgttagatttatgcactttagattttagttttgttaggagaaatgtcattgctggtagctccaattgaaagttttggaagaagcggctttgaaaagaaaagtggaagatcatggtttcacatattttatcacatgagatgagtgcacagtgattttagaaaagtggaagaaatgtaattgctggtagctccaacattaagatttttgaaagaagcgactttaaaaaaaatgtgaagattatgatttcgaatattttatcatatgagatgcttgcacagtgattttagatcgacaatgggttcttgttggcagctctctatatatctttgaactgtgttttgatgttctgcactatgtcatattcatttgtcagttcgcagaaaatgatgaacgatcgttgcccaatgctctaaacagcaatatgttaattttgttttgggtatgttactgaccttttattatttggatgcagccactgattgttaatgcgctaggcccagtgtccaatgtttctcctgctgttgctcaaagcatggaacgtcctaatataatgcctccttccgtgtctatcagtagtcatgtaagttcagcctttataagattaagttgcataaaacttattgatgcaacttgctcacaagtttacattggctttataattgcagagtcctgcagaaaatagcagacttgtcgatgttaaaccacgcattgttgatgatgtagacaaaattaagagctggaagattccagatattgcagatccatctcttattaaacctttgcgattgcctgattccggaaatgctgcaaaggtaagttaatttgtggtatttgcttaatacactaaacaatagtttaatattttgggttgcagcgtttttaattagataaaagggcattaagtctccgaacagtacaaaaactgagaaaataagcttaattccaaatgtaggtggttaagctgatttacacgaacaatggcctaactttgctggcactcacttcaaatgctgttcataagctctggaaatggcagcgtagtgaaagaaatccgtcgggaaaggtatgtttttcggctgctcatgacttgaattttcaagtcacttgctttgatatttttaatagccttacaacttgcgtgtgtgtgtggtttttccaggctactgcttgtatcatgccccagttgtggcagcctcctagtggaactcatatgacaaacgacataaatgaaaataaaccacccgaggaatctggcgcatgcattgctttatctaaaaatgattcttatgttatgtcagcatctggcggaaaggtttcgttgttcaacatgatgacttttaaggttaacattttatgttcttactttggtttgtttctgttctattcaaattaaattaacaatcaccgggagaaaatttccaacaagaatctgtatgattcaaactggttaccttctcaggtgatgacaacttttatgccccctcctcctgcggcaacatttttggcattccatcctcaagacaacaatattgttgccatcggaatggaggattctacaattcaaatttacaatgttcgggttgatgaggtaaaatttaccatttggatttgcttcttagtaatccttatgtttcttgccatacacgaaaaaactctatggattattactcttctgaattgaacttctattttaatctgcctgtcattagctcggtaaaatgattatccaaaaatataaaaactaatctcttgctatatttgacaggttaaaactaaacttaaaggtcatcagacacggattacagggcttgcattttctcaaacccttaatgtgttggtttcttcaggagctgatgctcaggttagtggctcactgaatttatataaatttacgatgatatttatcggtagagccccttggtgtccttcctcactacatgaaagaataaagaaaaacagagacagggattaggaatttagagagattgaagagaatcaatagagggagagaataattgagataattcattcttaaataaacttggctatgacgtagataggcaattgaacacaaatatgaaacaaaatacaatcagaaaactaattctaataatttccatctggaaaaaaattagtttcgcgaaattgaataaatcctaataattatatcgagtgattgtaaatataagttcatttcggatacttatattggaattgttgtagtttctgtgctctacatgtaagtagggttagcgggaagcctcattttcaaattcgggcccaagttggtgaatttctggatattaaaataagcaaataacatggcaacgagtctaacattatttcattccagttccacattttctttcttcttgaaatgaatttgaattgttgttacgattttcttcattgttaatgagttcatggattcttggtaatttcactatagtggctttgaccagaaagatttgctgtaaaatgttctttttcttagaagagttgaatttattttaatttgattgacctacagttgtgtatgtggagcattgatggatgggaaaagaagaaagtaagatccatacaagcgcaagttggtcgtcaacccccgtcatctggagaaactaaagttcagtttcataatgatcaaacccatctgttggttacccatgaaactcagatcggcatttatgatagcaagctcgaatgtatacgttcagtaagttccgctcacttgatccttttttctagttaaaaaattgcaagttaccgacaataaattgataaaattctttctgtagtggtatccaaaagaagcacttgcggctcccatctcgagtgcaatatactcgtgtgacggattgctggtgtacgtttccttctgtgatggtgcggttggtgtttttgatgctgatagcttgagactcagatgtcgaatagcgccttctgcttacttacaatcgtcggttctcaggtaaagtaatgagaacatgtttgttaaaagacatacataattttgttccaacattattccttgatgacatcttgttctttctacttgtgtagcagcaacagctcggtctatcctgtagtcattgcagctcacccgtctgagcctaaccaagttgcactgggaatgacagacggctcggtacatgtagtggagccatcagatgtggagctgaaatggggcggaacaccttctcaagataacgggtcactcccttcgaattcatcgaacccttcactgagtggccaagcctcggaacaacacccttctaggtgattggtggtggtgatgatgatgatatgagtacagacaaaaggcagccatggttttatgaaatatttttagatattactattttcttttttttttggtttatttatttaatttttaaaaagtcgttaaatttgttgtaaatgttttgagtctcatttgggaaatgaagaagtgtagggagttgagttgggttgggttgggttgtaaatggctgtggttggaatgaaatacattggaagaagatgatgatgatcataacccttgagaagaggccaatttgccttccaacaatgttttttaggtggttttctttatacatatttttacatatatatttatattatatcatatatgtccctttttttcatttatttattttattttatggaatcaatacttttttcttttccaaaatttcttctacttaactaatatttgcattttctaacttattccatccttttagcaaaaatgagaaaaatttgaatcccaagaaacaagttcaatttggttattgcacaattaaaaaaaaaaattcccccagtccgatggtcggaccaatcggaccctatggtccgaccatcggactccaatctctcttcctctctctgaaatcgcaaaaaaaaaaaaaaaa

SEQ ID NO: 378536 - DNA, 3561 bp, Cannabis indica
tatgtaaacaccatataggccataacaatacaacaaacctgaaaggtactataatacatgatattattattattttcttgtaaaaattaattcatgatataattattttaaataacactcaggaatttcgtaaaacgatgccgtaatagtttttttcttttttctttttctttccctctgcgacatggctcctagaatcatcaccttagagaaccgttaaagtaaaattgtgcactgagtggtgagctttgattaaattgaagcaaatgcaaaagcttcaatggcgtgcttagtctccttcaccttccttcttcctttatcagcttcaaatgtaatctacaaggtaattttcaccttaatagtaaaatgaaaagaaagaaaccctattttacactcagttgtcccctttgtgtcctctttgaatgccgagaaaatataatttaaacaaagaattcgctaattgacagtacaattacagaaatatcccatatgtcatctctctagttattatatttttctataaattttaagcaactttctctgccctgcaatggagtttttaatcggttgcatttcttgccccccaaacacttattctgatatcatgattatggtttttctttgtcaagttaaactaggttacacattttatacggtaataggttttgtcctgctatttgttgataattttttggactaaacaatgtgtgaaatttgtcttcatagtttgtttggacatgattacaggagatgcattcaaagaatttagttttgggcagagttagagtctcaggccaaccatcttatagaacaggtttttaatttcttcttcaattttatgctcatttagttttattcttaccccctgtactgtacatgttaaatgtttacttcaaaatttcaaatgttaattataattttctttgaacttcaataacactctgaattttggtttttggattttgtgttttaaagtttcttgctgaaatgtggcaattaagtagtacacctaactgaagtctgcagcttcctttgttataatgatggaagaatgagcagagagactagaatgattattgatagaccaaacttgaatggaatagtttagtcttgaatttttcatttcttctcttttaagattgtcttctagatgccaatctctaaagctgggaatgcatatactttctagtgcatcttagtgatccactcacatgactagcggccaaagctttagattgagctatggagtgctcttaatttaggttttatcatagttcatgaatgttttccaaaacgagtaacttgactttaaggaaaatgtccaaatggaaactcctactgtaaaaagtatcacaattattctgcaaagttagtaaaatggagtttctcccaattacatgtataatgtacaacccattatccactgtttgaagtgaactctcaagaaaccttatattgccatttattatgaattgcatttgcagccacaaaacagtctgattctacttccagcagcataactgaagggatatcatctatgaattggagtcttaagtatcatccgttgataccctatagacgtcaatgggaagtaataccatgtcatttcaatgtagattcatgtacccaaacccaaatgatcataatttctggttattgggtgggaccgaattttgatgatggctggggatatgtagaagcttttgttaatccagttacttgatcttttttcgtgatttttagatttgcttctcttttactggattcttggtttctatctcttacctcctcgaattcccattgctcttttgagttttctttatttcataaccacattattggcaaatctcactgcctcaatacttaaatgatgcatacacattacacactctaatcttttgtttggtagaagaggaaaaggggaagaagaaaactttgagaaaaaagtgaaaagacagaagacaaattggttgtttggttaggaagaaaagagggtgggtgagaaaaatattgtaaggcacctacatagcagcaaatattatagtttcttggtcaagaaatattgtaggattaggcggggatcctattttaaaataatcataatgataaaaatgtggatgagaaaaatagaaaaacaagaaagaatagaagagcgggtgataaaacaatatacatttaaattgaaatgactatttgaccttatttttattccaaaataatgtgtataatatattttgtaattttactttttcttaccaaaccacaaattacctctattttattcacgattattttcttttctttcagttccaatttgttaaaccatatgattaaagtatttattttataaatctattaatgtcttaatagattactttaccaggaagagtttacccgaaagagttgtattggaagcaacgatttagggtgaattgattgaagcatggtgaccaaaacaccaaaattttccataaattttcgtcgaaaatagagaattatgtcaagagtcttttctctttctctgactcttctcttgataacataaccagagctctcaatggtattgataaagagctttccactcttgataaggttcccctcttggaagtttttttggatgatgaaatccaaaaagtttttttccaattgcctctggataaagcccttataataaatggttttaacactaatttttatcaaaaaaaattggaaccttgttaaatttgatgtcatcaaagctgctctcgattttctcaatcatggttaggagattgctgatttgaataaaattcttatcaccctcatctctaaagtcaaacttggatgcaccatcaaagatttcagaccaataagcctttggaacatcgtttacaagatcatatcaaaagctctagcaaataggcttgaactagctctcaataagcttaccagacataaccaaagtgcctttttctcggattgccttatatttgataacatgattgttactccggaggtggcacatgccataaagctccgaaaaagggtaggaaaggctgaatggctttaaagctagacatagcaaaaactttcgatagagtggagtggaaattaatctggagtatagaaaaatttggttttccccaaacttttattcattttatctctagatgcatctccactgtcacttacatattcaacttaaatggtcgtgtcttgagtacagtttgctcgtctagaggaatacgacaaggggatcccttgtctccttattttttccttttcgctctaaaggtttcttgtcccttatctgctagtaggagcacctcggtctgttgtctagtttaaaaatatccagaactgctcttaccatttcgcatattttctttgctgatgatagtatttttttatagtcaagccaacatccagtcctgtaatgcaatcaaggacattctcctccattatgagattgctattggtcaatgtgttaatttgcaaaaatcctccctctacctttcttctaacacaacttttagagactgttaggggtgttcgcggtgcgggtggtgcggtttttaacca

SEQ ID NO: 378537 - DNA, 3918 bp, Cannabis indica
gtttggtcgttgtttttggttttttgttttttaaaatttagtgttttaaaaaatagagaacgcaaaacagttttatagtttaaaaaaaaaactaagttttgtttatgttttttaactagtagattttagatcattttcttaagagaaaaaaatacaataaaaattactcaatatacttatagaaagataaatcttttaaaacttataaattataatgaggaaaaagtaatattgtggcaataatgagaaaaattaatttgaaagaaaaagtgatgaaaactcaaaaaaaaaaaaaaactttttgttgttttcaaaatttcttagttcttgtagctttatttttatgtattgttttcatgaaacaatgacaaacattcccacttgtgttcaataaacggtttttggttcttaaaaaaagaaaataatttttttagttatgatgtcaaacattctcttaagttcttcagttttctctttactctcccgttcttcttgtttctctcagtagtaaactacatcaaacagtataaaaaaattgaattgaaatggtttatgcagtttataatccagtaaaaataatgctgacataaacaattagtttaccatatacgtatttaaaaaatttacaaaaggtttcatgataaataccaatggaagcacatgacgggaaagtactgagaagatgctgtatcaatttcacagctgccaatccatgacaaaacatccataatagctttaatattgtgttgaagcctgtaaaaaaacaaagatacagtgtcagcagagatatatttaaacttcaacagaagcaagacacacacacacacaacatgaaaaatcaaagggatgaattacacttcattgtaatcgaatcattgctctaattgtgtgatcggctattaggacgatggagaaaataattactagttgtaattgaagattaagcacttactggtaagagagattgtaccaagagacacacagcaaagtgctgtatataagactatacaggtcaagctgaactttgcatgccgagcactatgcagagcaaggggatgcgtattgctaggtgtatttgatataagcacgcaaagaagtactattacgcctaagcaacaagcagaagcagcccagtactgcatcgttaagtgctcaaactctacacaccgaaaataaaacaaagttacaagactcacaaattgttaaaaggcataaaaatatacaggatggaaggaaaggaaacgattaaacggagataaatttccataacttttttgtcacttgagtaacatcgtaaacaatcaaacggagcaatattgattgatcttttattcgataattgaccagaataaaatgatgaaattttgaattcgggaaacaatgtatttctaccttcaatttcgatttccttcaaggaaactgccctttctatctgtatcaacttggacaacataacagttggcagggtaacagcacccaatagtataccggacgaagcacctggcctgaaatataattatacatatataatgagatagagagatttgtaaatcacacttttctaagttttaattaagcataaattcaacattacaaatccatatatcacccgaatctgaattaagaaataaaattagacagatattgaggagaaaaagaggaaaaataatcacctggtttggaaaagggggaaggaatttaaataatcggctccaacatcgagagataaggcggcgagtgcgagaagagatagggcgaggccatggcagaagagagaaggaggaagggagacgacaacgcatgttacgaagacgacgaccacagctctctcaccgttcagcagcgacgccatggccgccatttttaatttcaattttatttattaagaaaaaaaaaagggtacaaaattacacagatttgataaaatatcgagacatgaattcttttttagttacttcggaatttccaagaaactactgtcatttttggaaaaggtaaacatgatgtttgttagttgaaaacaacgacagacgttaaatgtaaggcgaggaaacgcaccgaaggcaccacgtttacgcgtttaaggattccgctactggcttttataccatatgactttttggaccaaataccgccgtagtttctactcaaagttaaaaaacaacaccaaacaaagggaagggtgatcgagagtgtgatttaaaaaaggtttcgaaactaaaaaattttaagatatgcaccctaatatacttaaaaattctatggactgagcataaaattcaaaaaatagttcaaaccgtttaaacctacctgccgaacaccactaaaattaaaaccgttcaaaccgaaaaatcgaaaaaactgttaaccgcccttaaatggtcggtttttatttcggtagcaaaccgaaaccgaccgaatttatataaaacataaataaatttatatatactatttaatttaaaaatttatgtatatataatgtatataaaagttatatgattattacattaatattaataatattataaatgaaaaaaaattagtttacgtgtgtatatatactttctaactctgctttccgtctctctctcgtgctcagttggttttttttttgcctttgtgttttccattctaaaggcaagctacaggtgaactaaatctatctcatatcatctcaatctcaatctcataaattataacaattgatcacatcttacaaaattttaagtctccactccatgaatcaatctcagtgagtgtctttttattcatcatctttctatatatccttcatatttatacaaaataaaatttttttctcatacattctctcaattttagagatgctaaactactagagtagagaaaatcgacagaagaaaccaaccaaaaaatagattatgttagaaaattagttgtaaaaaattaaggtaacttgaacttagtagtttcctattttgtatttagtagtttcctatttaatctcctagctttgtatataaacatatactattttatggaatacaacacacaatttaattcactattctctacatggtatcaaagctgattttaggattgagaattcaaaattagagtttttcacacatttgggtttttcaattagggttctttctcggaaaccatttttagagtgataatttgttttcactgcccactcagaaatattgcccgccaatctgcaaaaccccaaatttcagcgtccagattcaccgcgcatgggccccacgtgccgctgtttgtcgctgcccagaatcccacgcgccggcgcgtgagggcgcgtctggcatcttctccggacctattttttttcttttataatgtgaacagtaaaatgggacaaacgacgcctcattcttcgttggggcagacagagcaacaccggaatcatgaaaacactaggaaaacacccataaatccgacaaagaggaaaaattagtaaatcaacgaataatcaagacccaacaacaacatttaagctagattcaaaggaaacaaaagaggtaattacacctaaacccacagtattttaattttaaaataataaaaaaaaacacccaaatttagatctggaattcaaaaaattaaaacgagtataatctgaaaatgtataattatacatgccatttaataaagaaaagaaaaatattcatatatatcatccctgagaaacaattaataaggtaaattacaaaattcaaggttgttcttcgcttataaccataaattcattgttaattaggagaatcagccaaataatgaaaaggacaacagaaaaatgaattttatgtattatttttttagtgttattttactgttattttaattggaaaaaatgtcaagtaaatgaaatattgtaaaaaaaaatgacaggttatggaatctataccaatt

SEQ ID NO: 378538 - DNA, 11690 bp, Cannabis indica
aggaggaattaatacgatagaaaatttactcaatttactcaataaattttggatctacttattaggagctttgttacataggcccatggtccccacattttctcagataatatcatcttgtagactaaactaatttatttaataaattatttagaattcaaaaatagactgtcttatttgagaatttttttcaaagcttgggcaattttaaggagaaaagagaaataggggtttatttattaattagtaacctttgtgggtctaattaataaatatatttaaattttatttatttgataattattttggtatttaaataattagatgagataagtggcaaaataagaaaagatactttagtttcattagttaaaataaagtagcaaacatctaaatctaaagcccataatatatgtggccttatgagttagatatcaacctaagtcattattttagtccatctaatctaaacctagtcctaggtcaatccctatataaagaaagagaagagaattaaaaaaactaatgtctcttcttctttttctctttatttattgaagttcacaagaaataattctctcaaaattgttctaaaggtatttgactatcatcccacactattaaaggtgatacccaggcctttgtggaagactgtgatgaacacaatcgaagaaggagaagatctaggttcggttcttggcaatactctacgatagaaaggatcaagggttagagaattgaacaaaaggcgatatttagtttgtgtaatcactgtaaggtttcttaagcttgtatgtgtttaatttgaattgttttaaggttctatatttaggatgttagattagtattaactaacatacttgtttagtaaaagtaagatccttgttaaatatattttccaacatttctaatcaagggcttcaagtggccattgatcaaattctcaatattggccctactactgatgcttctatggctgggcatgtctctcaaattccttttaataatgagcctaatagtcaagctcaaacttagagagtttctacgggtgcttgtaaatgctaactactttgcccggctccaattatggttagttctgtgataactcatgctgataaggggaaaggcattgcttatcaagagagtcctagacctagtctctcaatagatattaactcctcttttagaggtttaactaatggttgtcctacttcttccattcctacttctgttgtgagagttaagaggtctttttcgaagaaaaatgttcaggttcaaaactcagttagaagcatgctgaagcgtgctagaactgcaaaggaagatgatgatgttgttcctattgctgctatcccgaatgaaacgatgagtgttgctttgcaaccccatcaggaaaaatgagtcatgtgagtggaatgctcatggttcagagagtccttgagcattctaaaatctctctcttttggtgaagcaacactaacttgtactcctttctgttatggaatctatgttatagttgggctaggaggtgaatgttaaaaacaaattttattttgacaatgtttttaaagtgcgcagcagagtcttagagggaggtcttttacttttgtggtggaatgttattaatgttaatattttaccataccctactaatcatattgacgattttgtaaagttggaagatggaatgaaatggcatgttgcttgtttctatggctctctttatcttgttaataaatctgattcttggactttgcttagtatacttttttttgttactcccatgacgccttgtatgatctttggggactttaatgactatctttctgtgcatgataagaatacttctactaggcctccatcatatgctatgactaatttttaaacttttttggataaatacaacatgttacctatagctcacatattggcagctattttacttggaagcatggtagtattttatagcatcttgattggtgtgttgtaaataatttttggaaagatatttgtccttcgacttctttgttccatttttccttttatggttctgaccataaggccctcaaagttattcttaaggatgaccttagaggtcatagtaagaataaaagttttttctttgtgaaccactagcctactgatactaatttttatcgtactattaacttttcttggcataaaaaattgtgatataaatgagggtgacaacctgaagtattttcttaataagaaaattatatgtgtaagtgctattagttcttggaataatagtaatagtaatctttggaataaaatcaataagatacagaattatcttgatgctaatgatattgtgggagttaaggcccttcaaccattccttgatactttgctttataaaaatgaaatctattagaagcaaagatcaacggttgattggctaagcgctggagttaaaaatatgaagtttcttctttataaggcttcgactagaaggaaaaataatttcattatgtcaattaatcttgaggatggatctgttattaggcacactacatctattgttagacattttgctagtttttacacttctttgtttttctctcaaggtccaaatttgttgcaatctctgacattatggttggtatatctagtcatctctcctcttctcaggtttccttacttgatgctccttttgtggaggatgaggttagaaaggccttgttatctttttggggataagtcttcttgattggatagtttgaatgcttatttttaccaaaataatttgtctactattagttctaatttttgtaaggctattctggctattctaaataataattcaaatatttctcttattaatgatacagtcattgttcttatatcaaaaaagaagaatgctagtaagatttgtgatttcaggcctattagtctttgttctactctttataaagtgaattctaaggttttagataatagtattagacttattcttaattctattatttatagcaatcacagtgctttcctttcagacagattgatttttgagaacatttttattgctaatgagcttttcaataaagggtggctttgaaaccttatatggagagacttttcacaaagttgagtggagctttgtaaagaccattatcaatcatgttggtttcccctgggtttatttctcttgttactagctgcatttcctcagtttcttttaaaattctgattaatggttgtctttcttaaacttttgtctccactaaaggaatcaggcagggggatcctttaactccttatttgtttttattagtggcgaaaggcctttttgttgccatttgtgtcaaggagcagactaaggatgtttctggtattgcaatttgtagatctgcccgtgttatctctcatttaattttcgctgacgatagtttgttgtttacctcggttaatgagagattgtgttcactcattaaggatattttagagatttataatcgtgctatgggccagtctgttaattttgctaagccttctgttctgttctcccctaacactagtcctgaggataaggactttttttgtagtcaactggggcttaataacgagagttttgttgataagtatcttggtgttccttagtgtttgggtagggttaacaattctatttttcacaatctgttccagaatgtttcctcaaagatgaatgtgtggaatggtaaattcttctctagagctgggaaagagactcttacaaagtgatggtccaagcaatcctgtcttatgctatgtcatgttttaaattagctaaatccacttgtaagagtcttcagagtctcattactaatttctggtggggtacttcaaataataagaataaaattcattggaaaagttggtctagcctgtgtgagtccaagttttttggggttttagagtttaggtatatttgtcatcataatcaagccttgcttgctatgcaggcttggagagtctggtctaacccttcttctcttctttcttctttgctaaaagccaagtgttttatgcataatgacttttttacggctttcaaaggtcactattcttcaattacttggaagagccttctttggggaagggaatttctcttaaaaggtcttatttggtgagtgagaaatggtaattccatcatatcggttgattccaattgggttccgggtttttctattgaaggaattgggttccatgtttgaaatctccttccttcctgactaatgttccatctctcagcgatgcactgtctctttttttattgataattatggaagttgggatgttaagaaactattccacaaattcctattgatccatcttctgatgatagtctcatggggatatcatccttcaggtaaatttgcagtcaattcagcacactttgtttggaaagcttgtaactatgttctgccttgtgcacttaacctatctaagaaatgtgtcattgataatcctaattgttccttttatgtgagcaaagtagaaatagttactcatgcccttataaactgttccagagctaaatttgtgttgaacaacacatcttttaaccacttttacaatgtgaataaaaactatatgttaagaaatttcttcttagaggtctggaaaattttgacaaggaaaactttggtttgttcttgagtattgtttggatgatttgatctaggaggaatgcagttgtttataataaaaaataagttagttgttttatggaggtaaaaggttttgccagtgggttttcgcaggagtacagagaaactcaaaattttcagccttgtaagagcaacttagaggaattggtgctgaggaatccttcaattattgatcagcctacttcaggagaatacaagttaaatgttcacagtgctcttgattctaaaaagcattgtactgatttgggagcagtggtgagagatttgaatgaggagcttcttatgcctgaggcccaagctttatatcatgcattcatttggtgtttagcaatcaggttacttgtttctcttattgaatcggattgccttcaattagtgacgaagataaaacataggtggaaacatcgatcacctcttcctggccttgttacaaaaattattgattccttatcttacttttctaatgtatctcttcattttgtaattgtaactttgtattcagttttggttttcttatgtggaagttacaattacttccaaaaaaaatttttttttttttgacaaagaaagaaagctgctaaaaggtaaacaaatgagaagagcagcaaataggagcctaaacagcgtcctcaagatcatcctctcacagcctaattgcctctcttgctaggaaatgagtggttgtgttgaactcccgaggtaagtgcacaagagacgcatcaggaaaattggagaaggactgtctaatctgtttaacaatgagtgcgagtgtggaattgtcctgccagttgccattaaccttcgaaaccaaattgaggcagcctgtataaattattcttggttgttgctgtagagacatgcactaggagagaccatgagcaagagcttgggcttcagcaaaaatgggcggaggagctccaggcttatgggaattggtagttgcaataacttgatgtaagccgattttgaggacacacccaatgcctgtgacaccacggtcttgatctaaggcagcatccacgaatagagcaggggtgtcttgttgaatgagttctggatgacgtagttgttgaggtgttgaagtagtggggtctggagaatgtatatgttgagcctcccggtaatcctgcagtaaagtataaacaaaatcttgcacattgttaggctcagtgcagtttttgaatataattgaattcctggtagaccaaatatgccaaagtatgccaatgaaaagaggaagatcgtctttaggaataagttggagggcctgaagatagtagtccttaatgtcgtggtttctgtggttggtgtgaaaatctttaaattttgactgcttccaaatattgcgggctctggaacaaacaacaagagcatgagagaccgattcaatagcattgccgcagaagtgacaagaaggttgcagaaggaccttcttgtgaaaagatttaaggcacagggcagaatgcaattgaaggctttccaagagaaatgtttgatcttcggggggatgggaagggaccaaagagttttccaccatcgctcaaaagggtttggattagaagaagagggggagtgaatagttgtttgagcagaggcaaggtgataagcagatttaactgtgaggatgccagagttatgaaaaccccaaacgagagtatcagtaggataattgagaaggggaatttggagaatttttttggcctggtaagaaggaagatagtgctttaggcgaggtacattccaagtgtgatcattgtttatgaaaaaggaaacaaaagatagatgagggtcgataggatggagaacggtaggggaagaaatgcccgagatccagataggggcagatataggaatagtactgccagagccaatcctccaaacaagaccctgcttaaggagttgacggccccaaagaatacttctccaggtaaaggaagagttgtagccctggggagcagacaagaaatcagagtgtttgaaataacgagccttgagaagggaatacaagatagtgttagggttggaccagaggttccacgcctgcttagcaagaagggcttgattgtgccaattgagatttcgaaagcctaaacctccgaaaaacttagaaaccgtaagagtagcccaagacttccagtgaattttgtgattattaggagaagagccccacctgaacttagcagttaattgttgaatctgggtagaaatggatttaggaatcttgaaacaagacatagcataggaagggatggcttgaataacagctttgatgagagtttccttacccgctcgagagaaaagtttgttatcccaaagatttagcctagaggagacactttggactaaataatggaagacagaattagtaaccctgcccacgcaatgaggaactcctaggtatttactaacaaagccttggcccatcaaatgcagagctgccctgaactctctctgggaaacagggggagtatttggggagaaaagaatggaagatttatcacggttaaccaattgaccagtgccttggttatagagattgaggatattgttaatggcttgagccgaatgatgggtgaccggggtgaaaatcatactgtcatcagcgaaaagaaggtgagataaagaaggggctcccctacaaattctaataccattgaaagttcccctagtttcctgcagatggatagcagcagaaaggccttcagcaaccagaagaaaaagatagggggacaatggatcctcttgtcgaatacctcgagaggaatggaagacatcggatagagtgccattgagggataagcgataagaaacagtggagagacatttcatgataaggccagtaaaatgtgaggggaatccaacatgacataggagatggttaagaaacttccattcaacccggtcgaaggccttctccatatcaagcttaatggctgcccaaccagtacttccagttcatctggtgtgaatggcatggattaactcattggcaatgagaatgttatcagtgatttgtctgcccttaagaaaagcactttgattaaggctaatgatggaatgaagaacattcttgagcctattagctagaactttggatagacacttgtataaagtattgcacaagctgatagggcggaaatcacgaacagatttggagtgcttctttttcggaataagaacaaggatggtttcattaatcaaagagatatcaccattgtgattaaggatgtgcaacagagcacgagaaagctcaggccccatggtatgcaagtttttctgatagaagagggaattgagaccatcagggccaggagctttatccccagagaggctaaacatagcctgcttaatctcaagtttaatgaaatcctcatacagataggcagtttgggtaggggagagggtattagttatcccttcgagaatagagtggattgcagtgtcactaaccccttgagtagtgaaaagatgagagtagaagttcgtaaattgggagaaaatagtaatagaatcctgagtaatagagccattagggagagtgagactacgaatgaaattagtctttttcctggcagaagctttacgatgaaagaatttagttttttgtcaccagcccgaagccaatccacacgagaacgctgcttccagtatatctcatccttaaaaagcagcctatctaactcagattgcagaagagcagcttgagaggaagactggggagtaggctgggaatcatttaggagccgattcaactcagcttgggttctagagatttgggtctttagaggatattgagagccactccaagtcttaatatcagagagacaagtggattgtttattgagaaaggagtgaagaggggagagagtggacggggaaggaagatgccaagaagagtgaacaatggtaagaaatgaaaggtcattgagccagaagttttccatgtggaagcgagtagacttgtgagacgccatggcagtatcctccaaggcaactttaaggactctatgatcagacccatagaaacccaagtggtgcaggaaagcatggggaaagagatccttccaagaagaagtggtagtgcacaagtcaatacgttctagtgtactaccatgcttccaagtgaacttattgcccatgtaaggaagaggggaaagattacgggtagataaaaaggcatgaaaataatgcatgctatgtgagggagggatgctagaagagtttttatcactaacagacaagaaatcattaaaatcacctataactaggtaaaagcagtgcagtatcatacaacgtattaacaagagtccaagtagcatgtttatgagtaggataaggagaaccataaaaaccagaaaagtgccacactatatcattagaaatatttacaatacagtcaatatgattaagggagtaagagataatagttacatcaaaatggttgttccaaaaaagtaagagccctccccctaatccatgccgaggtacttcaaaagcgttgtcaaaatgaagcttgttcctgaaggttgtaccacgacctgtcggccttagtctccataacaaaaagcattgtaggctggtgctgcttgaccattagggagagatttcggaatgctcgagggctacccaacccccaagcattccagctacagatactcatttttgtaggcggggccacgtagcgacacccaccgttgcatcatcatcagaaactgaaggaacaatagcatcctcgctagctacttcacgagctctcttcaggaagctacgagcagagtcacccacctggttagattggcgagtggaagagcgcctgggtcctggtgaagaggtaggagaggtaagggaaactggctcatatataacattacctggaggcccagtgcgtgggggtgaagggtgaatggaagtgggttcagcaatgccctttcctttgtcagtgtgggtgatgacagaagtggttataataggaggtgggatggtggttttggttaaaggaagggtagactctaaggagacggggtttgtgggcatgagagtgacgatggagtgggataaaggtggtgatggggatacagaagagtggaagccagtagtaggattgtccatacgaaggaactggtcaaccgcttgctgcaagctttgatcattgggactgccgcggggggaaaaagcttcaaggcgattggagttagagatctcaaagggattcctcttttggttgggctgggttgtagcacgaagagtttctttgtattcaaggatagggggaacgggaaattgtcacatcgcataagatatttgttgcatttgttataggtgtggtcaacaagtccacagaagtagcagaagttggggagactctcaaactggaaacttatccatttcggattatggattccacgaaaacggatagtcatgccgcgtctcagaggctttgtaatgtcaaatagtatacgaagtcggagataggggccaaagttgtcaagaagagatagaggatatatttcaaggagttccccgatttcatcggcaatgaactgagcaagctgaggactcttgcgaccgaaggggatattgtgagcttgaacccaaaaagggacatagcagactgaattgggggtaggggtgggagagacttcagggtgagagaaaaccataaggaatttgtcgaagtgccatggctgttcttcaagaacacggcgtctatcaccatcgcactggaaagaagctagatacaggctagaatgatagtcagagatttggacggggaaacgcagtgtccaggcttcagacatggccttttctatccaggagggtttgaccgattttggtgtgagaagcttgaagaacaagcagaaagagttggagtcgtttgggtggttgtgcgagatatggtcaaattcatggattaaactttcctcgtcttcgagcagggtaaggtggttacgggaagaagaagccattggaaatcggatagggggagcggggaaggaggtctgagagagaagaggtggtggatgagaatggggggtaggtgtggatataaatagacagtaaagtaattatgaagaaaaaatacctggagcagaaggggcatctcgattgttggaagtctctggaggcgaactcttcattttttgcaggagccgtctgaagggagaagataatgattacagagggggggtgatcttgagagagacggagcaacggttaacatatcaggtttgatacatcgaagagagaaggagagagaggtagactgagagtacattaaatggagaaaagatagagccgtcaaaattaaatgcaaacgggagagagaaagagcattaaagagtctctgagcagaaaaaaagaggggttgtttcctaatgattattatatatgatgttagcataattaaaaccacgagtagaacagagagattaaacctgggtttggaagaagagaggaacaagaaaaacttttgttgaaatcggaccagagccgtgcctgtaagagaggaacaagaaaaacttttgttgaaatcggaccagagccgtgcctgtaggaagcttcacgaagaagaagtcaatttgcttagttttgttgttttgtttacattagtcatcttccaaaaaatatatatatatatatatataataaatggctaatttagtaaactacacacatacagtgttcttttttaggtttgtcctatatgccaattacttttctgaattccacatcaattcggatcttagttaggcttcaaaactaaattgcaataattaaaacttatgaccccaggaatttaaagtagttggctcattgtggggccatactagtcaatgcaaacttggactgtttgcaggagtaagatcacatgattttcaacaaatatttgggtagtaataaaagttaaaaatgaacctaattaattacaataagacatccaatgcttaaatattttagagtatgaatgaatgtgtttttatttatttatggtgtcgattttttttttttttgtaaata

SEQ ID NO: 378539 - DNA, 1836 bp, Cannabis indica
ctggtaaaatataatccaacaaaggtaacattagataatttcttgtatcagattacagataatatgaagtcattcaaggcctacaacaagttcagactagagcgtacaaatgcacgccatcttggtgctaggttaagagggttgcagatagaaatagagttttagatttattctaacgaaatttttgtgtaatgaccacttaactttaatatgagaattagcaaataattagagtttaacttagaattagacttttaattattatttatgcaattgtggagatatatttgaattctatgtggtaattatattatatataaaatattgtgtttttcataattgtatacccgataatagtggaacgcgacgtttggccggtagaattactttattttgatttagcaccttagaaatagtggagtagtatagttaaacatttaaaatattgagagtttttgggattaaggttttggaccatttaattcctaattatgtgagttactttttgggttaagcaatgggaaaatagtcttttttcttaagttggattttgtcttttagtgagttaattgattaatctttagttaatttaaatctaaattctttttattattactagataattattttaagtttatccttcaatatttcaaaaattagagaaattgggaaacatactctttcctctctctctcttagtttggccctaggaagccctcaccaaattagagatatttccttcaattatgagcaaattgggaagttgttggctcaattctaggttgagatagtctttgattgtggtaagctttctttttccttggaatttttcttgaattaacttaggttttcatgtaactttaattttcagctgctgtatgtttgggaagtgagaaattagtttctggtgttgatttagagttagttgagttattttttttttgtgtgaattgttgcttgtggttaagtttggacaaactttgatatttaatggtgaattctatttcaaagacgattacctattttttactgcttgaagtatgttctttatgacttgaataggtggtttggagagttgggatcaatttggagtaaaattggttcgttggaaaggtttttagggtttcctccagggaatcgattaatcggttcaggctagccctgtagagccggttaaccgtttcccctagcaaaaccctaagattcggtttccgttttggaaattcggtttaccggttctagcagctttggaaccctaatttttgatgtttcagtgacattgagggtaatgccatgttatccattgataggaaaatttttagttatatttttaagtccccgaaaagtgatttagcgtatcaattattagttttgcgtctattatgacttaggggcctataaaccatcgagcaacagttccactcaagttgatcggtacacttgaattcggaatcgaggtaagattagtataataatgtgcatatgcgattacatgtttagcgtgcatatttatgaatgtctgttagataacatattataatagcgatattagtgtacatagaaatgcactgaatatcgtcaagatatgtttggctaagtactgattgatgctatcacatcggtatgactagagtaccaagtattggctaatattatggtcaatagtactgtcgtatgaacgttatggactcaatacgcgtgggacactggataaggttatgattgggtgtatgggcacctagttgtaattcgatttaagttatgcgactcacagttactaggactgttcataaactatcaaatccgcacgatccaatccaatccgcaaaatgcgga

SEQ ID NO: 378540 - DNA, 1549 bp, Cannabis indica
tctattcaaaccaaacctcattgtcacatacattattgggggataaattcaaaactatctctttttattacacattaatctaatataattccaaaataattttaattaataaatactccatgcaagacaataagatagtagctatttttctcatcaatctttgctttaatattatgttaagaatcatggggtgcatctcaaaattaattagtgatgagtagagtagtacatgtttttatatacggctcaatacttttatttttgatttatgtgggacaatattctctaatagtctcttttacaattaaagtactaaatataatctcgcataatttattaaaattagagttcataatgcacatagtgggaatatgacatatgaaactctgtataaattaaagagtagtaaaataaaagtaaaaatttaaaaataggtatagagtgtaatttcttccattattgtcctatacgccataattatagtgaaagagaaagattggacttctaggacaatggctctctcctctattctcaaaatttaattggtatattttattgttattaatataattaaatatcaattttatataataaaaaatataattagctaattctaaaatactacttgctaaaaattattgatgtccaataatacacttctcaaaaaccatcatatttgtatagaaaaagagtgatatgacatgcatggaagccaacggttaaatatacatgttagttaggcatttaaatgaaaatatgaaaaaaaaataataataaaaatcaagaaccacatatagtcatatagatatataattgttagaacggtggtgctgattgatgatttgatcactttcccacacttttgttcctacacaatttctagtagggatgttcacaatttctagtaaggatattcatccttgtgtgtattacattaaattaaaaattttaataatgttgattgacacgtaaaagttattgatttaatttaatttacacgtatttaaaaaatatataaataattaatattttaattaaatatattttataatttaataaattaaatgtatattctatttatatttatataaaaaaatataatttaaaataaaattaaatatttcttgataaatataattttttttctttctttgaatttattatttgttaattttatttatttgttttaatttgttgtcggagacaatacaaaaattatttattttattttgttattagttatgtgaaatttaaaataatcgattcaaactgtactcttgcaaattagtagattgaatttgaattattctatggattgattgaattcaaaatatgaaatttacaattattgcagatcgaatatattataaacaaaatagtacagattgaattgaatggacacctataattttttaaaaccatgtgccagttttaagaggttcatatagtttgaataaaaacagaacaggttatgggcgttggggcggaaaatctctacttggatgttgggagcgaggcgaaaaatctctagtggagcgttgggatggat

SEQ ID NO: 378541 - DNA, 2531 bp, Cannabis indica
tttattttttatttttaattcatttcatatatattaggaatagattttagtaattttaatagaagttcctaaataattattatgagtttttaaaatgagatgtgatataaaaagaaatacatgggatttaattttagccttacacgtgtatcatttggtatttaatttgtcaaaaaaaatataatatttaagtgtataaaattaaaaatataaattattcttaccacaaatttttgttttaaaaatatcctattaataatttttttttaacataataactaattttattgctgagagttaaacaatacattgatcattatacaaggaggaatatcttccaaccaagaaaccttgtttttcatctatagtgcatatcttgctaacccatgtgttgcagtattactatttcgcatcacatgttaaaaaatgtattcctaaaggcagataacaaggacctaataaatataataaatacaatcttattaggagacactctcagaaagagaattgattgaatttataataaactttttaatttcaaaataatttttgatttgagattacagtattactctctactaaagaaaccaaaaagcctaattgtaaatactattttaaaacatataaaattgccaacgcttcaacttttttagaggagaaaaaactagccaatgatttagcagaacatctcaatggaaagctatcaaaatcacgaagtaaaccctaaaactaataatactgttttcacaacaaatagtagcatctacatttaactttagtaatccaacaagagatgctaattaatgaataactcgtaaaggaagaaaaatcttagccgtttgcttatatgattttgaacctaaaaccaattatcataatattgaaatgaccaacttaaaatggttgaagttttcttaattgatacggtgaaacaaaaaataattaagaatgtgagatagtcttctaagagaaacaaggcttaacaaaattctaaaaatctgaattagatatacacacttattacacattgtatattagccatttaaaatactatatagtatattatctataaaaataaaaataaaataaaaaatccatttttcttttcaccacctcaagaaatatcgaaacaaaataaaaaaaaaaaaatgaaaacgactgcgtattggtggtcttgggttggacttttctaatctttcattcgttgttgtcaagatcagataggtgtgatctgacttgtcacaataaaatatcaatatgaattagaattagttatgtacggaattggttaatcccttctcttcctcctcctttaaacaaaccactaaccaaaaacctgaaccagaatccaaagccatgactaaatccatcgtcttctgcttcttcgttattctcattgtttctgcttcttctgaaaaccctaccccaactccttctgcggtccacgccgagctcaaaaactttggcttgcccatcggtcttctaccttccaccaccgttctcaactacaacatcaaccagacctcaggcgatttctccgtcaacctcggaggtgcgtgcaagatcactctccctcctgataactacctggccacctactccaagattattaccggtaacatcgatcagggtcgaatcgcgaagctcgatgggattagagttagggctttcttcaagtggtggtcaattaccgggataaaatccagtggcgacaatttggtgttcgaggtcggtggtattacggtcaagtacccgtccaagaactttgatgaggtcctggcttgtcagggaaagcactcggcttcctaagagggttagttctttcttaactctcctcttcttttatgtatttaaatgttgaaattgaaaaccaacggagaaaattcatgttgggtttagactaatcctttcctgggtttattgaaattaccgaactttttgtttgttagtttatttattgattttgtgaaaagcctttttgctagtatgcatctcttttgactaaataaataaataagctttttacatatattggaggactacacttatatatgtgtgttgctacagatgaggttgaaatctagttttgttgatttttaaattgaaaccaaacagagtgcttcgtggggtgggtaggacgtttgtgttatattttagtgctctacttttagctctagaaagttggtcggtaaagattttgttgtacaccaaatgaccaaaaggtttatacgtttgagcatatgctcgttattgctcaactttttttgtacagaagaaatcaattatcataagttgggtcactatggtcagatggtgaaagttcaagaccactttaggcatacttgatctttaagatctataagaatagctacacagtttatttagttcaagctttgcacatataagttacaaccttttgttccctctttaagcaaagtggtgttagagacttagatggggttcggttggaggtaatgaaatggaatagaatggaaattaaacaaattttatttcattcctttgtttggttg

SEQ ID NO: 378542 - DNA, 1084 bp, Cannabis indica
cttatgtttttccttgaccttgactaagaccatagaagattggtggaaataattagctacaagattgattgatagtgggaaggatctacagtcaaatttctgcaaacagttcatttttgtgcgtgacaaggacatggaagttggttctcttaccaacgtcaactagcaacataatgaaagcctaaaggattttattcaaaggatgttggaggcgaccactaagaccaaagttagtgatgacatgaaattgatggccctctaatctaggttagttgtccgctctctggtatggggagaaatccagagaaagagagctcaaactttgagtgagtttatcgaaaaggcacaaggcatcatcaatcttgaggaagcctacgtacaagcttttagagtccctccggctccagctccttctgggactgcccctaacttcacaccccaagttctacctccagccttaactcttctaggagctcagttttttccccaacagtttatggacctactacctctggtcttgcccctacgcaaacccatttttttgggtacagggagacacagactggatgtagtattgctccaagacaagcaaaaactgaggtcccaaattctaatgcaagccattcttgaaagtaaaagagagagtaagagccataattggaattattctttataaaagccgaggaaggagtctgatccaatatacatcaagtatacaagtctaagaaacactcgagaaaacgtttacaaagcaacctgaaagatggtccattacaagaaacagacaagattaaaataaagaatgcaagtgtcacatggagaaggatcacaacacaaatgagtgtgattatttgaaagatgaaattgaagtgttggtccaagcaggatatcttgggcagtggattcgcatctcgatcatctatcctagacagggggttgtacacagacacataatcgttcccaaacaacataaagttgtaaatcctttgcaagggggtaaggcgttctaaagctccaggaacatcattgtcgacacttcctgctctgccagcctccgctggggtggcattacttgcaccaggac

SEQ ID NO: 378543 - DNA, 1241 bp, Cannabis indica
aaatgttcaattatagtttcagagtctcagacacaactcatatattaaatagtaggttgttaagttttttgtttttgtttttaggctatataaatttactgctcataatgtagttaaaagaatatttgcttataatttaactggaatagtgaaagtatctactatactgtagacattatataatgatcgagaggtctaaattatttttatctatgcgacttttcaaaaaaaaaaataaaaaataaaacacgttgagttataataaaataagttgtgatttttgttacaatatttttagccacatgattttttaaaaataacacagatatgataatacttttttagtcacaaattttattttttacaaatttataaagtaaaaatacgttcgtaattgttcgaagataagaatttaaactaaaacaatacatataaactatatttattgtctacattacttaagaaagtatttatacataatttaatattgagtattttagtttgacttaaaatatgtacaaaaacccatacgtattaaattacaagacttattgcattaattagattaagtagtgttggtgacattatttggtgccccataccaaaattatcaaaaagaaaaggcgatatatttttaaatttcttaattttttaaatagaaaaagctatactcatttatcaactttaaaaggttctccttctcctcacacttttgatcagttcgatgacttagttctattaggtgacgatgtcaaaaatagtttgaccatgttattcatgaccattgactacagaagtatagcatttgtgtatcctgtatctttaagggagtacagctcggtgttcgcatggaccaccaattttttttaaaacttaagaactaaacatcatggtcacgacaaaataagttcgtaggtatagtggagatatctaccatatctcagagtaattttgagcaaatacctatctagtgatattatgaacaaaaaaaattataagttcttattatcttaattaggaaacagcttagtatagttatcaatctcccatcgtgttctttttatagtgttttaattagggctcaatttgaattatatggattaaaaaaaatattagagtggtcggccactgaaaggactaatctttagttacaattttgtcacttttttattcaaccagttattcttctttcaataataccatatttttaatttcaaccctataaatactaaaattattta

SEQ ID NO: 378544 - DNA, 5207 bp, Cannabis indica
aaaaaaaaaacgtatatttattctaaggtaacattaataatattgcatggtactagtttaaatatttgtcaaagtatttaccatgtatgaaaacttatgatttattacaaaagaaggggagatgaggagttcatgcttgttgtgagaaggatggaccatagagatattaataaaattaaaaaaagaaacatatatacatatatatatatattggatattgtaatgaaataagtgatatatgtatatatatatgtgtgtgtgtgtgtggggtacctgcaaagaaagaggacgacccttcttgggcattttgttgtggtggtgatggtgttggtggtgggtgtgggggtgatggccgacgcttttgtagtgaacactattggtatctcgaaagagatagaagcaataagcaagtgaagatatgataggaccaaaggttttttctagtaccgatgttgccataacccaaaccccctcttcaactatttatactactactatactataattaatattatacaacacaaaacaacaaaagaaagatagggggaaaaccaaaccctcttcccttagctaatattacttagcttaatcacaacatattccactgtggtgggtggcttatccttgaggtttatctctttctaatatatattccaaaagtatatataaaaattcaaataatgagagaaagagagagctaactttggttatttcttaatgtgaatatggtttgaattaatttggatatatagtgattattagctagggagtaccctttggacagggaatggtatcaaaacttgtattctcacaaaatttaatgcttgaaacgtgggtcaagataaatggactcttgctgacaaaagggaatataagcttcattagaggatttggttttggatgggcttaaggaagaaaattaatatggacagaagaaatatatataaatatatatatattatttataatatatataataaaagctgggtttgatgcaaagtaagggaagaacatatattctgaaaatcttccctcctcccctttttttttctcttctctatcttatgagagaatcagtaacatgtatccacagatatatgtgtcatactgtcatatatgtatatagatagaacattagacgctatattatttttatatatacaaaagttatattctcatgatgctattatatattagttaggcttgtttatatatgttattattttatgctaggcattaaaaaagggaatcattaggtttggccatatactaataataataataataataataataataatttgtatatagagcaattaagttctaaagagaatatatataatcaactagctagctaggatttttgtgaaaattaaacataaaactaagggctcgttttctacgccgtattgtaatgtattgtattgtattgtattgagttggattgtgttgtattgtattattgtattgtattagtattatttaatataatacaatgtttggtattgacttgtattaattgattatgtaaagttataatatatttttaatacactcgattccaacaccaactatgggtccgagtccaggtccaggttcggggtccaggtcccgggtctggggtctgggtccggggttcgggtcggggttccgggtccgggtctgggttcgtggtccaggtccggggttcgagtccgggtttgggtccgggtccgggattcgggtctgggttcggggtccgggctggggtcccgagtccgggtccgggtctgggtctggggtccgggttcgggttcagggtccaggtcgggatcccgggtctggggtctgggtttgggtctgggatctgaggtccagaatctgggtctgggtccgggttaaaaattggtgttcacctcaaattctttgtaaatattataatacaagctaatacggataatttattatgtattaaataatacaacatatattgtattaaaaaatttagtggtaataattaatattatacatttcttaattcaaacatagtattatttattatttaatagaatatgacgcttatatggagtaacaaaggatgttatattatatacatagtcaatttattataggattcttgtccacggcgccaatttctttctgggtcactaagaatagaaaaaaatattcaagtgcgctcactcaatatatgttctcgagacaatcgcatggccgaaccatataaaatcttatgctttaactttatactaatttttccaaaagaaaaattagaaaagcttctagtaattttctttaaaaaggaaaaaaaaaatacaattaatttaatgagacttatgatttcgtaatgatatatatgatcgagaagataaaagttgagaaagacaatgtcaaaatcaaacatttttcatttttgtgttgtttggtaataattacttataggaggaaaattttattttgaaattacttactattctattcaattatttttatgctttttctcgattagataatgagattaatgaaattaatcttattatctatgctcattttcccccttactttaggtgaacattcttaattttttttatgcataaaaaatatattattaatagtaagcaagaagaataattaagaaaattatatgaaatgaatgttatccatcaatttgtaaaatctagaacgaagtagaattgttatggaattatctatttgtcatatttttgtttttagaatatagaatgcagaattattttcattcaaaccaattataaaatattttaaaccaaaatatatttgctgtggaaaacaattcaaaagtacataatttggtcttgaataatttttttttatttattttgccgtctaacaccactaattcagtcactaacttcacttacccataaatagaggaagtaatgatggcttatttcttctttttctttgattggaactataggtactattaatctaattacttttttcaatttgggagggaaaaaaaccattgaatatgcattaaaatttcaagtctataataaaatatatcacacttaccaattattattattgtttatctaaacttaccaattattaattagtatttaatattatctacaaaatcggctggctcctaaaagaatgcttttcctctaatttaatggagaagtcatcatgatatatgttttatgccttttaatttcttaattataacaacatgattactcattaaaatatgtattgtttgtcacgccgacctaaatgtggtactaaatcataccaaagttgtaaaagttggttgcgctttttgagataatatgagttcgatatgatacgaaaaatataaatttgaatcaacctagcataatatgtaaatacaggcgaattaattagaaaaaaataagaggaataatttgatttatgcttgataatttgacaataattataaatatttatttatgattttatgttaaataataataaatgatgcatgcataattttaaattgtaaatttgaaagtatattgatttatttaagatttgtgagttattagtagttgtttaaattaaagtgaataatgaatattgttgaaagtataaataagataagtgtatttttttaaaaaaaaaaacttataaattataagattgaatctaaaatttaaacaaaaacttacactttttcttagtacaaactaatatcttgaaaattagaaagggtaagtgtttttttggtaattcaatgaaaattttattacaaatagaacaatttttacacttgaaacaattcaagaacaactaacgtgatgtactcaatctctccaatcaatctaaattaactatactagctttctttcttttaaaatgaaaaagtatcaaataaatatctctctttatactatttacaataaaatttacagtatacatttggctatttcataaagagttattttgaggcacccgaatgttgtaaatgagagtatttagaacagccttatagactcctcttctgtaacaacagtttcttttgcaatttctcacccatttcaaacagtgttctgaatcattattagagtgagtattcatacctgcctagttgcacacaatggtttgtattttcttgctatatccacagccaaaaaaagagatgttgatgtgtcttcaatttctcatcaaagacaaatacaattggcagcagtgatgatatacctaaagatatactgcaatctggatctaaaccatataattcatgagaaatctaacaatagaataaaaaattaatggaagcgtactagagtctatagaatcgatttagaaaggtatagttttctgaatttgtagtgaaatctttctctggaacctagtctcttgatgatggaattcaagagtgaaaagatacgatgtgaattgtggaccattacttgtttattaataactgtaaaaacaataattaacctaaatgactatttttaatttggaccctgatcaaattagaaattgtccctatggtatcatattaaaatcatgacaatcacgcccttaagtcataaactttattcaaaaatagaccgcatatatttgactcatttatacgatgaccctacacacattttatatatacaattgtgatcctatataaataaattcccaacaataccgaatttggacagcctctccctagtttgaaatcgctttcagcatgctaactagctgctgaattttgtttttgggatcgtcaatctatcccaaatgaaagaaaactatttcttctccacattgtctcgcagttagagtttaaaacacatagtagagatactaaatttggttctagctattgaaccgagtcatgttcattcggcctttgatcatatccttggtcatcacaattttcttccagtacgaactggaagtttatggagctttataactccaccagtcttgagtcttaatgtagaacgagtaaacccaactgactcaaagactatctgttttttttagatgcattccacacatactaatttgttttatatggactaaattttattcaaataatctaggtctttatgaaaataagttgtctgaataggatatggcataacttgagacatgacttaagtcaatacaacttgactcaaatttttacaagtaaagatcaagatggtgcaaagatatttgagattcgaacaaaaataaagcgagcaaatggcatg

SEQ ID NO: 378545 - DNA, 8106 bp, Cannabis indica
catttatgttatcattttacatttgtgcctgctttataggcggtgctacattaagttcataagaaagagcaatgacaagaaagggctagagggtcaaaaagaacctaagaaggtatatgatttcatgctcgactatgttggtgtgtttatctctcgagcctttttgatgtaagttatgttcatatatatgtatataaatgcgaaagcttatatgattattgttaatactggtgtaaaatattcatttgctgccgtgtttggtcctagttatgtcattgttgtgtttttaacaaaccttgtctaaatttttgttaagatataaatgtagagtgctatcattcaagtgccaatgtttcctattttctttttcttttgtttttgaacaaactccgcaagacagtttaattcaaggctaaaagtttgaagcatattctcctgcggtgtcattttctttttataataaataagcctttctcttgtgccctgacgattcttatattgttgaaggcttctgttttttggttcccgtgtcggagttgattacaaatcagtggataaaatattatgcagaatcagatactctcatattttcaatgattacaaaataatagatgacatactaatttatatttattttttcagttaccgaattcagattttcatttcagaatcatatttttttaaaattaccgtgttcaaatcaccaaccaatcaagccctgtgtttttctgatggtttgatagaacgaagtgatgggtgttcgttcccgtagtggtagtgatcgactaagaacagtttggacccctgaaatggatcggtatttcattgatctcatgttggaacaagtcaacaaaggaaataaatttgatgaccatttgttcagcaaacgagcatggaagcacatggctttgttgtttaattcaaagtttaagtttcagtacgagaaagatgttcttaagaataggcataaaacgttgaggaatctgtataaggctgtaaagaatctccttgaccagagaggctttaattgggatgaaactcgccaaatggttactgctgaaaacaatgattgggatgaatatattaaggtccacataactaactttaaaccatcctactttttttttattaataattgtattcccttatcttaaataaattgtagagactatatgtgtcggcattgcattgcaggcacacccagatgctcgttcgtttagaataaaaaccattccatattacagtgatttgtgtaggatatacagagatgcattccctgagccaacaggtaatcaaaatgtcattatatatcagttgggagattcttaacttgagctgtagtttgtcgttgttactcaagatgtcactttccgttactagaacctttatatagaggctagagttgttcatctgtactgatattgaatagtaatagttaaatgtcaattttctttcctctctttcttctttgctctttcttttatgcagttattattttttttttacaagtaataatagatgacttaggctagcaatgagaatgagttgtttgatgatggataagtaggtaagaatgtgcctgagggatccttgctttcaagtggtaaagtagctattgaagttacacagccaagtgaagttggggatggggacacactggcgcttcatgatatcatgattgatgaagattatggaataactatatccgagaaagatgctgaacttgaagctccacaacaggctatgccgagcttgagaggaaccacattgagtaatcgaacgagaacttattggcagccgcctatggaccggtatttcattgacctcatgttagaacaggtgcagaaaggcagcaggattgatggcgtatttcggaaacaagcatggatggagatgattgcgttgttcaattcgaagtttgggattagctatgacatggatgttcttaaaaatcggtacaagactttgagaaggcaatttaatgtgatcaagaatctacttgatttggatggttttgtttgggatgagacgcgccaaatggtgactgctgatgactgtgtctggcaagattatatcaaagtatgtattatcatttggttccctcttattaaatttcacgtgtcaatgcaaaatatatatttgtacgaaaaagaatgcagtatagattggcaaaacaatgaaaatgtattaagagtgtctgaaatgataatatgcaggatcatacagatgctagacagttcatgaccaggcctgtaccttattataaagatttgtgtgtgatatgcgatccatgttctgatgaaaaagagagctcttctgggcaagggttggagcaacaaaatgatcaagatactaggtctccagctacatcagtttcaaacagtgaatttaagaacaagcgtcaactagagaactggtcttcccttcctcaatcaaaaagatttcgggaaaaagatgatggaatggctagtgcttttcgtgagatggctactgcagtttcttctctgtcagataataagaaaactgaagagaactactccatcccaatagagaacgtgattgaagcagtgcaagctttgccggatatggatgaagagcttgtgttggatgcgtgtgatttgatagaggatgagaaaaaggccaaaacttttatggccttagatgttaagttacgtaaaaagtggttgttaagaaaactgagaccgcaagcatagccattttatttgtgctgtagtcgacttttgttttggtggatgggctactcaggtgaattagggtgtcgtgttcaagaaaaggaaaatgaaagaattcacatcgtagagagatagagaggcagatatgaaagaagcttgtatctatatatatctacattatttgttgaagtgattcaaatgattagttcaactagtaataataaagagtatagttttttatcaataagccaagacacacttgaagatagtatgagactcagctgaattgtgcataatatgcatttcattgatgtttttacctatttatgtcaatatatcagtaagtcaaactaatgcacacgtgatactaaaacttaaaatatgtcatatgccacatatatagaggtaggtgtacacagtgccacaaaaaaaaaatcgaagattaaggttagtttttttgggcaagaaggtgagagattaggatagatggaaagtaagataaaggaagagtttaggatagaaggagaagacagtaactcaagttggaaagataaaattaccataatcttatttttagtataaatatttattatctttttaaaaataattttagtatttgatatatttaatttatctttttaatcctccaaatggattaaattttgtatattcactttattttttttttttaatttttacttttgtttttattttaattaagatatactcacttatatgtgataaaattaggtagatagtgatggtatattgcacaactaatttataaaaatagatacattttaataaaatataataaattaattaattcataaataaataaaaaatatttctcaacttatctggtaaagttttgtaaaagtggaccccaaatggcagatatcacacataaatagccaacaagtgtgtaattttctctttaagaaataggctggcccaatacaaggcccaaatggataatgaaaagaaggttgagtgagtgacagtgtgttaagccctagctttgtgtctattcccgccttctttgctacagctttcccgtcattctcggctaaactctcactttatcgctcttggtccatagccatagccatggccaccacaagcttgaactcaactacagagctttctaggtccttggctgcttcgaatggaccgtcttctcagagaatcgaccggaaccggcgtttcgtatgccgattgccgtctgtgtctttcttcaataagttgtcgaatccttcaatggaagttaaaagagttacggcaggtgaagctttgaagagcagaggaggcataatttctatgtcgaagagtgagagtggtgatactggtgttggtcttacatataaggacgctggtgttgatatcgatgctgggtcggaacttgttcggagaatcgctaagatggctcctgggattggaggcttcggcggtctctatcctcttggtatggtttttactgggttttggtaacttctcattaaacttattgttttgatgacttttcgcacgaagctctttatatatataaattgattttagtcttctttttatatgtatatatatatatatatttaattctgaatcgactgcaacttcggttctcttttgtaatcctctaatttagactgttctctaattttagttctgtgggttggtttataaacaggtgataagtatctcgttgctggtactgatggtgtgggaactaaacttaagcttgcatttgaaactggtatacatgataccattgggattgatctggtaaattttgaaatgagtcactttaacatccttatgtcactgctcattgctagttggtttttgctaattcgctttaacttcaggttgcaatgagtgttaatgacattgttacttctggggcgaagccgttattttttcttgattactttgctacaagtcgccttgatgttgatcttgctgaaaaggtaaataccaaatttcgtcatagcttgtttggttactacttacggataagaatcctaatactttgattttaattttgttaaaggttataaaaggcattgttgatggttgccaacaatcagactgtgctcttctaggtggagaggtaatttaaatgattttcatgacagtttctttgtttcaaacaaattgtactttcttatttgtttgacaaggaaatattgttactaatactactgacattaagcgatagtgaaatagcgttatgtttatttcacttgctctgaaaattcaaactttagttaccatagtagtttcagtatttctgttcatgcacaaaaagtagtgctagtctctttagctggtctgagttaatttatttgtttttcagactgcagagatgccagatttctacgctaatggtgagtatgatcttagtggttttgcggttggtattgtaaacaaagattcagttatagatggaaaaagcattgtggctggagacgtactcatcggcttgccttctagcggagttcattccaacggtttctctcttgtaagaaggttggcaatttttaaggaacttatactgcgaggtttccaatgttgtcagatacgtaattcacattcccatttatgtgatgaaatttctggttgtatgtgaacatagggttctggctcatagtggattgtctttgaaggacaaacttcctggggaaggtgtaacattaggcgaagctttgatggcaccaactgtgatatacgttaagcaggtttaggttcacctccccttcacactgtcctctgtttttatacgtttctacaatactttctaccctgtttttaccgtcaatttcctttttaataaataaaacaggtacttgatttgattagcaaaggaggtgtaaaggggatagcacatgtcacaggtggtgggtttactgacaacataccacgagtgtttccgaaaggccttggtgctgttattgacatggattcttgggagattcctgctgttttcaaatggatccaagaggtaagcagatatattgattttgtgtctgtctctttgtggaggcttaagtgacaaaaagaaagaaaaaacaactagcaattcccatggtttatgctgttcacattatttctgaaagtcttaaaattaacttatgtatttttacttcaaatttcttgcacaaggcgggaagagtagaagatggcgagatgaggcgaactttcaacatgggcattgggatggttttagttgtgactccagaagcatcccacagaattctcgaggaaactgccaatggagcatacaaggcttatcgcataggagaagtggtaaagggtgaaggagtgagttactcttgactgctggaaagctgtcactttatggagctgagataatagtatgatgcagctcaccattttcttgcaacttcaacacagaaattttgaagatttgtatttttatttgctctgttgtccccttaacttgggcgtcaaattatgcgtcaactgtattggtagagatgagatggatgtaaagttaataacagtaaactggatttaaaataagaaaaaaggatttggttgatcaaagattgaactcttataacagattactgattaagttagacaattgattttaaaaatatccgcataagatagtgcaaataagattttataaattacatttctgaatcaaatgacttgttagtgtcccctaaaataaaatgttttacaagacatcaaactagcttataacgcatcaatactacaaataatcactgaactttattaattcaatgctctaatcaaactgtcattttttttggggttcctcctcattctatggcgaccaaccctaccttggccactttcaccagcaactacgtggaagctttggagatcgtccattgtcctatctggtgtattggacattttcaacttcttaagctcaatacctgcaggaacacaccttggcacactgctgtcacagagctctttaatgctagttgttccatcttttatggatgctacattgctccatctccttcgccttttctcttggcctagtttggctttacttccatgttcccctattttcccatttaggaaaggacccttgtgagttctggggtcggagctcttagcgcaatggtccctttgcagcctgtgttcatgacccatgttctccttttctggttcatatctatttaaacttcctcggcaaatgttaggagaaatgcagggcttctctacccatttgaggatgccatttcctgttgggcatctaataggaatctgattacagtgactcacaggaactggtggggccaaaaccaaaacctgttccgggttccttgtcaccccacaaaatgccatattcgaaacaatttcacttcgaggtttcccattagaatgttttttgatgctgccaaaccacacattcaagatcttagtatgttttcatttacacaagctcagtaaaaacaagtattcaaaacaaagaagtgagagaagtacctgtcagagaatggtagttggagtagaccttgaccatggtcaataactctccaatcaatccctctctccttgagcacaacttctctaggccttgcagacccaaaagggtttggtttctgagtttttgtttgacagaggaggtcagcttgagcttcttcttcttcttctttctcaacctcatcagcccatgaaagtatgcacacgcttttccttcggctttctgtcatttttctatcctcaacggttatctttcgaaaaattggtaagcttgaaacatggggatgtgttataagctactacagctaagttgtaacggctagtcaaccagccgtcattgtctatagctgggccagaaaatgggccccttgtgcaaccccaaggcccaaatcactaacatgtcgtttccatgggagaccagaccaagtttctttttctttatgttattcgattgaggacaggtatcactgataagtgttctttttcttttaatgctattatttatttttcaaacgtacaaaagagtgagaagagagattctttgggataatctttcttatggctgagagaatgtgcttgggataagtactctttgtggagcagcaaagcttgtgagtaaatatgaggtctcaagtccaagagaataatacaatacacgcaatggtattcgattgaggcaacgcttaatggaccaagtgtaactatatgcacaggttattgaaaagtgaaaaggttgttagtttagtatcacattttacattttttaatttaattatttggagaattataaaattataaatactcatcattaagggcatttttcatttttacacctcaaaacagttttttttgttttgtttttttttttttgtatttttttgcatttttacgaaattctacatagaaactccaattgcaacta

SEQ ID NO: 378546 - DNA, 2291 bp, Cannabis indica
ccaacttaatctatctcccccagagcaaggataaccaaacattgtagctatctgcttacttttgcaggattgtctgactagtaacaagtttatctagttgacaaaggcatttgccttgtgcattattacgaaaaccaggaaacaatcatatgaacaacaaacctcaaaagcaccagtgaaagtccagcggagttgatttgtctgtagcctagggacaactacagacattacgggcattgttggcctatactttgcaattaacctaccagaataccaaaatgaatgaaaacagtcataataaatatctactccataataaaaataagaaaagatgaagcatcaaaatttaattaataaaataaacaaatataaatatagaaaaccttgcagctctcccagttgaagtgaagcaaataattacagaagcctttactttgattgctgcacgtacctgcattgcaagaacaaagaattaatccaacatcatgaaaatcaaatgaaggaaagtatatatttctgttatctgactctcctttaatatagaacaagaaaacaaagattaagaagaccgaggtagaaaagtactgctgaggatgcgatagattccaaatgggtcataggttcgccaacatatttaacagtcctcttgaaatatagatcttgattgaaaaccttctctgcctgcatacagcatttagtaaaataaatccactttagagtgtgacatacacatatagtgcacatgaggaatagttttggtggctataatccgctctaggtgtcctaactattcagataatttctttctttttacaacaaaacataacatatataaaagtgaaactcagtattacatagttcaattaccaaattgggaagccttatctcaaagttttccttaaataaatgcaaatgcattatgtacacaaaacttatagatataaatatacatctttgtgtgtgaataaacagagtctgaatgctaagaaaagagaaaaacaagacaaaatttgagttctgactaaaacaagattctacctcggcgcaaatctttccaactatggagatagtctctacagggtagacacccctaagagtctcagcaccaagaattattgcatcggtccctaaaccaatagtaaatttacatgagatttgagattgctaagatattccacagtatattagcagcaagaagtaaatacacaagtgacactaggaaaaaaaacaagttttggcaccaccagctaaaagaaaagtaacatcccattattcagcacaatcaaactatgatatcatcataacaagaaagaaaaacctttttcaacgttagaagactaagcattaccatccaatactgcatttgcaacatctgtggcttcagcacgtgtgggcctcagattttcagtcatactgtctacaacacgagtcaccacagctggctttccagccatattgcatttgtaaacagcagctttttgaaataaaaatacctacaataatatcaagaaaattactagcacatccaagccagattttaccataaagattcattttaaaaagtaacctctcatatcaagaaaacgcacatagcagaatatgtgagtcacctatccctgtttactgtaaataccatattaatcaagatcagggccactttcagccaaattcttgtcacccagaattattttttgtaaaaactttggaagaagaaattcagggacagcactgaaatcaatttcttgaagtacgaaactgtccctgtcttgaccaaaattattcatattcacatcaaataagtgctaagtcacacattcatatacaccatcatatatttcattcagccatgctagtaaatgtgcaggttttggctgtatttctcaccaaattcatgcactcatctatattcaatataattttctcatctgatcatatagccatgtacatactgtatatcataattattattcagaacattaattgaagagcatgatcaaattcttttcattttgatacactgatgcaaaagctgcaacaaaaaagctgaccttttctggtggcagatctatccccaaatttccacgagagagaatgataccatctgcttcttgtagaatctcatcaaaatgagttaatccctggaaagatagagagagaggcatttcatgttaagaatcacaatgtgatgaaaaggagaagagaataatggcagactaaagatatttattttatataaacatcctaatccatgtagatgtgagttgtacgtactaatatgatatgaattgaat

SEQ ID NO: 378547 - DNA, 1035 bp, Cannabis indica
aatcataattaaaagtttaattttgaattaaatctttattatctgctaattctcatactaaaatttaagtggtcattacaattaggcttgcgtgacatcatcaatctgtgtgatcgatcaactagggcaaagtggaaataagtttgggggtcccaatttcaaataatttttgagttggttataaaacttagctgactcaaattattttcccaacattcaccatcaagctatataaagatgaaaatgagtgagaagaaaggtcaattccccctctaattcaaattctttgttttccttctttctctaataaacctttttaacttgcgcatcagagttttctgtaggaaaaccctccgcactcccaacaatctaaacagagaagaagatttaaagattcaagggaatcataaaagattcgaaggatataagtatccactaatcaaatttttgaattaattatgtcaatttaaaggtataatattatgatggtagatctcatgggtggacaatactgtaaatacgctagctcccataagttttatattttacaataagagtgtatattggatcacatctaatagatttggacccaaccgatctaattcaattatttattagatattggattttttcatctgatcctattcaatcgaattgagtcatctgatccgatgtgatccaatagatatattaaattggatcgtttccaaccattggatgcattaagttttctattggattggattggattggatccatccattttattttagctgccatttaagttaatttaattaaaaagaaatatatatataaaacgtaatttaaaatttaataatccaacatacataataaatattagtatagtacaacttaattcttaggatcccattataaaacaaaaaataaaacttattcaatcgacattaataattttattagcatttacgaatatgagaattaacatttgatatctaaagttttttttttaatctcctatgttaaatatatattaaatcaattaacatatttttt

SEQ ID NO: 378548 - DNA, 7996 bp, Cannabis indica
gaaagatgatttacttgttgttttttttggtattttatggactatttgaaattatcgtaacaaaactctctttgcaagaaaaaaaaaaaaaaaaagggacctgtttatatgaagatagaaccttttgtaacttcttatttgtaggattataaggttgcacaagctaaagttatccctaataccaatagtacccttcaagataattactcaaatctaatggattctagatcattgttgcctccaccagggaagtataaattaagtgtagatgttgcagtcaagagccaaattaataggcatggttatggggctgtaattcaagattcccaagatagaatcatagcaggactctactcttcaacaatttcaggtcttccaccaatctttgcaaaaacagaagctcttcttagagctttaaattggtgtcagacagttcattttcccatcgacatagtggtttcagattgtcaaactttagtctcaagaattctaagaaattagaaggaccaatcaaccttgtctaatgttgtgtggaaaatcatctccattttgtcctactttcctagtgcaaccatccgattcactctgagaagcaccaactgatagagtgtatttgaaacaatagcattttaaattattcttagatctttgtaacttgtactttattattcatctttagttacaaatcttgttgtcttaaaaaaaaaattgccatgtgtttccaaaatatcttcatcataggtaaagtttatctagaagaagactactttgatgggaatgttcataaaatttgttaaaagagaattactcttctttgagattattggtaaaccatatcaattaattaaaaactaacctagtaactttgtactgagattaatataaacatttatcaagagtttcaatttccagatattataggacaaacacaactcttacccacctttaagaatgcttccaggaaacaagaggtcttgatcttcaacttaaaataaacaaataaaaatccactgctgaagtaaacaaacgagatagttacactttttaaaaataattattttttcacaggattcgaaatttttagaattatacacgaggtcttagccagagtcatggtagatcttttttccttttctttaatattggaaaaaggaaacagaataatacagtccctgaaggcgcgaacatattttgagtaacatgttttggcggcatatcttacaatggaatattaaatccatgagcactgttacagaaagttgtatatacagaaattcaaatggaatcgatttaagcatcaactgagacacttacggcattcaattctacgtgctgtttgccgtcattctgagggtgcagaacaatagttgcacgggcctcagctcgagaagagaattgattgttgcctccattctgagaaactgttatagagctcactaaaggctttttagtagccacatcatcttgaccatctgtgtcctctgagatgatctcccactcttctttcagcgatgtcacttgcaagcccttttctttgtgactttccacttcgaaagcagttggtagaatcacataatcatttagagggttgtagaaaggatcgtgatctgccttcagccagtgctttaaaaatccgaaatacgtgatggtcacagaggattcctcgatgctcgccaggaatgccaattctagcttctgcattaagcccatcagcctgggaaaagaaaaaaagactcccttcagaataccgaaacatacatttccccattcgctgagtgtagttttacccaagcacacatacctagctgctaagttaagtcacatggagttttaactataaaaaaaatggagtaaataacataatatttacaaataataccttttagcactctatcacaagtatattaaatgtatcaaaaaaggagagatttgtgtatgtgtatattctgtctcatattgctcttgtgagtgtgattcttggaatttatattacctactaaaccttaaactcataacagagttttattaattgagtaaatgctgttaaatctatacaaaaaaaaaaaaactatcacaagtaaatttggccaaagaaactataatattatttcctacaaagcaaggccaatagccaatatagccaaattgcttaaaagttgcaatgtcaagtccaaatagactatgaagagacaatttttgaacgtagtaaagatgaaatgtctagtttgtaaagaagtaatctaaacatttctaatcaaaattaataatggtaaaaataattagcaaaccttcgccgattccactggtaccgtcccatcaccatcaacgcaaatgtacgttggctgatgcattcaaacataagaaagcaattatgattcatccaaagcaaataagtttatatcataatacatattttattataaagaaattttaaataatttgatgagggtgacctcaagaggtgctttccgtacaacaatatataaatgataatgcactaatctattagcccaagaaagtacaaataaagtcagcatgtgagagatagttacctggaaatatcttagttcttgaagatcttttacaggtgtttgcccattaccatagctgcattgtaaagttcagaaatgagatacagcaaactgtgtaataacatcttctaaaaagatacagaagtgctatgaagatctaggtaaaataaaacacctacaaagatatagaagttctatgaagctatatcatcaaataaatcaagcattaaaagaactttacaatagcagaagtaatcatgcaattcaacagaatttacagagtatattaccacacactgtgaggtgtatccagactggtcccatatatgttgaagaatttgacttgagatggaactttggcacgagaaaggatctttcgtgtttcattagcccatttcaagatctccaagttgaatggcaagggaataatttcaccttcgtgattgacctacaattattaaatgcacgtttttatgaaattattagcataagttatttgcaaacaacatccaaaaaaatctaggccaatgttatgtctgaccctacatactaaaacacctatttatcaatcaatactggagagcttggtctaaactgtatacagaaagaaactagaagaatcaatactggagagcttggtctaaactgtatacagaaagaaactagaaggatgaatgataacagaaattacaacaagaaaacttttcttccaatgtcttgatgtacacacttaaaaagaaatattataagccttacacttttcaaacccaatgtcgccaaaagaatgtagacaccaaagttcaaaaactacagttaaaatgaaactttgtaataaaaaaattgataactcaccgtgttacttgtaagagctttctcaaaaatttctacactctctatcggggaataagactccaagactacatgagagttcccatcaacaagcttctctcgccagacttctaacaaaggaatgtgttcccaatcaaaatcaagacacgccatcaattcgtaaacggatggacattcaatcaactgaaacattgtaacatactaataaatgatcatgaagagatctcagtgatcaaaattacattagaggtaaacaaagaggcaaacagtcattaacttcattaatttatgtagtatatatttatatatatcacaactaaagtgctgtgaaagtacaggaaaagagggaaatgtactaattaaaaaaaaaagtcttgtcactgcccacatcctccacaattttagcttaagataaaaacagaagaaaaaaataaaatattcatattaatttgcaaagtatatatcatatccttgcaataatttcttgtgtgactcaagggtttccagtcatatatacatcattagacaaaaattgaaaataaatcatagtaacttaagtgaagaaagccactttcttttattctctttattctttagaaaaaattatgcaagtcatattttaatctgaacaatgaaaattttatttcaaccaaaagacgttttaaaattaatgaactggaattcagaaatatacttcgcttgagaaatcgctttttacttttctcttgcaaactctcaagtggtagatacattttacttactaaaccaagttatgcatgcaacaacaactgacgatattaagttattataaccaaagattgaaaaatctttagaagcgacaagtaggaaattacaaatgacaaattacaagtagaaggctggaaataacaattaaatattcactcataaaactgcaaaatgcagtagattcctaccagctggtgcatgctccattttgatataaaaaaattctgttcccatccttcaacaaatgacattccattgagaaaggtagaggcaacatacccaggtgcacctgtttcacaatatagaaaatagaataatggagctgccttctgattaccaggcctaatcttatgtaatttatttgtcactgcctaactgacagttttatgtgctgtccctcacaatatgataattaggaaaaaaaaagtgtaagggttcgtctcactggaaatgtaggacagcattgttctgctagtaattaccttggaatggtgcagctatcgcaatccaattctttacatacttttcaaaaacctgcacaatgagcataaagtgtatgatttagtactttcccaccttcagtaatggaaatgtacaaaactaaagtctaattcaaaaaaacttgaaatggtaaaccattagtggaagaaaaagaaaatttaagaaacggagaaggacaattacatcagcatgcaggctcatgaaacatttcacaagaagaccccccattgaatggcttatgacattaatcttttttcctccagaagcattatatattgactctagttttgcgctgaaacgatccaatgtctcctgcaatctacgcaagacagataaaatgtatcagggaacgtaaattcatccaacagctaacatacagcagatatgagttcgccaagaagacattcatacaaagtgctaaaagctgtgctgttaaaaggccattagttattcacttcacctaacttctaaaccatctaataaccaaatgcatatttaaggtctaaaacaagagagaaacaggttaaaattttatttttccttttgatgggagtatcaatctagagaacaagacacaaagactcctccatagtccatactgttgcctgccatgatcctgaagtattttatttccataattttggaatcacaaatgttttcaatgcagtaaactcactacaaaaaacacagaccaaaacctcattacaaattacaaataaccagcccttaaaacagcaaaatatgtctttctttttatttttttaatatacgaagatataccttgctccttttaaaaggattgctgtgatgctgtttttgttagggggagatcaaaggacctttatgttatttgtattacacttcatagtttcatagttaaataaaggatacctattgctttggcgaaaatcataaccgaatccaaaaagtgttttcccttcttggaaaccccagtttatcatttcaacaatcatatcatggaaataatagacgcactcacgtccaataatctgcaaaaaaaaaagtaagtagatgaaaattgatgagcaactcatcttactatttatctacaaattgctagacaaaagacaagataatccattatctctattgtatttacaagagttttgtaaattaatttaacaaataatcatttgttgttctactgaaggggcatttttgtatcctttctgattgattggcatttcaatatcctttgtcctgaaagagttaagtgcattttcacttcataaataagtccattcccagaaaaatagaacattaaatttagtacttctttttaattttattttcccttttttacagtttcatagtttggggattgccgacagtcaatcatttatttgtcatcatatagcacagctttctgaaacttccattttatcaaaaactttgttttcatcagaaaaaacaaagtacaaatatacatacagtaggctttactacaaaagagagatccaataacttgatttaaggctttatcctatcctatatctagcatagccttctacgctaatataatataattatgaattttctatgcctctataaccaaaggaaccaaaccacaaacaacaaaattattttcattctatatactttatcacgatgcaatttaatatttcagaggaacattttagcatcttcaatttataacagaagacttaatattgctcaaaacaagttgatttccatatataattttgaatatagaaacattctcactgcttaaaatctttcaagcaattcaatagtatcactagcatgttcatatgaacgtacgacatgaaccctaatatcgagatcgtaaatttttccaaaacaacatgtccattatatgacccatttggaaactcatattttaaagtagaacgtctcattaaacctgcaatcatatctgaaagcaggtcttccccggctcaacatatagatgtcattgagtaattacagtagattaagggtgtttctacatggtgtaacatcatttctgggctttaacagctagttgttcttattctccaaatatgtttaatcaacatcaaagtattatttttgagggggacataaaaactaaagagaggtcagcagtccaattaaaataccataaacaaaaacaaaaaaaaaatacataacttaccatgtcagggtccaaaacatcgattgcatagagaccatgtctgtcttcaggaaccactaaacttgttttctgatctaaagacacagttctgcctgttccaatgtgttacaatggaaaaaaaaaagtaaatacaaatttttgttatctaaattttcaaggtcataattggaatttatcagtagatcatcgatattggaataacaaaatcaatataaagcagtttttaaatttgtgctaaaacacaaaattttgcaaaattcttctcaatgtatataaggaaaatgcaccacatcaatagtcctttatgctaccaatacatgactctagttacacagtaccaattcttagaagttttgtctgtcttgtattcaatcttcaaaacttaaatgcaaaacataaacatgcccactagtttcttttcttcgataaactcacttcactttcggtcaaatttgaagttactagagtcaagagatataaacaaatttacccgtagtaggatcgaagcgagaccaaagcttagtccggcacttataatcagcagcgagaatcctaacccaaacccgctcctctttaccattttcatcatcaacagccttcagtatcgaacccgcgataccaggcaccaaaaggaccgggtcaagggtcgggtcaacgtaaggctggggcttcttgatcagcttcaaccacatctccacagattccagaatctcctccaaaagcgacgccatattaacaccaccaaaaccaaaaccctggattgtggttaaagctgcaaccggggaagaaaactccaaaatcagatgtttgattgccaagaattggggctggaattgacaggagtgaggaattgcgtggagaaaagaatgataattatgaagatgatgatgatgacgtggacgataagagacagagaaggcgtaaaaggtagcagagtacaattaatgaaaaaaaaactagaaaataactttacgagtggtacacctattctataattaagaagttttgtcacatttttacatattttccacagtaaaatttaatatataaattaatatttacttaataaattattaaaaaatataaacatcttgtctcaagtgatttatttttcagtatttatttttatactagatagatgttaccaattaattttattttagtttttaattttttttaatatcataatttaaaattaataatattcaat

SEQ ID NO: 378549 - DNA, 3296 bp, Cannabis indica
tttttttttacttaattttaaaatgtggagcgacctgcttggaaccccaatgttggtcatttattttggatgacttgttgaggagcaggtgggtttctctctgttttgtttcattttgacatgaaatcaacaatatatatgtacatatagtatcatgagccaaagtttgaagttgagagctaagtttgcaccaagtgccttttcatgtaaatgttcatgttcttgagagataatacggtgcgtttaagtgggtttgaggagggtaaggatgaaagacttgtctaaatctaatgcctttcctttcctctctttcccttctaactgtatagaagtgtgtatatatagaaattatcttgaagaatatgcttgtagtgtttaatcatttaatcccagttggatattttattagtttcttttgaaattagaagaaagttaggtgaagagctgcttataaaatggggtcgtaaagcttgtgtggatccataaaaaactattggagacaacgaatataacacatggagattattaagtcatattgggttacaagggcatgttaaaaattaactaaaaaattatgaaatatcatagttagacaagtagaattttacaaattattattctaaaaaattgctaaatatttcacaaaacatcatattttggataaatatgagtatcaatttttgtaattgaaacgtaaacacattctcttttcttcacccatatttcacgatgaaattgtctcccaatccagcttccgaaaccctatttcggctgctccactcaattcgttctaaactttaaagcaatccggattactttgccgtgaaatttgcatttgaattaaacaaatcaaaacacattattagttacaaagccaaacagcctttaacttttcctttttgatcagaagaaccaactttgttaattagtgaactctgcaaaaccctaccctgtgtttgaaaaacaatgcaacaatagacctagtttaaataacagtaattttgaaggaaaatttttatctgaaaactaataagtgacccatggaagtgaatttgatatagattatgtactttttcaccaaccaaaacaagtgattttccaacagacttcataaacgattataataatactcagtcaccacagacaaggggttgttttgaagatgaatgtgtagaaaacttagaaactgacttttcagcagaatacttgaaaactaagattagaaatgcaaaacaaaacccgaaaatgaaaaacactgtggacaactaggaaagcaaggcaaacatgaaagaactagatattaaatattaaaagcataattaagcacagaattgaaccaaaaacaatgcactgaaattaataatctcgattaaaagatactaccaaaaataatccattttgtcatccatcaacttctggaacataaattaaggtaaaaataagaaagtgtactcaaaactgtttgaaactaaattctattgatagcaaacatgctaaataaccccatgataatgagagcagtggcgagatggtggcaactcaatctaactctcagtttgctccctcagccttctgatggtacttctgacagtcacggcactggcagtgctgtataaagaacatgaacaaacaattagcaatgttcctacaaaggataacacagtaacataactataatcagatcattaaactcgtagaaaaatattattacttcaaagtgtaggcaccgcctgctttcactttgccacaatccttgcatccccagattccaacggccttcctcttcacggcatactgtaatgagagaaaaaatgatcaaactaagcaactactcaacccaataagcgacaatgcaaactttgaaaaaggatagaatatctcgttaccttgccgcaaaactcgcagaagtatttgctgtgctgactaacttccatcttcttaatctgctttcgcagactggcaccataacgggtacctgtaataaaagagagataactttgagaaacttattggaaacttaaaaacacaaattaaatattaagaaaacataaaaaaagttcacatttctaagctagctggattagaaaagaaggaaaacaaagcataattacaggattgtatcgacaaatatccaatccaattaagcaaagacttaaacttaacaactaattcccagacatatgagatcaattgtgttcattacaatcattttattgggttagaaatcatatatacgtacaactataacttaataaacacaaaaacaacaaagtaccatagcataaacaactctacatatgaaatgcatatctaacgctttagcttattcggatgaaacttaccatactttccaacgatgccggccttcttggttctcttagtctgtaagaaaattgataaacaaccatggaattagaaaaaccccaaacaaaatgtagccaagatcttgcaaataataccaagcatcgaaatcataattggttcgatagacccacttcatttgcagtgaattcaaagagaaacaataaaaggcaaaggttcatttgaacatctttcagcgaagaaaaagaaaaacagatcttagcaatagttgtttatccagataacttgcgaaacggaaagatcaacacaaaaatacatttctacagataatgaagaagaaacaaagcaagtaagaataataccatggtgatggggattggttttctccggctccgaaataactgacgcggctggtcctggtggtcttataatggctgaaaccctagctccattgttttggttcttatataccctgaaacagatacaactgggccgggttcgtgattgggctgattatgttcggcccattgttaaagcgacccaactatgtcagtttttaccacagtgagtcaaacagtgtatatttgcaaagagggcaaaaatatgtacatataattatctttttttaaattaagtaatattaagtgtaatgtaatgtatatttatttatttttttaattaagtaatgtatttttttttataatttttgaagtataatttataatttgatttttaagaattttttttagttgttgcagcaatattattattaaatatatataacaatactataaaattaataaaaaatattttattaagtaatagtatattctattaaagttaacgtaaaaagttaaaaatcaccgtgaaactaaaaattttattacatagtcacattttatatagaataaatacatattatttttgaatatctttttttgaagaaaagcgaagcaatatatattaatgatgaa

SEQ ID NO: 378550 - DNA, 3330 bp, Cannabis indica
tttttttttagaaaaaagaataaaaaagaaaacggtattaaaaatggtatatatttaggataaaattgaaccaatcacattaatgtaattataataaaataaatgtactcaagtgtaaattttcctttaatctatgccccagacggcaaatggtcatgggcttgtgatataatttagattgctttagggtttattgacatacatggcaatgtgtggacgcttgtcgcacttctgagcgaagctggttgcatctgcacgtagggttggctagtaataaccttgtcgcatgatctttagggccagagagtttccaccagtatggttactgcatattcctctgtgcacctctcagaggatggagtcgcattcttcaccattgatgcaccttaaaagtagctgattaaaacttctgtggtatagcttgtcgtcatagataatgtatcgagcgactcgataacatgatctcttggcttcgagcttatcgtccggacgtttgccagttctcagataattgataattgaagtcatccaagtagttttctcaacaacatttacatgaataacttcttctcaataaattgtaggttgatcaagtatatccgcaggtattacgtcaagtatatttacttctcaagttgaggccagtcaggccaagacatctgcatggaagttatgaggacgaggtattctactaataataacttttttaaatttagataacaattcacaagtataagcgaggtaattgcctagtctccctcctcgagccaagtattctccattaacttgacaaaccacgatctgagagtcactgaaggctttaaggtattcgactttcatttcaagtgcaagttttaatcctacaatcaaggattcatactcggtttcattattggagaggttaaacttgaatcttaaagccgcatgaatcttgaacttattaggattgatcaacatgattcctccatttgacctttgttgtttgatgctttgtcgatatataagctccaacctgcaccctttagtacatctggattaacttgttcttcggttatgacaaccacctgctcatgagggaaatcaaggataaaatcagcaagggcttggcttttaatagctgatcctggtttataccttatatcgaattagcataattcaattggccatttaagcaggcacccagatgtatcaggcttggccaatagttgacgaagggaatagttggttaatacctcaatagtgtgagcttagaaataaggttgcaactttcacgaagctacaactaaagcaaataccaagtgttccatctgtggatagcgtgctttggcatcaagtaagcatttgctcacgtaatagatgggatgttatctaacttggtcttcacatgttagcacagagctaattgcatattcgaacaacgctacattcattgagagtacttctccaggcagtggcttgaagagtatcgggggttgccctgggtgcattttcagagcctaaaaagcctctttgtgtttgtcagaccattgaaattttttattactttttagaattttaaagaattctttacaattattagaggagcgtgaaccaaagtggtttaaagcagtaaccttacctgtgagactctgtacttccttgagtttagtaggagatcgcatctccactaaggttttgattttggtggggtttgcttcaatttctcgctggtttaccatgaaaccaagaaatttttcaaatcatacaccaaagatgcactttaatggattgagtcgcatcttgtagtgacatagaattttgaacattaaatctagatgggagacatgttctgtcgcatgttaagattttacgaggatatcatcaacatactcttccattatttttcttagtaaatctgcaaacatcatgttaactaatctttggtatgtcgcacctacatttattagcccaaatggcatcactttataacaatacaaatcttggtctgtgataaaggaggtgtgctcctagtctggttcatacaacgagatctaattgtatcccgagtatgcgtctattaagctgatgagctcatgacctgtggttgcatcgataagttggtcaatgctaggtaaagggaagctgtccttaggacacgctttatttaaatctgtaaagtcgatgcatgtctgccatgagccattcgacttttgtactaagataggattagctaaccagtttagataaaatgactcctttatgaagtcgcgtcctagtaggcagtctacttcttctttaagcgcttggcactttgtggggtccattttatggtgcttttgtcgtgctcctcacacgtcagggtctatgttcaagccgtgacacatgacctcaggcaaaatttcaaccatgtctgaattcttccaagcaaaaacatccaaattttatttgagaaaggttactaacctttctcactgttataaagctagtttaaaaccaatttttaaaactttagaactatcaaatgaatcgattggtacttcaattgtttcttcacagattgtgcagtgtttgtatagtcaaggactctaggtccagattagtctttttaacgtgtggtacttcttcaattctaaacgactcgtgttgaggtggaggtgcttcgagcaaataaatcacattcactgatttcttcttctctacaaatttcaacgcagtattgtaacattctctcaagttagtctaaacacctcttactgatcctacacatgcgagtgtagggaatttcttagaaagatcataaattgaagttaatatcttcatctccttcaaaattgggcgacttatcactttgttatatgcaaaatgttgatcaattattgtaaagtcttccatagactttgcagtaacaggtgttgtctctaatgttattggcatcttaatcattcatttggattcgatcgtatatccaatgaaactgtagatactcaaagttactggccttaaatattttttatgtaaccccgtctgcctaaggcttatgaattcaagaggttaattgagcttccattgtcaacaagtactcgatggatattgtctcccctaatgttggcgaccattactaatgcgtcaacatgagggtggtgtacccatctcgcctcacttttatatgtaagtgatattgtcacattctttcctataaaagtttctctggtctttcacttaaattatttacatttgtcaatggtttctctttggcttcctttgcgtaacgttcctacactttcttggagtccccctgacatgcggccctccaatgatggttaagatattgcctaaataaaactcatttca

SEQ ID NO: 378551 - DNA, 5202 bp, Cannabis indica
ctctctctctctcttatctttccttctggctgcaccgtaagcaaccaagctgtctcttgttggtagcacagaagcacaatccctaataccccatttctctctctctctctgcttataattttcttttgcttaacctaaatgaagaccattagagaaatagctatgtccagacatcattcttaaaggtgctacctagcttcttgcggctctcactttcttacatactgtgagtatttttggtcccattctatacacaaagctttgattttcattttttcttattttattttagaatatatatatatgtatctgcttacagacttgattacgttactactatctttataattttcccatttatcttaagaactgttgatttttatatatacatataacgcagttctgagttggtaaggttggttttagctttatcatttttcttaagctaaatatatatgtatatatataacacgacattgcattgtttgatttaggtgatagtgtggtacgtaatttaatataatatgtttaaaatcccaagagattagtgaaagggaatttttttttaaatatttatttatttatttattttaattaatgcaaacagtttggggatttaaaggagagattttgaagagttaagcatggaatttagagctcaagataacgagatgaggacgtcaccaactgggacattgacatataatacccatgtgagtaaagaaggaggaggaggagaaagaagatcaagatcggttaataataatcataatcataatcataatggttctacaaacactatgagttgcactaatcaaaccctagacactaactacccacctcgcttaagtttccataaccaaaccggccagcttcatgggtctagagatccggacccagatcgggttaccaccttgcccataacgacgacgttttcgccttcgggagcttcagccaataagtcttcctccaaaaccacatcatcctccgctatcaggtacagagaatgccttaagaaccacgcggccagcaccggcggcaacatctacgatggctgcggtgagttcatgccaagtggcgaagaaggatctctggaagctctcaaatgcgctgcttgtcagtgccaccggaattttcaccggaaagagatcgacggtgagtctcaattatacagtccgagttcaagaagatcgtcaagtacaaatgctactactctgatgctgaatgctctacaactccctccaccattgccatctccatctgggtttcatcaccatcaccatcaccacaagtatttcaaccacggcgcccctcagattattcagccgatgaatgttgctttcggtggtggcggagcagcaggtaccgaatcttcgagcgaagatcttaatctttacggatccaccgccgaggctgctgctgctgcagcggcggcaccgcctcctttcgggtcaaagaagcggttcaggacaaagttcacgcaggagcagaaagataagatgctggagttctcagagaaagttgggtggaggtttcaaaagcagaacgaggaagaggttgagaggttttgtgctgaggttggaattagacgacaggttctcaaggtttggatgcataataacaagagcactatgatgaagactaagcctaacaatattaataataataataataatcaagacatgaatagagtagtactgatgaacgatgataataacatggtcgcctccaatcatcatcagtcatctattgatgaggtaagtcataatcatgatgatgaaccagtccttgatcaggaagaagtattagatacttagattatatcatattattacctaatttatatatatatatatattattatttaactatcctttttttccttttttaattatgtgtaagagctagctctctccttggtgatgatcaggttacgtatgggtgttagaggagggcattaagatgatgactacgatgatgcatgatcaaaatataatttgtatgattcttaaaaaccatgcaccttaattattattattagtattactaccctattatcttgtagcattaactatatatatatatatcgtttttgttttgttgtcttttttgtttatgatgacttgttataatttgtttttaatttaattattagtggtttctttcttctctagctttcaatgtattctatgaattgagaactatttgttcccatctaattaatcttatattaatcttctctccacatcaagtatcgaaatgattaatcatgtctttgttttttcttcaattttttttttggctcgtctttattattaaattctatagaaattaaaatgtatggattaagattcttctttttccttccatgacagaagaattagttggcgtggcctgataaggcaatgtttttttttggcatgaaagtgaaatgctttgtaagggttttaatttaatccttatttttaatttatcttgtccaattaatatttgggaaaaaataatggaaagtgtttttttttttaaataaaataaaaatgaatattgtgtgattataaattttagggtgactatgacgtgagcaaactcgtaatcactgaaagacagtcatttattatttcttaaggtctcaatatcgagtcatctaataaaagtttgtgcacaactcttcgtctctctctctctctctcctcatgatttgacaatacaaacattcaatcatgtaaaatctaatataagattcattttgttaaataagaatattaagttgttaactttgtcaattatttttttttcctctgaaaactatattcttcaagagataaaatgtagcatttttttctttaggaaaacgaatgactagcatttcgttatctcatttttctcttgtatgagaaatggggtaagtatcccttcaactttggaattttttcgaaaattcctttatgctgtttttggagttattttttcattggtgaagaaaaaatattttaacttatacatggaaaaagaaaagaaaaactaaaagtcaaatctaaataaaaaacacaaaatcatagcaatttccctcaaacaaaataaaaataaatgttgtttggttaaaaacaaatgtgaagcaagaaaacagataaaaataaataggagaaaaaatctgcagtaggactaggacatgcttttgtgtcctacccatacagtaaattgtgggccacatagtctgctatcttgtatttttcacttgtccacagcacatagtagcagtgttaaaatataaaataaaaaccctagaggataagatatttataatatcaaattgtaaaaaaagaaacactaaaaatagagaaagaggttctaactataattatgtataaaggagttgaacatctttatttctggtatttaaaaacaatataattaaaaaaaatattatataatagtctactttatatatatataattacggtatcttatatgtagttactcaattttaaaaacttctaaataatttactacactaaaataaataaaaacttctaaataccagtgcaattatatgcttgaattatatttttgtaaataaaaaattttagtatgcctaatacaattactaatatactgtcatacaaaaacaaaatttaattataatttctcaaaagtgtccaaaaaaaaaatattccaaccggttacgacaaaaataatacctctgcagtagaatttttaacagttatttatatttaaagagggtgtctaagtaaataggatgatatattgagtttgttatcctaattaaataggatagtcatatctcaaaaaataaagtaaaaaaaagttcgttggtgttagatcttggattttttttaagctctcactaatttgtgatggtgtaatttactaaaacaataaaagtaatgtgagattgggatgcatagtaaagattttcatcaaattcttcataatatttgtcaaaaataataaaatgtacaaaaaaataaacttattgcgacgacatatgataaaaatattgtcgcaataggattcacaaacgagcaaaaattacaaaattaataatttttcttttaaatgatataatagttgaaaatttttatattagctagaaacatcacttttatcactatcaatagggacgtctttatttttatcacttagaaaattataactaaattttcttatatgattgtgtatattgttgttatagttaatattttttgaaaaatttaaaattatttatagtgttaaaaataagatttaaaaaaactaaattgttttcgtgcgaaaagaaacaagcacgcgtgcaactaaatcgttgaattctatttttgacatcgttaaataaattattcagaattttcaacaatagataggatacctattataactataatatagactatcatgtaaaagaaattggatataattttttaaatgccaataatagatgtccatgccaatagggacaaaagtggtgttcctataataacgaaaatgttatcgttataacatattgaaatgatttaggtaattcaaaccatagacttcagctcttggttcatgtagaagcgatcttacatacctttctatggtcttccttgaatttccagctatgtgggagcctccaattacgatctccaacctacctgcaattggcgcaggctggagaggtacattgaacccaactggagcttcaggtcatacataatgttaaagagcaacggatttctgtccgatgagaaattttatctcgtcccgcaactgattacactcattagtgtatgactgtaattgttgtggtaacaataatattttttcatgtccttcttccctgactccttgaaaggaagagatttgtgatacaatactgttgactatgtggctgtatagatctcctctcttggagccaagataatggagtaggtggtgaagcgaggctcataatctcttaagggcttgtccccgatcttaggcttctttcctcctggggagttgccttgcttgccaccgttgttgctatctttcctccatttgaacctcccttcttcccattgccctgcgccttagtaacaggggcttcagtgtcttatgatttcaatctagcaggggcttcagtctagtctagatttctgagtcaacaatagaaataatataatcttatgatttcaaaatagggtatataatataatgggtaat

SEQ ID NO: 378552 - DNA, 816 bp, Cannabis indica
gaagatttatttgattgggcatatctatatccaattatggtgggatttgatttaataaatatatcagtatgcattcaaaaaaatagaaaataatattaggaataatgccttgaagcaactatagttaacaataattttaacgaaataaattgaattagtgtatatatagcttataatctacattataatttgaaatttcatttaatactttattaacttgatagaaaatatcataattattatctcccttcatttttcttactttatttgaaattttttctacctagtgaaaactaccaaaattaacctattaaatttgaatagttctaattgttacttgaaataattaattgagtctatccagattaattaattgaagacaatgtgagaaatataggcccataaaattcaaaactctaataagtttatcgtaaatttactagtcttattattttcttgtatctcatatagattcagaattgtactcttaaattcacaaaacgctttatagccaatatagatattgtttgactcaaaaatctggactagacttctaagccacacgacaatcaaatagttgcttagtaattataagagagacacaacaaatttataatagttcactccctatatcgtggctataatggagctagatctacttcgagtttttttatttcttcacgagatggtattacaaaaaaaggctaaagtgtcagaagctccaatttctaacaaccattgattaaagattccataactttaatatgttgttgactgttttatttatagctaattagttctctgtacagctacaag

SEQ ID NO: 378553 - DNA, 7130 bp, Cannabis indica
taaaaagaaatacagaacagagagtacagtggagggaagatgtgctgctgcatcgttcattaccttgtcatcacaaactatcccagttaccagggcccgataaatctttaagattttcctcgatataccaaactccgaattggctttactgtattcaatatctctcagtgaaaatttaatttcaaaatttcaattgtaatataaaattgaaaaaaaaaagaaagaaaaaaagaaaagaagaaatagctaactcatttccctgacctgatgccaccaagatgggatgttccatcagcaaaatatgtcgcaagcttagtcttggcaatctttgtctttgcacatagtaataatcctagaaccagatcaagttagcaagcataaaagaaatactcaagctgaaaactgggactcatatcaaatatggagcagctaaaggcatatgcaagctagaaccatcaaccatcttaaatataattacttcaacttcatcttcatttttctagttagaaacatgaaacctatacagaaatagttgatttaaaaaattattctcgtacagtagtaaataaaaaataaataaataaagaacacaggtgaaaatatgaaaacttcaattctattcacttcccaccacttccatgcatatcaactaaggtaataggtaggcataatggcattggttgttagtttgtttgaatcacatatttaaatgaaaaatgagtttcaggcgtcccatatggacatccctttcctacctactcaagctaagaacattgattaaacgaagaatttcatcattctgtaaagcagaaaagcttataagcagacctgatgtgccccttccaagtcgatggacaggagtaggatgcggtttattgcaccttagagaagagctcagcttagcggcccaccaaaggagctgtgtcagaactgtgcgttgctggaaaagacctcctggtaatacttgcagcccagatggtttatttaaagctatctgtatacataattcgttgcttagttcaaagagaaacatacatgaaaaaacgtcaaggaaaaagccatataaatatattacgagataaaagcaattgaaaatttctgaaaatgaaatgtccaagtacaaaatatcagcataccatatcatcatcttcatataggatctcaagcaaatgcggggcatcaggctccttccaaggaagtctatgatagaccagttccgaaccaattctaatttgtttatgacattaggaacaccataaaattttcataactacattttttctttactaaggatgtgaaagtggtgtattatttaatgtagaaaaaacagtttatattaggaatgaatcatcttgtaaaggtgaaatatagcattttaggaaagagatcattttcctctttattctttgatttgtttccttgtatagactcttctaatctttatatacacgtttagtgtatagaattcaatatcagaagatatacctttgccatttttgacttggtattaaagccagccgcctcctaactgcaactctaatcgttttcttctccttcttcaccatgtatgatgcctcaaatgaatctaccactattccagccaaaccattccttttgactatcattatgtccaaatcaccaccattcatttgaatggtgataacttcctcaaatggtcacaatcggtatagatgtacatgtgcggtcgtggaaaaatggggtacttgacaggtgagaagaagacgccagcagaggagggtccgacatacgagacttgggatgttgtgatggtgtgacttgtgaattccttggaggaagagatcagttctaactatatgtgctaccctacaggaaaggatctttaggagaatgttgtttagatgtattttgatttgaagaaccaatctcaaatgtttgagttgcatctcaaattgggtgagctacgatatggggaagaatctattacaaaatattttaattctctaaaaacttggcaggaccttgagctctttgacacatttgaatggcagttagataaggatggaaaacaccacaaaagaactattgagaagacaaagttcttggctgaactcaatgtagagtttgatgaggtgaaggggaggataattgttcgacaacctctacctccaattggggaggtgttctcggtggtcagaggagaggagtctcaaaggagtgttatgttgggaaaaaaggttcttggaactatttggaaggctcgactttggctattgtgggaggatattatggcagaaacaccaattattcacccaaatttggtgagaagcctcgtgtgcagtgtggcttctgcaataaacctcgtcataccagtgagacttgctggaaaatccataggaaaccagccagttggaaaagcaaagctaaggatcaggaatggccatgccaactgctaatgaagtttaaaccaatccatggagcaactggatcatcttcatgcactgctgaaaactacctcgacctcatctggtattcctactgcttctatggcacatacaagtaatgaaataaatgctctaaattgtcttctaaaaaattatactacttggatcatagattccggagatcatatgacctattcttctaaattgtttaactcttatataccctatccaggtagtaaaaaagttaagctagcagatggtaatttctcatctattgcaggaagaagtttaattaaaaattctgaggggatagatcttaaatttgttctccatgttcctcaactttcctgtaatctcttgtctgttagcaaattatctcaagattctaattgttatgcaattttttatgaatctcattacctttttcaggaccagagttccaggaagacgattgaaagtgctgggatgattaatgatctctactattttgaatataagaattccaataataaaattgctcaagggtttagtagtattagttctctttctgttcatgatcaattaaaggtttgacattatagacttggccatcctagtttttattatttaaaacatttgtttccagtactatttaagaaattgaatcctctatcttttcaatgtgatagttgtttattggcgaaaatcttatgctaaaaattcttatcaatcttccaaaccgttttatttgtttcatagtgatgtttggggacctttaagagttcctacaaattctggaaaaaaaaatgatttgttacttttataaacgaccatactcgcctttgtcgagtttatttaatgcgtgagaagtctaaagttgaataatttttttcaaattgttttagaatgattgaaaaccaatttgagacttaggaagttgttaaattaccaaatgagaagaaaaaaaataggttgtaaatgggtgttcactataaagatcaaggctgatggtagtattgaaaggtacaaagctagactcatggcgaaggtttcacttaaacctatgggataagactatcaagagacgtttgctctcgttgcaaaaattaattgtattcggttgttgttgtcattagcaatcaattccaattggccattacatcagcttgatgtgaagaatgcatctctcaatggagaacttgaagaagaagaagtatatgtgagtcctccaccaggtttcgaaagcactttggctttggcaatgtttgtaagctgaaaaaatcattgtacggtctccaacagtcccctagagcttgtttgaacaatttggtaaggtattaaagcttcatgggtacatacaaagtcaagtcaatcacactatgttttacaaacactcaacagaagaaaaggtagccattcttatagtatatgttgatgacattgtactaactggtgatgattctcatgaattagagagactaaaagagaagctttgtgaaaaatttgaaatcaaagatttgggcgttctaaaatactttcttggaatggaatccgctcaatccaaggctggtacttttgtaagtcagcgtaagtatattctggatttactaagtgagacaggtatgttaagttgcaaacctgttgaaactcctattaaacccaacattaaattacacaaccaacataattagttaatgtgaaggatcaggagcgttaccaaagattggttggaagacttatctatttaactcacacttgtcccaatataacattttctgtgagtatggttagtcaatttatgcattcgccatgttcagaacactttgatgttgtctacagatttctatagatatctcaaagggacaccagtaagagacctcttatttgaggcacgtggacatttgaaaattaaagcctatactgatgttgcttgggctgaaagcataattttgtaggtggtaatttggtcacatggcacaacaagaagcaaaatgttgtaacaagaagtagtgctaaagctgagttcaaggttgtggctcatggcatgtgtgaaactttgtggataagaagattacctcaagaactaaagtcattacaagtatcacctatgaattcatactgcgataataaagttgcgattgtaattgctcacaatctgatgcttcatgaccgtactaactgttgaagtggacaaacacttcattaaagaaaaaattgaacaaggcttggtgtgcatgtctatattccaaccagtgaacaagtacaaaatatcttcacaaaggggctctacaaaaatatagtttgattttcttaacggcaaactagctatgggagatatttttagaccagcttaaggggagtgtaaaaaaatcagtatttattaggaatgaatcttgtaaagctgtaatatagatttttaggaaagagatcattttcctctttattctttgatttgtttctttttgtatagactcttgaaatctttatatacatgtttaatgtatagaattcaatatcagaaaatataccttggccatttttgacttctataagaagtagaccatttgcctaagattagctcaaagcaaagtaagtcaaacattccaaaacaaatcatgaaagtgtcccaaagaagagttttttttgggtcaaaagcccaaagaataaatgaactgagcatatttacaaactcaactagagacacagatcctctatctgtttatttgtccatctaataaattgctcactaaatcatattttttttaaaacgtaataattgttatcaaattgtaatataagaatatacatttaaatagacagaatcagacaacaaaattgtacagaattttctttctttctacagctatttcataaatctctctaatgattaaataaggaagcaataaaacttgattgtggtaattggagagctcaaaacttctgccttttctatggctctttgtttttttatgcatcacagaaaatgtttgatgcataaaaactggattaatcagcctatgctaaacttctaaactacttgaattgaaatcttgggattctccactaggcaatatcacagacattttaacacttaactagaataagattatcatggtcttgctaatcctgtttttttcttcttcgtgttacttcatctatttcagcagtatctttataatattatataattatatccattaagtcaaaatttgtttatttgtatatataccgataagttccgtccaagcctcaaaattaacaaacgaaagaacaattgtgagatgacacataagagtaatttctatcaaagaacctgagatttgtgctggcatctctaacaacttcaccatcaattgttatctgcagattaaaggagctgagaattaccttaaatgcggatttgaacactaaaaaaaacactttccaatttttcaattatcgaacctgtccattctgaattcgctgcaaccaactgtttgttattagtaattagttcaacatgaacaattgaaaacaaagaaaatgcacaaaaaaaaaagtaagtaagaaaaaacatagtaaacgtgcataaggatatcatataaatatatttatatacttcacaaaaaggattttcatatacttagttcatcttctccagtgaaattttttggaggaggcaaacagatcatattttctgagcaaccaaacagacagctgtacgaatcggagcagtgaagacttacccttgaagaggagcagaattcttgtatttcttggagtagaactggatcaatgtcaactctgtaatttaaaacaaccaagagacaacaaaattcactttccttagtttccattttcatctacatttctcgacaaccaaacaaatatgtatatatattatgtatttataaatgaacaaaaatgaaacaatacctgaatcggtggcgcgaacgacatcattgtagaataaaccgtcgttaagatggggccaaggtaaaccgaatgttaatggcggagcaagagatccttgggaagggttagacataggacctctgcataaggtggtacggaataatctaaaacgcaagtaaaactcccttccctcttccttttctctttcagaaaattgttagattaaaatggtgtctgatacataagtataatatgttatataatgttatataatgtgtgattccatacccaaaaagtcttttctgtagtttgtttttttttttatttttgtctttcagtgttatttattttaacaaattaattaaaaattcacagcttattgttgtttagtgtgctaataacttttttactttatctatttatcctgataaaaatttcagaaaatatatcagcataccatatcatcatctatatataggatctcaatcaaatgtggggcaacaagctccttccatggaatggaagtctatgataggccagttctgaactaattctatttttttgttggtgacattagaaacaccataaaattcccagttaaggattccaaaacaaatcatgaaagtatcccaaagaaaaggtttttttcgagtcagaagtagggatgcacacggggcgaggagtgttatccccgtccccgccccgtttaacattcgggaccaaaatttaattcccgttcccgccttattccccatttagacggggaatccccgccctattaagggcgggtctccgcggggtcatccccatccccatgggaaaaatgtgcatccc

SEQ ID NO: 378554 - DNA, 7564 bp, Cannabis indica
aaaaataaacccttaccctacaaagaaacgcaaggcaggctgttcctgatccagatttaaaagagaaccttcattttccttcaagatggaccctaagatctctttcaaaagttctggtagctgagcaaatagccacaagactccaagatacttgagaatacctcttaatacttttttaagagcaacaagaggaacccaaccacctccgtagccaccatcatctccaagcccaataattgcagtattcaattctcctctcacgtgtgcaggaacacctgtaccaggtggtctacgtaaaggaacacctgagtttataacagccaaatttgaggatcctgggggaacattacccaaacggtgtaaagcagctactgggttgcctggccttgccattgcagcagaagcaggaaggttgatcctacttccattagctgatgagagttgcacaccagaaccttggttttgattagctgccagaccacctccctgttgactaccagcaaaattaggctctaaaacattcaattcttgggcaacatgctccataataaatggccgaaactgtggacaaggcaatgaccctccaactgaggggcccccttttggtggtgtagctggttgcaaccaaacctgatccccagcaaagcatcgcatgtctacggcaaagtttttgcgatatataattcgtatccaataggggccccgcagcacaactgagacatcaataggtaataatgagctgggaacaattccagggccacctcggctcgcggcagctaacattgcagctccatgaaggctatgatttgcaagaggactgggagtggtagctactacaggattccctacagtcccagagggaccctgactaacatttgtagtcgaactactcggtagaagaccttgggatgttaagtacccagcttgttttgggagagaagagtgtgctgctgctgctgctgcagggaccactggaataggaccagcccgtgcaggacgagtagcagctgtaagagcatgcaagggccccgcagtgagacgaatgcagtccaacagtgatgctacttcagctccattaataaaatcttccaaaaactgtgagtggcagaaatatgtcaaatgactgcaagtctttatcgttaacaaaatattatgcccgtaaaagaacttttttacaaaatgaaaggaaagagttaatccattatataaactaaccaaacactgcctcacattatctagaagaaaataagacatgctaatcaacatggccacaggggttgatttgagaggggaaataggtatagaagttatataattcaaataaaccttcctgctaacataaataatgatgagcagtatggcattagcttcttttttcttttttcctttttcttttttaaaaaaaatcttaagctggaaaggcactcttcctaagcctaatcatactgtttcctgagtaaaggatctggcaaaataaactgaaagacaatccgaaggacaatggagatgacaactgtctaataataagaaacggcagaaaaggaaaatcccaaattattggaataatatatataccttagtatgaggccacagctgatccggagaaacatgcattgtgcatccctctttactagattcccactccacaacaaaacgggccacaacacccgatccaaaactaaaccacaaactcattagtccaaccgcctcaatcctaaatgcccttctcatctgttctgataaccgatcaacgacctcaagcgaagctttaactccaactggtgttttaacatcagagcttggactactttcttcggccttctcatcagccctaactccaagcagtctcctcatcccaagggcaaacattcttgcattagatagcctttgaatatctgccactaatttctttatactatcagtctcaacagattgatagctgagaacaacaccttccggatcatatcggatgtgagcatctatatcagatgtattggcaatgcgaacacctgaaccccatggtgtgcaattgcttcctttttgaagctcccacaaatcccggaaatgctgatcatttatcttgacatcccaatacatgcttccaggtctaccaagccgcagacaaatgtgttgccatgtatcacctctcgcaaatggtaatcgaaaccatatgcttgaggaagcacttcttaaacctacttcttcaacatatggaatatccagtgcctccatttggctagtcaacctggcatgcttgatacaaagagaacaatgtctgactacatgaagaagagctgacacataaatggttgaaggtgcatttcctttattagcttcagctataagatttccgtaactgtatccatcagactttgaaaccatttccattgacataagtaactgaggtgatgagttatgagcaccaaccgcttctgatattttccttctcttacagaatcctgaattggcttctacatctttaagtgatggaatcaaattcaacatttgtgaaacagtacgcttccgaggatttttatcatgttttgaaacatcataactagggctgtgacaaattgccgaatccaatacctgtgctgaaaacagtataatcactagtcataatgctgccaattaactatggtaaataggaaaattaacaaatctctctaaatactgatacacaaaggagatatcttacatacgagagttgaacatgagtttgatccagcaaccttgaaagatccaattagaggatgagaaggtgaaattctgggtccactggctttcacacttgaaccagagactcgagggccagtgggtcgaggtggcgataagagttgagatgaccttccatatatatcctttgaagtatcattctgggatctcaaatgatcttcatccatggaattacaagaaccaaactcagctgactgtggtgacctaagagaagccaaatcctgctcagattttgaagcagatagttttttaccagcagaaatccttcccgaaacagatgatatatgaccaaaagaattggaatgtgttgagcccttaaaattgcttgaagaatgcaaggacccagagtaaggggtggttacacttgaaatttttgcaatttgtgatgtttgcaaacttccctcccatttaggagagggtgtaccagcttttatggagtgaagatttacaggtatagatccaaaacgagatatgggagatgcattgaatggcgaggagacattatgaatagaagatcctttttcaagttcaaagacttcatcaacaagtgatgagaaacttgatggaggacctccagctgtctgcatagaaccgtcaaggctaagatctgaaagaagaccactttcagaagtctgatttgcagctccagcacttggcataaaagaatgtgattttccccactctagcaagctcaaagtcatttcatcttcaagtatttgcatctggccaatatcaattttcttaatgcgtattacttgattattgtcattaacatgagtttttccaggtaggtttgactcagtctctatcaatttaaataaaggtttgaaatccttatcaagttgcatcagcagaaaatgagaacttccacaatctggaaaccccatcagtaatgaagctgaaccattcagaatgtttttgggcactttaactgcaggaagtccatgttcatagacctgcaaaaataaaattttgcaatgtattcagggatagatgcatgcataaatctagccctagaaacaaaagatcagcactttgtaactatttgtgtttagcatgcttaaaaagacacttacctcaaggcctaaaaatctgccaattgatgaaaataagtgcaaaatacttttgcttctcaagcttatgaaagcttcagcggcactcatatttccctgattcaatgcctcttcacattctgacaatgctgatgactcaataatattctgtgatgatcggagaagatagcgaccagtcctagaagtaaatttttaagtggaacaacagaaaagtaaggacccgccatttaaatacaccttaaattgtttctttttattttaattatgttcttcatataaacaattaaaatatatgggaaacaaaacacagccttttaatagggaaaaaaaaacttaagaacaaatcagatatgataacaaggtcacaaagcgacttttaataggaggtcaccatcaccggttcaaataccactttccaacctctttaaactatgaattagactagattacatctttacaaatcagaaaccttgaaaagtctaagaaatttctcccattaacaaactacaagcaatttcagcagcaagaatagttttttattaataaatcataacaggaaaactgcaatgtatgtaaatacctaatatttattcccaatgtgaaaaatgatgatccatatgcacgcacacgtagtatttcctgtccttcacattctctggcatttgccttgtagtctttctacaaaattaaagtaaaaaatgtcatcaggcaacatcattaataacataaaagtatgtttgataacagaaaattctcaaagcaacaacaaatggtagcaaaaatatggaccttgttagagtcgatatcagattcttcagtaaaagactggagaacaatatcacctgcagatctacttatctgaccatttctgttaagatctttctggatttcaaggaggcgagtgtatctattacaacatatggctcttagaagcaacttctcaacatcaatgcagctttgatcaagcgaaaactctgcctccctcccagttaaaggatctatgacaaatgcactgtgaagacacttaatctgcgaatctggtcctggttcaattttaataaatgggcatgatcctgagtcaggcatactggtgttcttatcaaaatctaaccagtacataatttttaatcctggtgttcgaagactagatgaatcagcttctccatcttgatttaattgtgatgagccacttccgtcagaaatgagctcaaatcgaattgcatctctccatcttccttgtcgaagaatttgtacttgcctaatgacggtatccataacaagtgcaacacaaagttcatgaagaaccgagtataatattacaaacgggttatctgcagcagacattctgcgttccagatcatctccaagaatatgacgccgtgattcctccagcttaattaatccagttctctcaccaacgagcaactccaagtgcaatatcctccacattgatagatgcccgcggtagccaagagtaactaacaccttaaattccccatttacacgaaccaatgcagtaccatcagaaattttcacttcagaaatttctttaggaagtgaaacttctaataatttagatcttacaagagtatctaactttttcaaagccggcttttgctgatcctcatttaatgtactttgcatgccaacatcttctatgcatttgggcaaacgttgatagcttcctgtcaggagcacttcaactgcagaaggaacatcataaactggagcacgggcttgttgtagcgcttcatgcataaaaaacaatgaatctgcagcttgggtgaaacaagtatcatgactcgacagagtggaagcaagttcctgacaatactgtatcagcggaacctgcaaattggaaagtaagtattgtcaaaatttcccattgctttcagttgacctagattttactttacgaaatatagaacaaatgttgattagttgaacattatggattgcaaacctctccaaatactttagactaagttaggatttacaaattcacccctttcagcaaaaataatagttttaactaaaccttcttacactacagagtattaaccgccaaatcaagtgactcccattcgtcctaaccaaccaaaaaataagtctaatatcaaacctagtccatatcttcccttctcttggcaatcaatcaaacgaacggtaaaagttaacggccgaattcaatttactctttcaactaaagttaaggctaacgtgacaatttcaacatatccacgaatctgataaaaataaagatcccaaaacctccaaattttatcccatttcttgaactagctatcccatcccaaaccaacacctagtcattataaaataatataataataaaaacggcgaattgacaaccttcacagcactgatagtcacaatagctcaaacatctttaaacgggaaaacaaggagcagccctctaaaaaataaaaacaatactctcacaaagcaatcaaactacatagtgaatcttgttgtcctaagttccaccgaccagtgcccacatatacattcttatgaacaaacaacctaaattcacattcccaacccataaaacccctaaatttacattgaataaacccaaaaatccaaaccagcctattaaagacgcaattttcaatcccaattggttacaaacgccaaaacccagacaccaactaaagtccatcagacaaaaaaaacgaaactatcaaaacagaaaagacggacgaacctgttggcaccatttggcgaggacattgagtcggagcatacgttgctgggtcttgacaacgtacttgagaatgttaatcttcttctcagtatcggattggtcagaagccctggatttttcgacgagctccttcaaggaaaggaaggattcctcagcggcacgactgaccagggtggagaagtccaccgtctgttgccctaagtcggcagccattgatttgagagcgaatacagagctctagggatctataacaataataaaatcccaaacattgaagctagggtttgggtcaatttgaaggtttggggcagagccggagacggagaagaggagtagctcgctcctctttcagcttctctctctctaaaattataacaaacttcgtaaatatgattctttttttttttttcgcgtggattctctgaattttagaaagaagaaaatagtgaatgttagaaagaagaaactaaatgtaggccgtggaccctacttgtataatatttaatttcgacatggcaaatggtaaatttttttttttgacgaaagagtaactacagaaagagaagctacagaattggaaccaaatcattggagcataattcttcatctagccctagtgtcttcgagccaagctatgtgcattacagttatactttctattaacatgtcgaaagctaacatcagagaaataagacaaagaacttctactatcattcataacatccgaaaggactgagagatcacgcttctgaccacaaactctatcgacaagcagcttcgaatcagtttccaccactgccagtggaattttaatatgatagcaccagttcaacccagctcttaatgttagggtttataaaacacttaagaaatatataaattacagatctaaacatattcttaaagtgctttaatatagaaaatcctaaatcacaaatttatagaaccttggctaaattaaagaagaagatgataaaaaatgagcagaagcactaacctgaagacattgttagagattgcagagaag

SEQ ID NO: 378555 - DNA, 4473 bp, Cannabis indica
gtaatggctgtactctaaaacaatttcaataattagtccttaattcattaaaatacacattaattattattataataaattaataattaaaaaataaatagaataattattacgtatgccacgaagagccctttcaacattaagagcagaaatcaaagaaggagactcttctgtttcttcaatagaatcttcttcttcttgtgttgttgcgtcctcaggagatgttattgtggtctcaaccgtagatgatgatgatgatgatgtgtcatttgaattgcttcttatcatatgaaatttcactaattgttgttgctttgattggaaaacaacgtagtttaatgacgtattactaaatctttgtggaacaacatttgggaataatattgaacctttggccattgatgacactgccatggctccaaatttttctttattattcttatatgtatttatataaatatatatatatatatatatattttggataagaggctcagatttggataagaggctcagattaccagaagaacgttatctctttctttcagctacataaatttttttggcagtaataataacaataataaaaatatcttggccaaatttataattaaataaagtttctgattattgacatacaagtcgttgtagtatagtggtaagtatttccgcctgtcacgcgggtgacccgggttcgatccccggcaacggcgtttcggtttgttttgcctttaatttaagaggatatgtcgtttttcacaaacgacaattattcaggtcaagtctttaaaaacgacaattttaagaaaagcaacatcttttcaataaacgacaatcatttcgtttactgacgacatcggttttcataaacgacaatcttaacatgtcacgcgggtgacccgggttcgaaccccggcaacggcgttttacttggttgtccttataaacgacttgtcgtttttcataaacgacaattattaacgacatttcgtcaataaacgataatattaagaaaaaacgacattgtttcaataaacgacaatcatatcgtttattaacgacatcggtttttataaacgacaatcttaacatgtttagtaaacgacaactatattataaaacgaaatgtcgttttttgtaaatgacaatatttaagaaaacacttatgccgtttatcacaaacgacaatcttaatctcaaacgatatgtcgtttagtaaacgatatcggttttcataaacaacaacctcaatttacaacgacacgtcatttatctctaaacgatatctctaagctaaaacgacataaagttttcacaaacgataatcttcaacctctagattttttttttgttaattgatgaaactaacagaaaagaggagaatagaagaaagcttgaatagagagagagaagagagagaaaaatgggtttgggaagaagtgagggaatggattccggtgaggctagctcgagcggaggtgaaatgggtcctaacacctccgaaccgttgattccacggagatttccgctggctgctcagccggaaatcatgagagctgccgagaaagatgaacagtacgcttcattcgtctacgatgcctgccgcgatgcttttagacaccttttcggtaattcaattcataatttgttcatataatcttgaaatttcggttctttgggctttttcagtatgtaaatctctgtaacttttacttgtataggtacaagagttgctgtagcttatcagaatgaggtttgttctttcttcttgccttaacttgaaattgctgaatttttgaactaaatcaattgggtttgttttattcttcttcaacagtacaaaattgtctgaaaaatgtaattttttgttggtgcctttcaactgttgaattcttgagataatggggtttttatttgttctttcattaacagttcaaatgtgtctgaaagttgaattctttaactaaatcaattgggttctgttaatttttagtctctttttcccatttatgccttttctaaatggtttagccattaacttgcagctgttgaattcttgaactgattgtgttttatttgttcttctttaacagttcaaaaatgtctgaaagttgaattgttgtacatgtactccatttctgcgtaaaagaatgagaataggaatagaataaaatctaaaatgcatgaaaacttcggaatggtcttgcattttatggtggaaaagcattcgaatgctttcaaatacaaccaaataaaagaatggaatgaaaatcaacggttattgtagacaacctaactgtttttatggttattgtagactaagctactggggcagatgctttattatgtgttgactactggttcagggcagcaaactctgggagaagagtactgtgacatcacccaggtttgtaaccttagtattggttttcccttttttcgggtgggattattatgcttgatcctgagttttatgttttccttacatttctgttatggttcttgtaacaggttgcaggacattacgggcttccaccaaccccggccaggcgtgcacttttcattgtttaccagaatgctattccttacattgccgagcgaattaggttcaatactgtgttttactcttttatttacttctttaaacacagtttcttaaagtaaaggcttctgaattttctatttcacagctcgagagttgcttctcgtggcattgttcttgcagattcactatctgaagatccctatggaagcaatagcgatcgtgttaattcatctacaatgatgattgatagttcatccacttctacttcagagcaatctgtttctgctttatcaaggttgaaacagaaattcaatcggttatggctctctggaattcaaagatggcctgtggtacttattcatattctaacttttaatcttgcaacttcatgttaattttaacatgtttgttttctttctaatatatccgtactggtgttgtactcaggtgcttcctcttgctcgggaattcatgctactacttgttcgcgcaaacctcatgttcttttactttgaaggtaacactaatttattttcattcatgttcatcgcgagtggaattttgctcggttgtgttagatgttctaatttttgttgtcatacttctaatgtgtgcaggcctctattatcatatctctaaacgtgccgctggaattagttatgtctttattggaaaacctttaaatcaaaggcctaggtatgtatagagtttccgaaatcttcatccttctgtaaaacaaatatgtaactaatagatacgcttatctccctttctacagataccaaattttgggagtgtttttgctaattcagctatgtattatagctgctgaaggtctacgtcgtagcaatttgtcttcgattacaagttcagtccgtcaggcaacactcggagcccatcatgcctcaacaggttaaattaatgttggttatattactcaagttgttagtctcagtttctgaatgtcatcagccactaaaacccaaaaaaacactataaaaactttcttaatttcgaaccattctcaaatcctaggtgatcttactcgatgagtttacaggtggaggtttgcctattctaaacgaggaaggtaatttggtaacaaccgacactgataaaggaagttgggtaaacgattcgtcgtcaacttcagaggtatccttacttttaaataacggaatctaactatgtatgtattgaaatgaatttcttaatttggttcccttaacttatgcagtcgattagcaaatgcacgctttgcctaagtaatcgccagaacccgacagccacaccttgcggccatgtattctgctggtactaactgtcatctaattatctttctttgctttgatgccatacatattatataacctgtttgtttggtatgcaaatttgtaggagttgcattatggaatggtgcaatgaaaagcctgaatgccctctctgtcgaacccccataactcattcgagcctcgtttgcttgtaccactcggacttctagctcttgatcttttctattgcagcaaccctaagtagcggtctagtagtacgcatttgttccaaagttcgaatccccataaactcgtggggccactggaaggtttcccgatcgaactgccatcgccaaaaaaagaagaagagaacagatcttctgtactgcagcctcctgtcaagatagcattataatagaaattgtagcctaacaatttttatacaatttatactcatttattaataatattttagcaaattattcatattaactcttctccttgtttcttaatcatttttcttaagaaattcatgttatcattgacacgatagaaccaggcccgacccggggcataggcgggctaggcctgtgcctagggcccacccagtccaggggttcaaatttttttttttcctcttttaaaattatacatttt

SEQ ID NO: 378556 - DNA, 5624 bp, Cannabis indica
atacatatatatgtatgtatactttcgtttcttatttgtaacttcaaacgcctgtgctgatttttcctccttttatgctcagggtagcttcaaccattgatgcagttctgctatctcacccagatacacttcatctgggggcgcttccatatgcaatgaaacaatttgggctttcagctgaagttttttccactgagcccgtttatagattaggtcttctcactatgtatgatcaatttctctcacggaaggtggcaatttttgtcttaatttttattttatgcctttcttttagcttaagtagtaatctttttatttaatgggaacattactttagagtactacctatttgtttaatgctaatttctttcttgtgcagcaagtatctgagttcgatttgtttactttggatgatattgattctgctttccagaatgttacccgacttacctatgcccaaaatcatcacctttctggttagttttctttttaccctttctttgtatgtgtgtgttaatttgttggtaggattaaagaaaaaggagagaggagaagatgttgaaattgaataaaagggtgtattgggttttgtatatttttccattaggtaagggagaagggattgttatatcacctcatgtggctgggcatttgttgggtggtactgtgtggaagattactaaggatggggaggacgttatatatgctgttgacttcaaccatcggaaagaaaagtaactcattttgctcccctacatgaattttttattgcataagattattagaaaagttgcttattgctatgatttttgtcaggcatttgaatggaataaatccatcctcttttgtgcgccctgccgttttaataacagatgcctataatgctttgaacaaccagccttacagacgccaaatggacaaagaatttacaggtatacatagtttaatttttgtttcattctccaatatggaatgcttgctgtgaattaatgctgattacattgttacaaacatacttggattctagctatgaacgtatttttgtcattcttgtactagataccataaagaagattctaagggcagatggaaaagtgttactacctgttgatactgccgggcgagttttggaacttattcaaattttggaatcggttagtcagttgaggcaacattgctagcacttttcttatttagtttgttattttctgtatctatgacttagattttttctctttgttacattctagtggtgacataatatctacataactattttcagtgctgggcagaggaaaatctgaactatcccatatactttttaacatatgtttcatcaagcaccattgactatgtcaaaagtttccttgaatggatgagtgattctattgcaaagtcttttgaaaagacacgtgacaatgcctttcttctgaagtaagtgatctgattagtttagatcatttagtaatgaagtttattcaccttagttgataattacttacgagacacacatggaaatgcttgcaggaatgtcacacttttagttaacaagaatgagcttgatactgttccagatggtccaaaggttagactcgccaaatgctttgcgcaccatgcttatttttcatttaccttgacttatacatgcaatataggtggttctagcatcaatggccagtttggaagcaggcttctcccatgatatatttgttgactgggcaaatgatgcgcggaatctcatgctttttacagagagaggccaggtacttttgtaggattagaactcttcaaatcaagcattcttggcttggcagttatttgaatttgtagtgcaaaatcttagaaattcagttgaagcagtttccaaattagcttatgcggtactattttgatgagtaatcaacttcacattaacttagttttctttttaaataaaatgaactagatacttttatttatttatttatttattctgaggaaatcagaatgctgtggcattagattaatacataatttgttatttattttaatgtactatattatgtctcccatcttaagagatgtactcgtaaacttactgggtcatcttttttgtttatgcctaaaagttttgtacctttaccatttatgtagtttggcactttggctcgcatgcttcaagcagatccacctccaaaagcagttaaagtcactttatccaagagggtccctttagttggggaggaactaattgcctatgaagaagaacaaaaccgaataaaaagagaggaagctctaaaagctagccttattaaagaggaggaatcaaaagcttctattggacctgatgttaatgtgagtgatccaatggtcgttgatgccagcaatactcatcctttgccagatggtatgtataaagttgtgaatttgtgtcatctgtttgagctagtttgttcgatgggtgattcttggtaaaggtagttcaatttatgaaagaacaatgtgacttcttgtaaaataaggaacaggtcaaaattgagttgaaatggatggaaaattgagtccaaagagaggtcaaccctcttgattttaaactaactcattcgacacgaaaattaatagaagttttaaattttaaattttaaacatatgaagtttcattctttgagtgcatattcaaattaattttaacttgtagaacctgtgtatttgaatgctttgtttatttatgtgattttcttaattgtcagaaataatttaatttcttatggaatgttgattattttgtacattattataactttgattagtaaggtactgtttagtgtttcatattgcaacatctagttcaaggtgaatttacatgttacataatatatttgtcttaaacaaaataatctattttttaaaataatgcacttagaatgataattctgcttttattgtgcaagtcagcttcttgtatggcatgaaagttcatctgtctggtttgggtgcacaaattttgtgtgttgctcattgacccttcttggagtccatgctttattcttgtcttaaaaaataaaataaaaactctaatgtgtttgcaagtagttttctttcatgattaaaataaatgagtatgccagttttctttgtacagtaagcatgtttgtcatatttccgattacgatgaatcatttcacttagattatgataccttcagtttatatcgttttcataatattatattgttctgattgtataatgtatcatcacagtggcaggtccacgtggcagtggataccgggatatattgattgatggatttgttccaccttccaccagtgttgctccaatttttcccttttttgaaaatacttctgagtgggatgattttggtgaaattattaaccctgatgattatgtaatcaaggatgaagacatggaccaagcaggaatgcttgtgagtagccaccatttggaatatttgattcttgctatgatgttaagcttttatacttaaaattttaggttttgtcaccgcagatgggtggtgatatggagggcaagcttgatgatgcctctgctagtttgatacttgacacgaagccatcaaaagttgtatctaacgaattgactgtaagttgaactttttgtattactgaatagcatttgacttttgtgatgatgttaaataagaaattgtgttactgattcaggtgtcagtcaaatgttcattgctgtatatggattttgagggccgttctgatgcaagatccatcaagtcgatcctgtcccatatggctcctctaaagcttgtaagaatatttcctgttctgtattttccccatttttattacatttatgttttttttttgtcttctcatgtgtcaaatgtcatcaatactggatttgtattgctacatctttggtcgagtggaattggaattttattgtagaactgaatttagtgttctatgtgtcttaaatgtatactctcacagtattgcaccatcttagcttgtgaagccatgcatgtacctgttatgcaggcacataaatatttcatgatgtttatttgtgatactaaatctcttcctgaacatttctcaattttttatgcaacatggccctacctttcatcctataatggtttctttgtccaaataacatgacactagtaacaaaatatttaaataaatttttaaatttcttttgcgtgttaattctgaatgctctcaaggcaaaggtcccagcatttcttagagtatttctcttagggaataagttttataagtcaatatatataaaaatatatttgtatttatatatgactatttttaatctttcagcaattttatgtggatatttgatttattgtacataatcttatgttctgtgttacttcttggaggttctggtccatggaacagcagaagccacagaacatttgaagcaacactgcatgaagcaagtttgtcctcatgtttatgctcctcaacttgaagaaacaattgatgtcacctctgatttatgtgcttataaggtattgttctatgtaatttttttccccttcttagtctgtcatttctgaaattacaattaatttggcttacgttatgttgaaaaacaggtacaactgtcagaaaagcttatgagtaatgtgttgtttaagaaggtgagcaccaaagcctcagaattttgtttatctcacataatccatttgtaatttttcttgacgttactgatctgcaaacacagctcggagaatatgaaatagcttgggttgattctgaagttgggaaggcagaaaatgacacactgtctttacttcccctctcaacggcaccaccaccgccacataaatcagtccttgtaggtgatttgaaaatggcaaatttcaagcagtttcttgccgataatggtgttcaggtacccaattttcatttgtcgctaaaataagatatctgtattttacctcccacatcccctaataaataaatgtcctgccaaactgaaaaatagacaccgatctttgctttgcaatcacagactgcataatgtatctggtcttaatatcatttatgcttcatcgaataatgccttgctactatttatatgcttcacaggctgaatttgctggcgggggtgctctacgatgcggtgaatatgtgacactgcgaaaggttggggatgccagccataaggtcagttattgtctcacccaattgaattctattttgttaaatatgaatagtttaccttaggacatagcatatcggttttggtataatttagtaatagatttaatatgtttcattttaaaattaattgaagcatattaaataaaggtatagtgttaggcacctttaaggtcctctttagcatttctctgaggaaaaaatggtttgtttctagtttgtaatccaagatgcttgacttgataaatcatatttgaaatgtagggtggtggtcctggtacgcagcaaattgttattgaagggcccttatgcgaggattattataagattagagattatctgtattcacagttttatctgctttaaaatcaaaggcaaacttattcttaccccattttttttgagacttgtgaagctgaaagggctctcagtgaggagagttttcttttttattattattat

SEQ ID NO: 378557 - DNA, 4154 bp, Cannabis indica
gtataatatataattaattatattaatcacttaaccggaagtatccgctaagcatctcaaattgtaattataaaatacaggtgcatgtctttattatatcaaaatatgaaagtcaagtccttttcacattacacaatcaatcccccctgaacatgaagttaagttggaaagagagagaaatatgaagaggctaatagtaaattagtgatcacattttctattttaatattaatataatactcattgcaacgagctgttggtaataggtacatggtgcgtgtgtatatatttataggagacagtagagtaatattatttagtaccatgcaatatgcatgtcatatttaaatcacttcatgaatatgttaattggtcatttatttgttttgcgtgcctatgtagttttactcatcataatttctaactagctaactgaaaaagaaagagactgaatttaggtagtgacactaatttgagcaacactatttcacattttaaaatgttcaaccttacattaatatgatactttacaatcaattaacagtttctcatattattcattaaaccaaaatatatgtggaactcaatattaaaatactcaattaacagtttgctacatatttggctaaggtgactgttaacaagcatatttctcttacttaagttctaaaggtagtgatgatgtgtggttccatggtccttttggtaaaacagtgttacaaaagtgaagtttaatttatatcaaaaaaatgtatgtgccacgaaaataaatataaagggcccaaattattatattttttttctaagtaaaattatatctaattctcgtaaaaaaaaaaattgttattctcccataaaggtctacaagccaagagtaatttgaagacatctaaattaacaagaaaggctttgaccaagatacgagaataccaaacgaggttaagaccctcatgacggattacatggtaccctgctcgagtgccgtatggagaaaaagtaccatgggagcattgattattccctgtcagtgctcgcaacctagggtttcagtcctaggtttggcctcttcatgaatctgaggtaggttgttgttccaaaaccctaatccaagaagagatctaacatttacatgacttattaaggtgtaagaataccaaggcttgaacataaagtaaaaattacataaggaatagtccccaagggtgttacacgagccttgtctcaatggtgtggcactgctcgtgtaaacacatgaccactgccacaccattgtgccagtgctcgcccaagaagattacaaaggaggaaagtggtgaaatgagtttttccaacatcaagtgacacttgacaaatgaaagaatccaccaaaaggtgaattagtgtcatacacgaccagtgccattccccaatggcactgctcgtgtaaggtataaaacaaaggtctcgtagggtatccaagctcaaaactcaagaaaattcttaccagccctcaaaagacttgccgaacacaactcaaggtgttgggagacaagtatcacacgatcattgccacggagaaatggcaaggctcgccccaagaaaggttttcacgagcggtggtatttccatatcgctcaactcgacacccttcagtatattggccataactcacttaattctttcgaaatgacgcggttcatgtggcaatggaacgctcttttgaagacagaattaagcttgtctaatagactactcaagatttcaatgttttcaaccccaaaattgggtaacaagttaaggcttcatggcaatgcttgcgaattgaagggtttcaccaaagaggagcctcatgggacttgaaacacgagcagagcaactttcctagtcccaaggcttgcccaaatgagcccctacatgagttatgacatgtcccataccattctcaaaagggagaatgtcatcaacacatgttcaacttgtattttagaagaggggcttctagagacatttaaatgcctctatgaatagttagatatttatggatatttgttttaaatgtaatttacaaccattatttatggaaagaatgcaaaatctttgtaattttctcccagattatgggggaagaaaaaggaaaccctagacctatataagcttaaccattaaacctagggaaggaaccttctttttaccgcttctttgatgtcatactctctttctggccttctccactcaacctttgaggtatgatccaattgtttattagtctttctctcgaatttttttcatgcaagcataatttttagaagtctcatcattacatccatgaacattagtaattttctcaccaaaagtgaaccgtgttcattgagattttcttccaaaaacaaatatttagacaccacaatatagatttcaccaagaaatctacatcgtaatttactcaagcacacttttgtgaatctaattctggtgttcttgggtcctattaattaaattaaaagtagacgtagtttcattactatcgcgatatgaggagtgaactactataaatctcaatgtcacttttactataaacatgcttggccgagtggcctcttgaatgttcatggtcgagtgacactactatgtacatggtcgagcaacttctctaatgcatggacgagtgacgtctctaatgcatggccaagtgacttttctattgcatacatgtcgagtgacatgttgagaagcatggacaagtgacttctgtaatgcatggtagagtgacttctccattgcatgcatgccgagtgacatgttgagaagcatggtctagtgcatgttgagaagcatggtcgagtgacatctctaatgcatggtcaaatgacttctccattgcatgcatgtcgagtgatatttcttcctcacatgttcgagtgacgtcaagccatccttggttgagtgacctttgtgttctcatggctgagtgacatttcttcctcacatggttgagtgactacttcaatccatacttggtcgagtgaccttgatcttcacatggctgagtgaccatggctcttcagcatgcatggtcgagtgccatcaaccctacttggctgagtggctccaaagctagggcctcgttgagtggcctctagatacatgcgttgacctgatcattccttaaccgaatttttaagttgctttctttcatttctcgagactaatcattgtctaatctcgagaatcaaccttgttaattttcagagttaaaacttgtccctagtctataagaactcttttatgtgttctggtagactaaattcagcaagcgtcgtcccttctgcttgattctgcagttgtctctttaggggcttgcgccttgagatcttttgtttgagggagtcttcttccacttgggctttctcaacctcttttctaatgtaaccttattgtaaaaggagtataaactctttgagctgtctcgaccttttaccaaatacttatagaatgttaagggagctgtttagcctcttgggccgcactcaaccttttttgggttattgtatgttaagaaagttgtttaacctcttgggtcctgcttaaccttttttaagattcaacattttattgagggagattatggcccttaggcaatgctagacctcttacattgcatttgtggcgcataaagtgcgttttaaatgctagaagattggtactccttggatataagggagcttatggttgttaggtggcgctcaaccttttttaagatttaagattttattgaaggagcttgtggtgcttaggcggtgcttgatcccttacattgcattcgaggcacttaaagtgcgtggtgaatgttagaagatcaatacaccttttagagaagcgtccctcttagagtcgtatccaatgcctcttttattccactacttcattcactttgacaatctcgattgacaagtatagcgagcaagtcaagcaaacatgtggagaatgataactgccatatgtgaggtgaaaacttaatattttgactgataaggcagacatgtgattgcccgaatacatatgccctcattatttttatacaatgtgctaaacgtgaacttgccatttctaggaatattttcctgtatagtgaaacttcactttgaggaacaacttggatatctaatttttacggg

SEQ ID NO: 378558 - DNA, 3723 bp, Cannabis indica
agaaagaagtgccaaagctgctggagtacagttcttgtctcactcatttggctgtttttgggattttgggggtaatatacttgagcatcactttttctttttttccaaaatatcaattgctccccttttcagaatttgtaggagtgctctttatttatgtttttcttctctcttttaatccgggagattgtatgtttagtgttagaaggaaactgtttaaatgaaaacaaatcatagtaatgattgtttcagataaggtaaatatgttcaaatcatagtaatgattgtttcagataaggtaaatatgttaagtttctaaagttcaatgctatagatgtcatgctaattcagataaaagttactaattggtacagaataaggagctcttccccctttttgttcacatacttttcttaataaatataatggtaaagttgtagggtgagtaaagtcaacagttatctgtcttatgttgaaacattgatttatgaattgtggataaagtttttgatgctgccaagagcattaattggagataattacaattgaagttatttttgattgcaatggttaatccagctacttcaataagaattgttaatttaaattatagtctttagtaggattttgcatcagcctaaaaacctcataaataataatatagtttgaaactgtatgtaggagtgtgttccttttatgttcattttgcttttgtttcaccaagcactacatgagtaactagatgtccaagttctaaacacaaagacctttgatttcccaaagcttgattactagctctctggtctcaatacacattggcaactttcatttcctgctctgctgaatagaatgtgtaataatttttggcaaatcaactaattttatacgctgtatgcccattaagaacattcttcattaacatatttatacggtgctacaaattttattctagagtttcttgtctctaaaatgttatatttaaaagtaatacattcccattaaagttccaattgcttttgtctttctcatcaacatatctttcttgttacatatgcaggtcttaacgaggtatttgctacaaaaactatttggtcctggaactgctggagtaacaagcgacgaaactcttctttatctcgaccttccgtctaatatggtttctctctcactctgtgtttccatctctctgtccctgtactttcatacctacacctatatagtattctgctatatttcctttgtgtatctctattttgagaatatattgtttagctacaattattacaaggaattgtgttgcatgtgatttcatgattattgaacttaaattcagtttccaagagcgcttgtaactactgaggttgtgagactctcttcaagtgaaattactttgctttctttcaggttggctcttttctaatggggtggtttggtgttgtcttcaaaggcgacatatctcgtgtgtctgattttattgccattggtttatcaactggttacctaggaagccttacaactttcagtggttggaaccaaaaaatgcttgaacttagtgtcgaaggccactgggtttcatcagtgctcggttttctaataggtaagagatgttgatattatgagaatgatttttgttttgggtatctacaatcatgacaagcagcaactgctgctagattgttagaccaaactcccctagttggctgatccctttatagttattttcaggtttgtttcttgctgcttactctattatatttggagttgagacagccaagggttttaggcaccttcttgaaaagaaaataacaaaccaaaagagcagcattcacagctctgagagtatctggagagtagacagtcgcgagcgtcacatagctgtcatggtggtattctttctaattctatgtttactgtggagtgtgagcggtataatgttgagaaaggagtttaaaaacggtggcagtgaggctcagctctggttaggctgcatagtagggcccacaggtgtgtggattaggtggttcttagctcgacttaatggatgtggattaggaagggcgggtttgtttaaatggattccgtttggtactctaattgcaaatgtagctgcatcatgtatcatggctgcactctctactattagaaatgcggtatgactattcctatcttttatgtattacgtatttaaagtcgtcttagcaaaatagaagtgtaaaacacaatgccatatggttttcttcgtgtgattattgtagtgcatgctattattgttattgatttctttaatgtatggtgcacaaattatgttaagaagtataaatttggtaagcctaatcgatttcgcaatatgtttgtgtctgaaatagggaagcagcatctttatgaagaacttagctaagagctgttttttttttttgatacaggtgaacactaagacttgtgatactataactgcaggcatacaacttgggtttttaggttgtttgagtacggtttcgaccttcattgccgagtttaatgcaatgagagaaagtaagcatccttggagggcatacgtatatgctatgatcactatatgcttctcatttggcttgggaactcttatcttctctataccagtttggactaaaggatacaaatacaactaacatggggtaagattctttcttttctgttctgctcaacttgacaaagtccttaatacaaaggtcattttcgaaaaataagatcgaattagataggataggattggatgatttttatgtatgagattagaaaatctaatttatccacctattgcgcggaatttaactacacggagaggtttggttagttttatgttattcaatttctcatcttaatgtgtattagcaaaaggaaaaagattaagcttgtatagtttttttccctttcataatttactgttggcaaatgttactaattcatatatatattttttatatgtataggattctgaaatagtcttgggcatggatcagtctgtaaaaaaataatatataatgtggctgtgagtccagttcaatatactattgtttttcatatttggcatacgatacaaattgctaacgtcaggtggaattgtatctattgtaatcgatttatgtgccaaaacatttcacatttaataatattattttttgaaggatataattgtaatgttactctatttttattacacgatgaattgtttcttcgagttttataaatctatcttctatctatcttctgagtttgagaattctattgttgatcctatagtatatctttttatgtctttcaacaattcttatagaggctcaataccttttaagattgcggccaacctctcttcttctgtcaacccttttacctttgttgctttttttttttcatgaatttatggatgtaagtcctcaaaaatttccccggtatttgcttcacttctatcaagtcttctaagtgagatgggagttgccgagaagagaagaactgtgtacgaaactctgacatgaaagaattccacgaattaaactttcttggagctaatttgaagtactactgctgggcagcttttgccaaagtagcagagaagattttacactgtatattacctttaactgcttgtaagtccatttgtatttcaaatatttaatgtgagacaaagaatcttctttgcctatatacatttttcatgttggcattttaaatttgggcggaaggtcg

SEQ ID NO: 378559 - DNA, 5206 bp, Cannabis indica
aagatttctactccaaccttcagtttttcttcttctttttgtcaagagtaatatttctcaggaaaacaataaaatataaatattagtccagttttttattattagatatatatcctagttctcaactaaaaagtgaacgtttacagctttaggagcagagaagagcattaacaatttttgaatagtttagatgaaatcattgatctattacactacacaataggaccagaaaaccaactacaagtcccttttgcgattgctagccatgcttgacatagcaaaaaacgtacaagcatccccccaacctccaaaaatttgatgttaacatgcaccaacctcatcgtggaactgatctaacatcccataatggaattttccgttgtccaaaatcagtggaaattgcagccttgaagtaatggatgagtataatcaacatatttctcccaaaggggcttgtacttttctattccaatcttcaaccatggctttgagttcccattgaaatgcagcactgcacccttctctatcaactgatgatcaacatttgtatatcccaaccccaatacgtgccatgagggatccaaaggctgtgtcaacccgtagaatgtcaataaaccaggaggcagtgtaccgagtttccacaatgttcggtcaacatttctctcttgccaataatggtatatgccggtgacattcctttttctccattcaaccaaatcaaatacattcatcccgaacgcccatccacaggcatcgggatcaaagtgtgatcttataagagggtgagagtaattcaagtatttatggtatctatgaaatgtctccatgcatgtctcaacagctccattgacattgttatttaaatctagggagaaaagaccagacagatccttctgaacaacaatgtcatcatcaagaaaaactactttcttcagtgcagggaaaacttcaggaatatagaacctgaggtggttcagcatggacaaatatttgggattccgaaacttgataggagttcgagcatcgacactgctgccagaaaagtaatagttctgagtttcagagtcttggagctgtttaagaacagggacataagaagcatttagccaagtaaagtcttcaaacttttggacctcaaccgtcactccacggaaactgttcatggagaaccaggctttcatcgctgcataatttatttcatcagtaaccagatggaagacaaccttttctggacttttagaatttaaagcagtagaattgaccacaactgaagtggcaaggatattgtcagagaagatacagaaatggtatagattgttatctttaagtttcatatccatttgttttctatccttgaatttcctctgtaaacttgagtctctaaaccattcagtagtcaaacggacaccaaggcagtataaactttttggaacttcttcagctgctatctgtccatatttcgagctcttctcattcacagagctcatctgttcttcaagaccttggattttggcttttaatctcataatcattgtagcactatcataatggaattgctgggcttgatagagtagaatagccatgtcatggatagtggattctgattctccaactgtcaacggagctctccttattgcagcatttgagaggagaaactgtgaattgcggatctgggcacttaactcccaagcaaactgaagattgttactttctttggcgatcacaacaaaagcttttgcaagagaaatttggtcgcttatctgccttgccactgagttggggttcaacatttcttctgtaacattaagaccttccatgatcctgtcgtgcctgaaagatctctgcataagaatataagcaagccttatcaaaatcaatacgaattaagtagacaatgcaaaagaaaacaacaaatactaaattatattccaaagaaaacaaatttttgaacaaccaactcttagtttcccaaaaagtaaaataaagaaagactatatacgatgtcctgccagaacagcaatgccttacgaaccacaacagatatgcaaataattaggttgtccatttatcaaaaatcataaaaacacacatcagccactgtattatcaaacaagttttcagagaaaacttagcagtgtcatcaattaactgacagagcgagagtatagatcaagcacactggattgctttgttttttgatttgaatgataggcaacgattaaggtctgaaagcttgattagacagatggattacaataccatagacatttattcacgcatactttgattcaaccaattgcttggcctataaaaactcagaatggttacacaaactgaaatcttttacctgattaaaagaacatcaaatggtccaaaagatccataaaaaaggttagaaacaaatcaatcatacaatatggcagccattctgcaaactcatacaacactctaaagcttttcacgagcaaaataataaaggcaaatgagataaattaagacaatacccattcgacccaactgattgtatattatttttaagcagaaaagtgagatcattacccttgaaatggcgggcctggactcaatctgattccctttgctcaaaacataaatgaaaagcaaaaccgccacagcacagagaggccaccagagagcattcgagaacagccgccgcctcaccggccgccgaaactccgcgggtctccgcctcatatccagagggacagatagagagagagtaggaaagagttctgaagtaagggatacccagatctgtaagggagatttgggatttgatagcttcaagtttcaaggcagttgtgaagaactccctttggttcagtgtggaagtctaattgaattgataatggcagctgaaaacgagtctctctcaaatctcacaggcagctcatctctttttgagtaacgtaacggtgttgatcttgccatttcctcttccttttatatttacttcatttcttattttcgattattttatttccatttttttttacttaccaatagcatacacaggaattatatcccaaattttggactgtctaataataaaatgacaaaatatggtatagtttcctttttactattttacaatttaatatatactgaaaaaaaattaggtaaagaggataatttttgcctctaatcgtaggggtattcttattttgtatattgagaaattataaatattttttgtagtgattggcaatgctcttcactacttttcatatttaaaaaatggtggatgagcaagcaacacacaataaggaggtggggttatatgacccactcaatttttaataaattaatttttttcataatttttttactaatttttatatatgccccacaatttttttttttcatttttgctatcatatatttttatttttgtccgtttttatttttatttttacttttattctcacataattatttatgtccccaagaagtttatattttttcttatagaatttttttcaataggccatttttaccactgggtctgggtacaggtttcttgaatgattataatatagaataatacaacacaactagctgtaataaatggctcatagtaaaactattcatatactacagagtttccatgtgctgtgtgcaatcacattaatcttttctacaagagataaccattttacttttcaagatcttgggactatttataaatataagcaaatatatatataattgttcttataacatatgaaaatagtataatatgagtctaatctaaatcttatgtagaaaaggaagacattaaagtaccaaaatcacgaaaaagagtacctcaaaaaaattctactatgacaccttagaaaggcctgtggaaacctcctacatgaaataaagtgtggattaaagcagcgtcactaacaaatgggattttatagtacttgccaccaagagcacatcttatgccctccaacaatatgcaaatgtaaatgaaccccacagctgcccaataatacatcccaaaagagccactgaagtgtataagtggcatgaaattgctcgagtgccaaagcacttgcagggctgtctccaataacatggctgtcatcagatgatatctgaagaagtgaggccaatcttcattcttcaccactgccgagtaacacaacaaaacatataccattacaaaccatgatgaccaccttttagcagccccggggatgaagaatacaaggtcttctaagatttcatggtgtgataggaagggctgtacatacaatcctgcttctgagatctgcatagacactaaatagggagcacatgctaaagttctccaccaccacactggcttctcattgtgtgcagggtagcgcaacccgcctgaagttatctcccgcgcttgtgcttgtgcccgcactgataatctgcctttatcgtgtgacaatggtattttgcctaacagccagccttcatttgcatcaatgaagacagatgatgcatcaatgcgtgacagagacattcctggaaattaaatgaaatatgagttagaaattagagcatctccaaccttaccaccaaatttaatattttcattctaagcacaacaccaaaaggtacactaaagaaaatattctttattattatattattttttaaaataagatataatattttttattattatatcaatttactaaaatcattacaattattatatctaattaattatctatatataaaaaaaaattactaattaattacacgacaataataccataaattattaaaactccgtaaattaaaatattatactagaaaaatcattatattcatgacaaaaaaaagagagcacattgcattacataaaattagattaatgaagcaaccttcatttccatttccgggaagacgttactgtggtatcaatatgaaagtaagaaacaaatcatcttgagttgggaagaaatgaagcgtttggtgttgaaacatttccgtgatacacaaaaggggtcctcgttatgatcagtttctgttcataaaacaagatggtacacttgctgaatttataaaaaaacttcatcagattattagctccacttgacaacatagcacccgaagttcagctaggtacattcttgaatggattagcaccttcaatcagggctgatttaagagttcaacgaccaaaaaatgtggatgaagcaatggaaatcac

SEQ ID NO: 378560 - DNA, 2456 bp, Cannabis indica
ttttattcttcttaattttaaaacaaccatttttttttcttctttccagtattttcttaaatatatgtattcaataataagtacatctttgttaaaaaaaaaatttaagtacatctagtaacggtattgtctcctccttaactcggtacttcggcagtactaaacttcaataattagagatacaaatcaaattaaattatgaaggaaaatatttacttaaaagggtagagacaaacttcttttttatgtttatttaaatgaaataaagaatttttctgcaaaaataaaaaataaaataaactaatgaattttgttgaagagaatagattagaaaaaacactattggcggctaaactttgagataaatagatggtcttaaacgccttcagaggtaatgaaaattaattttgacgctgagttgtgtaatgagttggttaaaattggggctggagttgtgtttcttattaatttgaagtttaataaaaagattgacccatcttacttaaattgtattgttataggtaattttatttgtatttcttttatgtattgtcctagaattgttaatagtattgcatgcgtactctttagcaaagctagtagtattgctaattttatggattgtataactattattgatgatattgtttgatattttttttttcttgtaaggttttaataagatcattttttcaaaaaacaaaaacaaaagaagattattttcttattaacagcgactacattgacataaatgcagcctttaaaatgtttatcagaaaaagaaaatgtaatttataattcacaagtgggagcagtataaatctattgtaaagacacatttcttttcccctcaaataaatagacatttataataaataaatatacatatatagagagagagagataagagcattatcgagagctcgaatctcaaacacaagaagctgaagaccgaaagggggtgttgtgtttggaccacacctagtgatgccatgctatgcaggtccaacataaaaatgaggccttttattttatttactgtttttggttaataaaataattaggatgttgagaaaaaaaaatatacacatgatattttctttaaggaatttttgggagccatatccaaaagaaaaaaaagaaacatccttccatatataatatatatataaaaataaaaaataaaataattaaaaaggtagtgtggaaagcttaatagtcttcaaatacaagactgtttattattctaatttaattttgggtatggagaaagcatctctaggagaagaaaaagggttagaaatttgtgtattctaaaggctaaagtctctagaaaagggaaagagagcatgtgtcttttagatctcaattagaagggttctttttataaaatgcagattcagtatcctaagtgtggattttgttttttggttaccttcttctaaatttctcttgaccatattacaattctcaactcttttctttcttgggtttctcttcggttaatttgatatatatacttttgtagatgaaagaaatttattcatatagacatcttttggcatctctaataaaactttctatattttaaaatttatgggattattgaacatgatttcttttgccaatttctaatgatgtgtctcaagtataaatggacctctatcgatatctcacacatactcatatacacatttggtggtgggtatatgatgatttctagatacaatacataagttgagacaacttatttcagtggtaagtttatacttgtattcatatatgtattgtattaatttataaatggttaataagacattaaagattcttagttactccaattgtgtactgatcatgatcatgatcatgtgaagtttttattattataagctattaatggtgaagtagttcgactatgcattatttaattaattatgctgagttttaggcatgatcttccataatataacttcaatgtaggttaataaagatttattgtcttgttaataatgcatattttactaacttatcaaataatctaattttcgaattgttaagtttgatatgtattaagtttgctagacttcatcgatgagacttgttcgatattagtgttagtttattctgcttgttgcaataataatggtttccaccttatttattgagacgttaattcattccaatttgatgttagataaatattctatctagtttatcaaaattttactttttctattttacagtatatctttatgttataccatatatcaatttctttgaaatacattactatttttttttaatttgatttatttcaaatatataatattaatataaatacatattctcatgtaaaaataattatgaaaaccgaaaaataattaataaaatatatttagagcaataaatagtattctataaatgtagaacatgaatagtatattttaaaaaaactt

SEQ ID NO: 378561 - DNA, 2619 bp, Cannabis indica
gaattaacaaacattagtgtgagtttgttatgagataaaccaaaggcagtgaggttttttagggcaataaacatttcaaaattcacaataccactcaaattattatcatccaaaaaaagggtttgtaaatttatgagtttggacaatgacaaaggaacttgaccactaaattgattagagtttagacttaattcagtgagttgagttaggtttccaaaaaaagaagggatttttcctataaatttattttgagaaaggtctagaaaagtgagttggttcaacttttccattgaagctggaatttttcctgaaaagttgcaagcacaaacatctaacccaatcaaagaagaggaaagtactgaaggtaaatttccactgagataatcattcaacttcacactaagaaattgcaaatttggcagttgaaaaatgttggctgggaactcacctttcaagtcacattctcttaggagtagagttgttaaggaagaaaaatttgccaatgattttggaattgttgatgatatcacaacatggctaagacaaagttcctcgagctttgttagattcgaaatcagggtctgaaaattaggattctcgagtttcagtaaatattttaaagaaactaaatcaagattaccacacaaataaagatgtgacaatttggataactctgaaatttgtgaaggaatttgaccaaaaaagaaagagtctgctaggttaagataggtgagtttggaaagtctattgatagaagtgggaatttgagagtaattgaaattgttgtcttcaagattaagactttggagatgaattaagttgaagagactactatttgagtcaagagagccatagagatagctactactgagatcaaggctaatgacatgacctgtaatctcatcacactcaacaccatcccacatgcaacaatcttctttcttgctccacaaggcaatcttcgaataagcacccgaatcaccagaagcagacttgtccataacaaagctttctttaaattgtaaaagagaaaacctttcatcatcatggcaaatgggctgcgaggaagttaaacataacaacattagaaacaatatgaaatatttgagatcacaaagaaaagtagtgaaaatgaagcaaggcattgaattagatcccataagatagttcataagattatagttaataataaatatttgttgtgtgtttataatgtgatttatatttatgagaaatgctaaaagtatgtgagattaatttgatgagctttgctactacttataggggtagaaaatctttaattaatatatattcttatcatgtcacataaaaaggtagcttaaataatgcccactgaatttatttatatgttgattgttattttgtttttatttattatttttttctaaaagggaagatgatgataaattaagtggctacccccacaaagatttttttgtgtacgtgtggtcaacacccaatatatttgtgttgagttttcttgggcaaggcatgtgagaaagtagaaacactaagaaaattaagcaaactaaagtctattattgctgctagggccccaccacttaaaaaaacttttagaaaaatggagagagatgaaatcacaattcaaatgacactacaattttttttaatcacaacactaacaaaattatcattaattatataaattattattcttacgttgtaactaaaaagttcgtacgtgactaaaagttttcatcacaaaaattgtaatttattgtaactaaatatatttttagtcacaatacttattgtgactaaaactaaattaatgataacttatatctaaatgctatgttttagtcataaataaaattagtcacaaaaatttatattgtaactaaaaaaattatcactaaatgtaacttttttttgtagggtgagcctgtgtgtgaaatgcttcatttatattagtcgtatattgctaattctgagccctaattttttacatgataatattttagtacgtagcacaattattaggcaactgatatacaacgtaagtgcaattatgtatgctcaattatgtgattggatatcattaagaaaaatttaacaaaattttattgcactgatgaataattaataacttgtacgttaagaatattttatgaagaaacaatattaagaacaatgtaaaccaatgtgtgatatcaatcaatgttaaaatatgaacatactaaccatattagaaatatgttttctctacaactaacataattgtagcagtactatcagtttgtaattattaatacatcaattatcgaagagttaataaaatgaatgaccaactgtattgcaactatatatataaaataatgtttccaaatctgtgttaaaaaataaatgatgaatgcaatcagaattcaataaatttagtattaaaattttgaaagaaaaaaaaacgttaatgtaacagttataatattgtagtgatatatatatctaatcattataccttgaaattccttattttaatattcccagtttaattatttaattaagtgattaattaaatgcggaataatgaaactagtactgaaaacaattttttcgtagttacagaatacaactctg

SEQ ID NO: 378562 - DNA, 1483 bp, Cannabis indica
tattataattgacgaaataaaatataagtaaaaacttttactaaatataaaagctttcgcaaccgcaaactccaaacacaactcttcgagccatgtctttttttgctgaatctcttccagccatgtttggtgacatgataaacaagaagatgtaaagaataaaatactaaaaagtaaataacacaaatgcagtcaaaagactcgagaggccataacatgtatatcatgaaatgttactatactgtctacaagtacaaactcaggaccgtctaccaaacttaatagtagtagcaatatagacactacagacttaggtccatcatctacatcagtgctaaacaatcctaaacttgacagtgttaatggtacacaatattaagtcaaaatactagccaatgcttatataataaactttacataaaagaaaatggcatcaacagcagagtagactgatactcaccagcaaaaatcatcatcatcatcatcttttcttaaagccatatttcttacgttcgtagaacaaatcagtcttggcacttcctaaattaacaatcttaggacacccatctctgtctttctcttgctgagtacactccttgcagtaataagcatcggatataccaactccaccacagatgacacaccgaccttgaaaggatccatagttgcattcatcacagacccgcacgagagtgcagggtcgcacgtacgagtcgcatatcacacactttccatcacatttctcacatagtcttccaattgcaattcccggttgtttccggcacataatcagatcgggatgatgcttagccatgataatctgcagacacagtgccccatcatttataattgttagattcattagccccccaaaacggaaagggttaaattcaagggcagttttaaatgaaaatcaaactaaaaaaagttaggcatgcataaagttagagttgctgggagaatatataactgaaattgaattggactatgtatatgaatataaatcaacccaaaaataataaagttacgaacaaaattataaaccaattagtaatttatcaagaaagaaaaaaagaacaacataaatgatacaaaagttgcgaaagaaaaaacataaacgcatcaagaaacagcagtaccaatcattgaaattacctacaggatatgcagtacactcggcggcgggttcgactgaagagacggggcgtgggtgatcgggttggggagagtgagaatgtaggagaaggtgcgagtgagaaatggtgatgacggctgagtaaggtgatttgaggttaggtttctagaagagaatagatgttgggttgggccaaaatatgtggcagcccaattcatttaatctcaaggaagagtccaagaaattaagaaaattttcacctagtacatataatctcacttcattacattaatctcttaataattactttctttcatttttaacttatatttttatattattattatt

SEQ ID NO: 378563 - DNA, 7575 bp, Cannabis indica
taaaaaatatatacagttttatcataacaactctaaatccaattattactagcttttatttgacaaaaaataattcaagatactatcttttatcactttgaaaaatataaattcaatttttcatttaacaaaacagataatccaattaataacttttataaaatacaaactccaaatttaccctataataatctgagtttagattttcagagccaaagtcagaaaaccaaggtgaacaaattatttttttatgtccatagtctagatatttactcgggactaacgcccacaaatttgagttcattttcaaaactttacgggaaaagtttgtgtatgccaatatttttctctcctaaaagttcaacataattttaaaatctggtatgagactagaaaattatcaagcaaaagagtttatatttctatatacaaagagagtgagaatcatcacagcgttgtttttacacaaacttacattgaattaagtaacacaaaggccaaggagaagaggtatatttaatatatgagaaacttgtaattattatgtatgtatgtatgcatgtgtagtgcgtgtgcctgtgactgagtaagcaatatcacaaccagaacaatatgaaaaggtgaaagatatcaatgctgctgcagccactcctgaatggcagaacgaagagcgtggttgggaacaagattgcggtgttccagtgtaagatttgtcatcggagatgtgtcatgtccgctatccagccatcctctcaaagcctcggcttcgtatgtaaagccgtctgctgccacgtgcggatcttgcattacttcctgcaggtttggaaatccaaatgacttttcatcacaaaaaatttacaacagaatagagttggggagagaatatacataaattcctagatgaagtgttggacttagacctacaactagcactccttgttgcaagtgtttaagaatcatttgatagttttaatacataaatatatgagaattatttgatagttacccacatttttatggcaacaaggaactattgactactataatatagatgataacagaggaatcatacctggaagatgggacaaatgaaatatgaaggaggttgaaagtgctctccagaacccaaccggaacgatgatgagcctccacacgaagctctcattggttcaagtaccctccaaacatctgatccgaggtctgctcgactccttcggtttatctcacaacacctcatcgccaggcgagccaactgttcagcctgcacaaagggccagtctccagccaaaggatctaggagtgtttttagctttccttgatccaacgcatactgtacctcctttgttattcccaaagctggctttccagtcagcagccgtaacagtataattccaaaggaataaacatcggattttgatgtaagctctcctgttgacaggaactcaggatccatgtatgcaaaagtgccctttggatcagttctgcaacacaatgtggtattactgtatgaactatcaccattagataacagacggcagattccaaagtcactaagtttgctaatgaagttagcatcaaggagaatgttggctggtttcaaatcaccgtgtacaataccatgaggtttgctggaatgaagaaagataaggatagaacacaactctgtaataatccttatgcgagtttgccatgataatggtgaggtattgtctttgcaacaaaggcgatcttcaagacttccattggggagatattcatatacaagggcccatgcttctgggcatgctccaatgagtgtgacaagattgggatgtctcaacttactcaacacatcaacctaaaaataatcattccagtagtcaatacaaaacacataatcacattcaatttgaaaagtttgtcatttgtgtttggctcttaatttctacacctcacacatttccatatgttctatttaaaattgtagcgctggatttagtaattgatttattatttctcaaggacagaaacaatgaaggctaataaatgctatatactgaattaccataggcataatattcaaccaaatcaagtagacagggcagtccaaacattacttgggtggcctaaactatcaaaaagtgtaacattgtcatcgatcaagattacgaagtaacagatccattaaaatgcatcaaatgaagtacaaatctaatcttagtaaatgatataattttttcaattattacttagataaatattagtctatataaactattcagctgctactgctacaatcacaccatcttacctcctgctgaaattctgtggggccttgcatgctatgagcatggagcatttttatagccacctgtgtatgacgcaagagacctctataaatgcttccgtaccctccttctccaatcttcaaggatggatcaaagttattggtagcttcctcaatttcaaagaatgagaactcagagaagaattgaggaatgtgtgtgtttgttccctctccttggtttcttctcagctcctcagcctctctcagtgcattgtcacgctcaacctgcaggtcatctcgttcttttttgtaactctgtaatagctccactgctgatataatcttctcctccaatttctttaccatctcatcagactctgcaatttggctctccagtaatagtttttgatcttgggctgcacgaagttcttccgccacttcatttcgctggttctttattttatcaagttcctctttctcttttgcaaccgcttcctccacttctttcctatgtttcaattcctcagcatataagctctccgatgcttttgcctattaaagccagtattcactatgagttttcctttcaagcttcagaggtatatactcaggtttacatgcaattactaaatatattgaatgcaaccagtatctaaattgaatacaaccataccaattgtgaggggtataaatttattaacatggaaatttcaaatttgtcaaatcagtaagatggacaatcaaattatcataaaagcattggtaatgataacacatttaacattagaatcagtgttaataaaaaaatttctatcagtattgcatacgtgggtcttgcttatcttcacatcatagatatgatatgaaataaaatgatagcaaagtacataatttttaatatctacccaattcttgtaagttccaatagaaaatgcccagtccaaagcatttatagaggatagagataaaactacaagcaatctgaaattgaaataatatataagaaaaaggctatttaggctatttaggatttaattacacacatggtgttgacgtgacactaatgtgacaattatctaaatatttatgtcattattctgtttaccacgtatgaggtatgacaaaacttgacagagtgaccaatttacaacactgtgaatagttcgggcaccatttttaacgggctgaaaaattcaagggcacaataatacataagtcatagttcggggggtaaaaatcctaaatagcctagggaaaaaaattaacagatgagatgagctcgaagaaatcttggaaggtaagaatttaccctgcgtatagcatcaatagcatccttttcagctttcccacgcctaactgcctcgtgaaatgcttcccgcttggcattttcagcctcagaaaatgcttgttcaagatgatcataaagagtttcatctatacttccatcctgatagcaaccatgaaatatttcagaaattattggaactactcaaataattagtggcaagcaaaagacaaaaggcttcccttcgatccttaaaatacaaatatcatgctagaaaaatagttttgaaacttaccaatacacttggaggggatgaatgagtaagagcttcttttgaatgaggaagtgcagttaggtccaatccagtgtcactcccgccattcctcacaaaagaattgaaagctgcatccatcactggagtggaagagcatgttgaataacctgaagctggagtccttggtacaatatcccattcatcacaacttccttctgcatcctttttgttctgaggagttgacagtcctccttcagaaccatctagggaagaaatatcgctcaccatcctcccaattttcatattatttgctgatcttaccctgcgataaggatcttgaacttgacttgtgaatgttgcttgataactctgtcccagattaacagactgagatctcaagttgttgttggattgtcctgtctcagtgattggttgcactggtaaagatgttacctcaatatcagttccacctaaattacttctcctgtgttgtagtgttaacagcattagtactcaggatatcaaaatctatgaaaatctgaatttgtcacaaaggtctccctagcaacaatttactgtacaatttgataaatcgtagagtaagaatttgaaacaaattattgaattgacatctacataatggagaaactactgaataatgaccaacctggtatgaatgaggtgccccttgcaagtaaaatgtatatggcaggaaccaggtgcttgttggcacacaaaaatggctttctttgatttgaggtccatcattctcctgcaattgtaggtagtataaagattaggcagaaggggaaaacaaggattatagacagatgaacctgtctctgaaaccatgtagaattggcacacaaaatgcaggtatacactggctcttcttataggagcactatagacagaaaccggttattgaaactaattataatagctagcttttcaacattataacattgaccaactaatcttatatacaggtacaccaataaaacacaatattcagtaaaaaatttactaaatcctttcttttcaagaaaaagccaacctctgagtgaaggtgcaagcacattttttaagtaaatgtagcagagggtaaatttaactaattgttaacataaagtatgcaatccctcattgggtaaaatatcaaacaagcagaatattaaagcacaaacacatttataaatagatatacatgcattaaataaatagacattgaatataaggtaaatataccataatctgcagctaccacaaattctttacattgaaagcaacattagacaaccaaatttttatgttgactctaaattatttttttctttcaatcaactaattatatagcacatttgtgttattaaacaaaatctgaaccaaaaagaaacagccacatcacattccagttacagcgtataatcctactctcaactatgggtccacttttccccaagtaatgctggatcttatcatctgggatgacaacaagactgcgttgagagagaatgcataaaataaaatatacacatgataagaaaagttattatgtagttgtaccttgaatagtacttgtccgctgctgctcccataacaagattcgtaaccttgtgcttggagatgaggtcaataattcccttttcaatggactccatatctatatgtagcttctctgcctgtacctatttttcacataaatcattttgatcagttgattttgggtcagcaagagctgcaagactaggaataggataaataaactctagattcatacttttttatttggctcttggcagaactagaaattatatttttacttaaaacagacttccgaaaggaattacaacaaaaatcagacgaaaagaaacagacacaacatatattttacccccattcgatcacaaataaaaaggtaatcatctaaacttctgtgcatcttttgcttttcaatttcacgatatgctctgacttcctgatccttcaacgagtttgctggaaaccttgtacccactaagaaaatggaaaagagttaaacaatgttaaaccaattatcccatttttttttctttcaaaatcttaacaaatctccacaactatatatccaacaacaaaacaccagacttttcagtcaaaaagaggcaaatcaccatcaagtgttgtcaaagtgttgtcaacagcagttcaataaataaagtttctagactccactcctaacaagtaatacatgatcaatgattcagaaatcagtttaaaatacaaatttgacatacaaacatacatgtacttgaaccggcttgttatctagaattctgcatacaaactaattcattaggcatgcataagtgtgtgtgatcataatctctcccccgcacacattttatatgtcggagtctatgtatgtaaatacaattgtaataatataagttgcagactcactcaggggtatcatctgtgcaggcacatgaacatgaagtatgcaaatcttcttccctcctgagttctgaagcgcccataccaagactgatttgctctctttcacatattttcccactgcaacatatattgtatcttctgtcactctttctgtgggttccggtacaatctctccctcactactagacatcacttctgagatatcagggtaccttattcgaccaacgttttgagcaacttcagacacagaactcacggccatactatcaatagatcttgaagaactcactcaacattaatatttatatgtgcgcgtggaattttttctccaagtttctgattttctttaaaatttggaacctaaacaaaattctcactctacccaattgaagcttcttaacctcaaatacataaactagccaaaaattcaacgtttactctgaactgaagaattttccccaattcgatatggaacttaattaattaacctacaaaaaccacacacactacccaattcaaatttcttttaataatgaagacccaaaaaaagaaaaaaccaaatcaaattctcactttaatgaagatttagctggtgaccaactctgctttcactctaaacctcgaattcaactttgtcccagtctctacctctgtgttatcactctcacttctccagtctcttctttgtctctcgcagtataagatgaaacctagagaatataatgatcgatgaagaaaatcaataaaatgaaaaagaaattaagagaacgaaaagacaagaaattatgatttgaggtcccaatgggtttgattaggactaataggtgttgtcttgactcttgacttgtagctataataaaaattataggttatcaattagaatggaagcaggctctgataatagtaaaataaaatggtatcagctacatggatagaaatgtgtaaacaaatcagaaggtgggttccattgcattacattggtccaccatcaccatagttctctctctctctctctactaataatttttttttttgaaggaaaatggtaactttattaataagaagattcaaccattacaatagaaagaaaatcaggaggaacatcatcctcactaaaaatacgatctggatacaaacaagagctacgagcaagacaatgtgcagctttgtttacagaacgtttaacaaaattaattgagactaacggcaaatcggctaaaagagaacgacaaaccgccacctgaaggccaaaaggagaaggtatctccaccgtgctttggactgcctggacaacaaccaaagaatcggttt

SEQ ID NO: 378564 - DNA, 4347 bp, Cannabis indica
aaatactaataatggtattttttcaaaaaacaagttttttggcgggtactcaaattgggtcccgcctaccattatgagtttactaagctggaattgccgagggcttgggaacccgagggctattcaattccttaagaaaatcgttttccaaaagaaacccaaagtgattttttcgtgtgaaactatttgcaaagctgaaaagattaattatgtcaaaaggatgttgggctttgaagggagttatgttgttgaagctaggggacatagtggtggcttagccatgttatggaaaaagaagaagaaggcaagcttcttggttttagtcaaaaccatatcgacttggaggtacgaatggaaggctgttcaatgttccgtgcgactggtttttatggtgagccctagcaaagtctaaaagtgaatacatggcgtttaattcatcaaccctcaggtcagtactctttgccatggtgtttgtttggtgatttgaataatacattgagtcatagtgataagaggggtggtcgatcatacccgaattggcttcaaaatgggttccaagatgtggtctctgaatgctatcttattgacatggagttaaggggatatccatttacttgggagaaagggaagagtactagtcaatgggttgaagttagacttgatagggcattagttaaccatgattgtcaattgttatttccctcggccaatcttgaaaatcttgaagttacggtgtccaaccattgtccaatttgggttaatcttgctgtgactaaacccatcattatccagaagaagtttcagtacgaaaatgcgtggtcccgggagcctatgtgtagacagattgttcaagccaactgggatagcattccaaatgggtctttaaatttgaagcttcactcgtgcagtttatcccttgctgaatggggtagtgatatcacaggttcttttaacaaaaaaataaagcattgcaacaagataccgaagaatttgaaaggaaaaagtgatcaggtggctgtctcgaaatataaggaggctcaatctcagctttgtgaggttttaaccaagaaagagatcttttggagacaacggtctcaacaattgtggttacaagctggagatcaaaataccaagtattttcatgcttgtgctagtaatcggcgtcggaataatcagattgtaaaacggaagaatagtgatggtgtgtgggtggattgggatagtggcctccgggaggttatggtaaagtacttcactgatcttttcactgcttccggttcgaattggcagcgggttatagactgtatcctggttagagttagtgttgatcagaatcaagatttactccttcaagttgaggacattgaggttcgaaggctctttttcagatgcatcccgacaagtctcccggtctggacggttttaatcctggttttttataaaaaaacattgggacattgtggggaaggatatcacagatatggtccaacgcttctttgtttttggtgagtttcatgagtatctagccgagaccaatatagtgcttataccaaaaaaaatctcaactagaaagcatgaatgacttacgcccgatgtctctatgtaatgttatttataagattgtttctaaagtgttggcgaataggctcaaaggggtcctttcaaatgttatttcagagacctaaagtgcttttttaccagggcgtctaatcacagataacatattggtttcgtatgagataatgcattatcttaaatggaagcaaaaaggaaaaaagagtttcatgactattaaattggacatgagcaaggcgtatgacagagtgaaatggggttttttagaagctgtgttgaggaagttggggtttcaggagcaggtgattcgcttgattatgaaatgtgttggcacagttagttataactttctggcggggggacaagaaattgggccgattgttcctagtagaggattaagacaaggtgatcctctatcaccttatctttttattctttgcactgagggtttttctggtcttttaaaagactatgagaagaggggtagtcttcatggttgtaaggtcgcgagaggagcccctatggtttcccatatgctttttgcggatgatagttatatctattgtcaagcttcagcggaaggcgctttgagtgtgatggaattgttggattgtttccaaattgcttctggtcaacaagtgaatcttcataagtcttcattgttctttagtccgaatacatctcctgaagataaaacagaatttgcaccataatggggataaatgaggctggtgaaaatagcttttacttaggtcttcctaatactttggggcgtaataagactgctttgcttgggttcttaaaggacaaaatgaggaagaaaattcagagttgggaagggaggttcttgtctaaggcgggtaaagaattgcttatcaaaaccgtggcacaatctctcccgagttatgccatgaatgttttcttgttaccggtagaaacttgtcaagagatggagcaattaatgagcataaatccaaagggggaatgggtttttgcaatctccgagattttaatatcagtttattgagtaaacaaggttggcgtctcttgtgttagccagattctttggtgggaaggatttacaaagccaaatactacaaaaatggtgacttcctctcggcaaaactaggaggcgatccgagtttcgtctggcgtagtattcttgaagctcatgatgtggttcgcgaaggggtaagacgtcgaattggcaatggatattcggtgagtattctccttgattcttggctgccggatattgataatccaaagtttctctactcacccggccttgttgaaccatatgtttgtcgttgatggttactggggaatactcctgggatttagacttcgtgcttaatttgtttaataaccgggatgcaatttaactcttagcattcccttaaattcaagtcgggaaagtgattcttggtattggtgtttggaaaaaactgggcatttcacagttaaatcagcgtacaagttgcttcaattgtgcaaagagacagggtcccaaccgaacagttctccagtttggaatggtatttggaaactacgtgttcctcccaaggttaaagatcttatatcgcgtgcggcttcagagtgtctccctacaaaaacaagattgcaatctcgacatgtgcaggtcgataatctctgtcctaggtgtgttgtacaacctgaaactcctttccactgcttggtggattgtccttttgctcaaagctgttgggagcaggctggtattgacaagaatgtttaaggggttgtttcttttgctggatggttggaaaaaatgttcaagcaagtagatgaggctacaagaaattgtattgccgtgacatgttgggccatatggaaaactataaatgaattgatttgatctgataagcaatctacagcagcaagtgtatcttttctagctcgaacaacttttgcaaattggtctcaagcacagaataagtcatcagttcctactctcgattttttaactgatgctgatggtttggataaatggcaaacgccgactgcttccagtttaaaaatcaacacagatgctgcaatttttgacagcagtgaatcgtacagcttcgtgtgtgtggcaagagctgcaacaggggaattggttgaggcaataacatgctgtcgtgcagggatcgtgcaacctgaattggcagaggccatgggaggccatgggtgttcgagaggctctcagctgggtaaaaagaaaggttggattggaacaattgttgtaagcgattgtctatcctttgttcaatcaattcggagtaatcttcctttactttcttattttgggagtattatttcggattgtaaagagttgttaaaacaattgtgtgatgtttctattaattttattaaacgatctgctaatagtgttgctcactcgtttgctcgagcttcctattttatcgttgttcgtactcttacaagtaatgatgtttctactgagttgcttcatgtaatcataaatgattgcaatcaataaagttgatgacttttcttcaaaaaaaaattaatttcagttgaagagttgttaactaaaagagagaaaaaaaaattgctcaatgttgaaatactaattatcaaacccagaagaaaatttaataatataaaaataaaactagaaggaattggtgaaaattttaaacccatttatttttactctttctataagaaataagaaatgatgagatccacatgttagcaattaatttttactttataatttttattcccaatcatttcatcaca

SEQ ID NO: 378565 - DNA, 6316 bp, Cannabis indica
cactgattgtcattgaaatcatacgtggtttcctcttcctccgtgtcaatgtactctatgaatcccttggctacaagatcatgccaaccagcatcatcgggtttctgaaatattaaagccaatcatcaatgtaaaaacaataacaatgaagaaataaaactcaagagataagtgtgtcgagttcagctgactgaccctcagttgcaatgtatggatgtcttttttctttatcaaaagcctctgtttctccacaatgaacaatggtcgactacaccgcccgtagtccgtatatattcgtagttctttcaagcgaatatctctaacaaccccaacctcagtattaacatcaacctgttcaagcagactcattaacatctatctaaacaaacagaatagcaaccgaaaaaaccaaatatcgtttttaaataatcacgattcagagctcaaagattgacccggcatgtacaaggatatatatgcatggcataaccactaaacctactcctcttgggttatgtaaggctatttttgaagtatgctgtcaccattttaatcagaacaaactattcttcctgagattcataaaattctgtccaactcttaagttggtgagattgttgttaagtttgttctgattaacattaacttaatacagtttctagtcaactcctgaagttcataaatttcatgacttgtcaaaaaaaatgtatgattgcttttgtcataatgtctcattcaaaataataaaaataattaaactgacccgtcgcctcagacgtcgtaatgttttcaccaacatgtcaggatcacgatgtataccaacccaacaaccattaacaaaaattttggtagcttggggaataacagcaggggaaatttcctacatacaagacacaattagaatttagaattgtcaaactgggaaaacaaaaaaagaaataaaacatctagcaaacataagagaaggagcacacctcaaaattttctgtcccccactcttccaaaaattccaatataggatatgcagctgatcctacagtgatgtacaccatcaatgcaagattcttcaccagtccacatgcctgatttatagaaagaaaacaaattagagtgccacctaacaaattatatggttccaataaatgcaagtagaataaagtttaatagaaacatatgcttacttgtccttctggtgtttcagcaggacacatcattccccattgagaattatgcaactgacgaggcttggccaattttcctaagaatgggaactttgattgtcaaagtgaaaagaacaaataacagcggcatacgcaaacaagtcacaacaagactatttcaagaaattaaagataaacatgaagaataccgtcaatgtatcgaacagaaaaatatctactactcccaagtccttagaagagttcaagataaaagtaaattaccttcacgaccaatgggagaatttaatcttcgcaagtgtgacaatgtggaggcatatgtcaaacgatttaacacctgcagaaaaataatataaaaataataaaaaaaatgtaatgtaagtttaaaagaatgtctaattaagcttatgtcagcatattcaattcaaggcaggatcctagtaatcatttggttcaaattgagagagaagaaacgacacactattggaaggaaatagaattaggattactgacctgtgacactccagctcttgtaccagctgcatttgcttggccccaatttccagtagccagtgaatatttaagaccactggtaatagttttggctttgatggcaaattgaagattaacatccttcccattatcgacacactgggtcgggcataatatatgaaggtaagaaatccaaatataaaaggcattataacaaattgaacagaaaaatcagatcaagattggcacaaggaagtaggaaccttctgcacatatcctctcacatcccttgttagcttcctgaatagctgcagtcaaacagcagaaggtcaatgatgtaatgatggatttaaggatcaccaaagattttaaggagaaagaaaaatagaaaaactgagagaaagaatattagaaacaaaccattctaaacaatcccccgagtaaaggaccagcaaggtccagcctcttattgccataatgatctctgtcatcttctgccctccgcccaagtgcacacagtaaaagccgatgaatgatatagctagcacaagcacaaacaaatatatcaaacattaaaaattatataatgtgtatgaaacaaagaaatgcaggggggctgaagaaatcctacccgaaatagtaagctttttttgtctcacaaaattccccagtgccaacatggggaagcatttccttttgaagtatctcttttgcatacctgcaataaggtatcacagttaatcctatgaatacaagagtatagcaaagaatcatcggacatcaaaagaagttccaagaaactacatacttaattctcttttccttggtgactccaacagttgctcctctttttccgatataatccagtgcaacctgaatgtcaagtgaaattcaaccatgtaagacgagcagcaaacaaaatttaccattggagaaaagaaaatatttaggtaacaaataattttgaattgcaaatgcttcttccagtgtatggtaacaggtgtacctgttgattttgaatcacaaatgcttcctccagtgaaggacgcaacaactccatcattgtagtatcggcaaagtcataacatatatgctccaatatgtctttgtcagcaacaaaccccaaagcacggaagacaataataattggtatttcagctcgaatatacggaagagtagctcgtatgtactgccccgatgatccctacaatagcatatgcagataaaagatgaaaagaaaaatttacaagtgccgcaagcacattaataactgggaagaacaaagtggaatagatgtcttattacccctttagagctagctcgtgaaagcatccgcacaaacatggtactaggtggtctgttttgagactcagccatagaccgaacttcggccacataggcatacttgttaggctgcctctttttgaacacatacacatgattggtactcatcttctcttgagcaattagaaccttctcactaccattgataataaaatatccaccttgatcatatggacactccccaagttctgtcaaatccttctctgaattttggtacaatgtacaataactcgaccgaagcataatgggaacctagtaaacaaagtttcttgttggtaaagcaatcaagagcatgaaacacgaaattccacagttaccaataaaatctatactctaaattctggtacaatgaggaacttggtaaacaaagttttttgttagtcaaagttacactatgggcttattggcagatttgtagtattttcttaacctagcttggtataaatatgtaaatcttcacaaactgattatgagtgaaatgaatgaaaattgagagtattcctattggagtttggcattgactataatgtgaaacactaaaatcatttcaacaattatcaataaataaatacctttccaatgaagactttggtaaagtcttgagtctcagtaacttcttcaccatcatgtcctttctttataaccctttttgtaacatcaacgtacaaaggtgcagagtatgttaagttcctcaacctagcagccttgggaaacaaggtcgccgtttctccatcagactcagtcatcataggtttactcagataaatctgaccaaacccaattttatagattgtctacaaacacataccaaagaagaaaaccacgaattaagtaaacacaaaacacaataatttctcccaaaaataaaaatcaaaactttgatcattttttcacctcagcaaaatcagactggtgaccagggttatgctgagactcaggacgaatctcaatatcagaagattcatcaacaatttcttgcatagtattctgaatgaactcatcgaaagaatcaagctgttggcgaaccaatcctttttcttcgaagtaagcagagataacagcccaagcatcttcctgagtgatttcttcctcatcatcgtcatcttcgttgtattgttgctcgtattcggggtcttcatccatggtggtggtgactgtaattgattagaaaaccctagattgctgaagaaaatgaaaaaagggttcaatggagaatgaaattgaaaaccctagcagagcaggagagagctgagagttgaggaagacaagagagtgattcgaatcgaagaactggaaaaaattggcggatttggtctcttctcttactataaatacggtactatgattttattttatgggaaattccaaaatttgggtttagttttattataaatttaatttttgacgaaaaaatataaatttattaatatgaatttgttgttatagaataactcaaaaaaccgtctacaagtatctgtctaaacacaatcttctaaactagtaacagaggttgtcaatgtgtggacaacactattcgccgatcgtaaaatggtgctacaagaaccaccaccaacaacaactaataaagaatagatatttaatagaatagactgaaaactaaaattaatatgaagcttattaatccaaccaattgctagagtaaaattattattaataatagagatactaaaaccaaattgatgcgctaaagtcaagcctaggcgaatggcaagcagcttcgtcgcattagtagaaaactcacctaacatacctgaagaccacgccaaccaaaccacacccgttgcatcccgtatcactcccccctatctgacaaaagccctccccaaaaccactgaagcatccatcgttggagcaaatgattcaggaggaggtgttatccattgagtatgtttgtttacaattgggtttgcaaggcccaatcctaaatgcaggcctctccgaccatactccttaaactccaacagatggttattggctaaatttgaaacaacatccaatcttgactgtttgttgccaaataatattgagtttctatcatgccacagtcaccaaaagattgtcatcatcaattcaaaagtctcacaggataacctgtcaaataggaatgggagaattttctgcattggcccatatacactgtaacggagcaccaaccacacccctaactgataccacactggaattaaactagaacagaaaaatagagcatcctcaagagttttagattcttctccgcatcgtgaacaacaaagaagtacctgaacttttcgggagataagttgtgttgctactcgtaaagccaaatggaacatacgccaaataaacacttccacatttggtggtatattaaagattccatactccattccaccgacgagttaacctgtatgaatttgcgactccctcctcaccttggagcgaccacaccaaaaagtaactcttgacattataaaccccatctccatcgtagtatcagcaccaaccttcttctacctcacgcctcgctaatggaatggacaaaattatgtccacatccattaataaaaaaacatgttgaagcttcccacatcacaagtatcaaatggaaagataaattcactcacccgacagtcatcattaatcctccttgtgattggctgaaaagacctcggacaagggagccataggtccgtgaaagccctaattaacttgtggtccatctccaatggaccttcaaagatcgcatttaatcaactccattccccaaatcaaactcaaccaaagatgagaataactatatttttcagtggcctcaaggatagagcaacttggaaaatatttatgtttcaaaattcgagcaggcaatgaatttggacatataaataacctccatacttgattagtaagcttgattaaaaagttaaaaatcctgaaatccaagctcccccatcaccttaggctcacatactgttttccatttcacttaagaaatcttccttaaatatcaagttaatagtcgtggtagttattgattggttcatatcattaaatttttatttttattttaaaattaatttaaatatactaataataaaatgacatgttgataataacttcacacttaacggccaggtatacgtagaagttcaaaaaaatataacttaagtattattattgttaagaattaaatttaggtatttatttacaactgagagttcaacttaagtatttacactgcaaattactctaaataaaccaaaatttaatgacctggactagtgtcatatggtcattgacttgac

SEQ ID NO: 378566 - DNA, 7007 bp, Cannabis indica
ggaataatttattaatggcgcatatccaaacttgacccggctaaatctttctgagataattgattaatctgttttttttttcttattattattataattctctatatatattagggaatttaagaaaatgaaatatcatgtaatttaaacaaaaaagaaaactcaagtagtgttagagagagttatttggggtgaaatttgaaagtgaaacagtttggtagctgtcaaaatttggaaatggaccaatatatatagatgtatgtgatataggcacgagggggtaacatggaagaaaattgaaatttgaaagaatcgtttgtaaattaatttgtttggttaggcagaaaaaaccattagaaagtgagcccacaggaggtttaagtttcatctcttgttgtggccaagagcagtagtagtagtcaccacatcacatggggttttaattttgggtatcccatgtattcatgtatatattaataatgcataatctggggattatttgagatatttggagattaattcatgagcttattgaaatttattcataataatatataattaattaataatataatgagaaaaagaagagaaaagaaataaagagtgggaggaattaatgaaagaaacaacagcaaagacaagcactggttgtagtagttgttgttgtatgaaaacaaaaggcaaatgtgggggaccttaacacatggggtggggatgcccttgagagaggttttgagttgagacttgaaatgaaagagctttctttctgaaagtggagccaacttaaagttaagaatctttttgcaaaatgttggttggaagcacacacttgggggcaaaacctacctatatatatcatcactctcgattatctatccattatttttatattaattatatacaatacatatatatcccttttttttattaaagtgtatgtagtagggatattataaataatatatccattctattcatattctgatatttcatattcatatgtatatttgtggtattatcttttagaacttgcacataagatcgaatcatcaatatcaagtatattgtatatatatggcgtgggaaaaatgttataatgcatgttgatgatgcacacgagaagaaattattatgatatatacatataaatataaatatactttgttgtacaagtaaagtcgataagatcatgattgccaattttgatcattgtctgaagaatcctataaagcttaatttttaatacatttatatgcatatataaaatatatatagaggaaaagttgtatacgacaacaaacaacattgatgatgagtgtacaaattagctagcaatagctatatgatcgacctttcgaaactttcataagagagccagccactacaatattgcataattataatgtcaactgaaattaataattggatcttttcttcaactaaattatagcactacgacttccttataaagtcactacttataacttcttattagttaggctggcaaagcttattacatttaattaaatgattttcttataaataatatataaaattttatggatatataagccaaattatagtgcaatgcagatagactccataactggtgggtttattaattataaaataaatataatttgtttcctaaattatatgattcttagagttttgccttgattattttttttttcaaaactttccttgaattatataaaccattgcaaatgtcccacttcttatattttgctcattttttaaaaataatttaattatatgaccaggagttatagtggcaacattaaacatacaaatattacatgcgtattcatattttcataattcatggttaaattgatattcagatttaaaatggtccaagatcatcaagattgtgttatgtatggctctcacagaaaaagcaaaaaacatgtgttcttcaattgtcatgtgagtgaagagtgtttaaaagaaatcaagcagaaggtggattggggagttaagaatacatctgtggatgatctaatgaaaaggctagtcaaaggagaaagcaaattcatcaagtatatgcattataacatataaaattcgtatattttaagggttttctaataaaattaagtgagtgttaaaaatacacggcttgtcggttttaaatagtcattgtgaatagctaacgatttaaaacacttcaaaaattaaaacggggcaacatttaataagtgtcggtaattccctttctaatataaaatccacaaagtttcatagatctattcatttcattccaatcttctctctcactcccccctctctcactctcatagattcaatccctccaccattgaaactccaccgtcgaccaccctccctgacgaaacgaaccattacaaccacctccactctctctcggtctctccactgccttccaacgaggtgtggttggcctctacgaaaaggaggttaatttcgaagttattctagtcgacatatgttaggttatttttagcgtaagttttgggtccctttttagagttatttttcttctttgttgttattttttggacaattttatgcttgtttttcttgatttcaagttcctggggtattaaagtgcaaaatctatcaaatatagaagggatgagacgagtattgaaaactgaagaaaatatcagttgaaatgcttgaagctcatcgcagcgagcactaatttagtcacgactaattgttgccgcgacgagaagaccctatggtcacggtgagatcatcaacgaaaacactgatttttgactcgagggtgtcactatatttagccgttttgaagtgtaaaattaatttctataagagagtttcaaacttttatgccaatgattcagaaatagaaccacttgagaaacgagcgtggcgatctgatcaagttctccatctagtttctttcttttctctttttaaattcttatgttaatttctatttttagtttaaacatggatcgaatttaattgttgaagttatgaactaatttctaaatttaagaatatgagtctctttatgaggcttggaagagatttgaagacctgatcagaatgtatccccatcatgggattgagaaatggatgcaagtctacaacttttacaatgggttaactagcaataaccgcacaatcataaatgtcgcttctagtgggactcttaagaggaaaagtgctaacaaggcttatgaattacttgaggacatggccttgaataatcaacaatggccaagtgagagaagtcaatcaaagagaatggtgagtttacatgaagttgctgccatcagtaagttaaaagcccaagtagaagctttgatcaagatgatgacaactcaagtgcaacatgctcaagtgatttgtgagttatgtggaggacttcacccttatgacagttgccaagttgatgtgaatagtttactgatggagcaagattaagccattggatactcaaaagatagtgagtatacttttgtggatggaagtcgtcagtactatcaagggcagttgtataaccagccacaacaaggtttcctcgagttgagaaataagccacaacaatcgcaaattttttaaccagctaatcaataataacaatttttaggtggaaactctgagaaccaatttgatgcaataagccgattcatggctgaaactcggtcttctattcaaaacattgagattcaaatggggtagttggctactcaaatgactaatcaagcccaaggaaatttgccaagcaccacaaaagtgaatctaaaagaaaactgcaaggtaattaccttgaaaagtgggaagaatatgttgggtctagtgaacagaagtcaatcaaagatgcgaatcaagattaataggcacaagcatcagcataagaggaaaagaagactactgaaggtctataaacaaaagaagcttctccaccaattagcattgagcatcatgctaagatcccctatcctcaaaggctccgtaaaagtaagcaattcagtaagttcctggaagtatttaaaaagtttcatatcaactttctatttgcagaggccttggagaaaatgccaagttatgtcaagtttatgaaggacattttgtctaagaagagaaatatgaaagactttgaaactgtggcattaatagaagaatttagtgcaattttacaaaagaagctccccataaattgagacatcttgggagttttactataccttgcactatttgaaggatagagggaattaatgctttatgtgattttgggcgagtatatcaacttgatgcccttgtcagtgttcaagagattgtaactaggggaagccaagccaacaatgttttaactagctgaccattctttggctcatctaagggggataattgaagatgtcattgtcaaggtggacaagtttattttttcagatgattttattgtgcttgacatgaaggaagatagcaaagttcccattatccttaggaaatcctttttggcaactggccaagccttgattgatgtggaaaagggtgagttgaagctaagagtactagaaggagatgaaattgtgttaaacgtactcaaggctataacttatcctgaagtaagtgaaaactattttttcggttgatgtggtggagaaattggtggaaacggaagcctatagaaggctctcttaatctaagtttggtgcaagaggaagtggttgaccaagatagaaaggaagcaatggagtatgctatgtggttcgattcttatggacctttgaacagaaagtattttgaagagcttagggtaattccatgaataacattgccctctattgagaagccactagaattagaattaaaagtttttcctggtcacttcggtatgagtcttaggtgagagcaagacactttcagttattgttttagcttcacattttgatgtggagacagtgaaattattgagatttctatgaaaccacatgaaggccattaggtcgacattggccgacatcaaggggatcaacccctcaacaacatatgattttaatggaaggtggggtcaaattctgagtagggcttgcttgaacagaatgtttaatgacgctccatcgtcgatccaccatcatattagctatttggacctcgacaactaatggatcgttgtgagggtaactaacatgataagagtttgattctccaaaggtgatcaattcactttagtatcgttggaggtcgttctgctacctctaggactttagctcttgtttcatgtcgatttgctctagcatacctttctaaaggcttccttgaattccaagctaagtgagggcctccaatcaccatctccaacctgcctaaaactagcgcagactggagtggattgttgcccctagttggagcttcaggtcatagataccactaaagagcaacatgtttctggctaatgagaaattctatctcatctcgcaattggtgacactcatttgtgtcatgaccgtagttgttgtggtaacggtagaattttttcatgtccctttttcctaattctttgataggaagaggtttgcgatacgacattgttgacggagtggccatatatatctcctcccttggagtaaagagaatggagtaggtggtgaagagaggctcataatctctcaagggcttacccctaattttaggcttttttctttgaggagagtttccttgcttgccactattgttggctctctttcccctattcaaacctctctttctctcatttccctgcaactcagtagtaggggctttagtgtttggcgacttcttcttatcaccctttgtgccctttgctcaggtgacgacttcttcaagtttgataaagccatatgctctatcgagaagtcattcatggtgtataccgcctagagacaaaggtcagaccacaaaggactcatctccttgagcccgactacgagtgtcataacccttgcatcatcactaagactttttttcttagcgtctgcctctaagaactgttggatgtagtccttgaggggctcttcttcttgttacttgacatccaacaaatcattaggcttgatctggcattgtcaggaatgagcaaactaattactagaagcattcactagatctctccatgaggttgattgatccactagatctttccatgaggtcgattgatccagaagggagctaagcctgtcagtgtagcaaggaagattttacacttgacgtcgtctctaacaccttgcagatcgatctgcactttgaagtagtggatgggagacagtgtatcttctttcttgaagtattgatgccaggaagggctcttgaactttggagaaataggaagggtttgattctttaggagagtggtgagcgctgttctctgtcgagctcgaattcagacaactcaggtgtcgtgatcccctttactaaagtggccaaggtgccaaactctacccaattaaccccgtgaatggttgtctgtgtctcagatggagcttctattatccggatagggtcttctctaaaagttcgcacatcaattgttcttctattgttcaagaggtcacacgggtctctttgtcttccaagtcgatcatgtactccgatcgacctgggtcttgtagttgtgtcctgagcacggggttttgaaggtagctctggtgaagcctctggaatgaactcgggatcgcctcaggataacgcgctatgaggtgttcatttggagcattgtagtgactacttccctcgaagtagtcttcagcaggatcacaaatgcaaagagaattgaattggtcactcaggttcagttcctctccatgtactcgtgaataatattcgtattgttggccatcggggccacggataaagtaccggtacaacttccctcttttatctccaaagggaaatttgaatttctatgcatgcattaggggataattttttccctaaactaatacttttctacattgaaaatatatgatcacttttccaaaaccccaaaa

SEQ ID NO: 378567 - DNA, 6439 bp, Cannabis indica
aataagcaaatggaatgttttgattctcaggctattgcaattggttatgctattgtaacaacgcgaacatcagatatgaattggaaaatgagagcatttcgagttttgcctatgtttcttttgcctgctatctcttctcttacttattcggcatttgtaagcttcacaaagatgtgtaagtgtccaaataacagctaaatgtttttttccctcttaagaatgggtgattcggcccccctggtttgtaattgcaggttgtttctatatgagtttgagggtttaggaatattttgttatgttgcctgcattaagaatgtgatagatttttccataggttagtggatttattctgagtcttattttcacaatttaatttgcgtagtgttatgatgataatgttgccaaatattttgacataagtagaaagaaagcaagtacattgcaaccctgaatccccaaaccaaccaactccaccctttttcccattaagttttggcaaggaattcaactcaatgtaaaatttcctttcttacactttgcaatgtttaatgtcttaaatgttcatatatagagttttggctgttgttgtttgtttgtttgtgtgtgtgtgtgtgtgtggtacatttcttcttcttttaacttgcttgatatgatctctatctgctgtctataaaatgttaatttactagcataagatggttgaaatgctagcactggtccatgataaattataaaggggcaattatgctcaattgcattttagctaagttcctacgctgtatttcaagtttggcttggatcttcatattttgatgctttcttctgtctatgttatctatgtcttccatgtgctagtctatagacagtgaacataaaaccaatataatttatatctaactgtagcttaaactttggaatttgtaaattcttaacacgtgcatattttttcaagttaataataatataacttagtcgagtgttgtgctattatataaatatatgtatatatatagatagatagataaatattcaccgttcatcctgtatcctgtcgttgatgattcactgtattagcatatcaataaattgatagtttgtggtgtcatttgatgttttaggtgaccgcaaagaccaaaagactttggaaaagctccgggcagaaaggcaggcgaaaattgatgagcttaaagaaagaactaattattacagtactcaacaactgattcaggtgatggttaaaaaagcttgtaatgattatttgatttgcactaccccaggttagcactttgttgttttggcaatgttccatcatggtgaaacatgaggcattagtgataactttatttgggtgtatgttttgataggatttatttactacttaccagaattgggggaagtttttggccaattctgggacatatggtttcttagaaaggtgttaaaatttagtttatttgctttattttttgaaagatcaataccttttttatttatttaaaataagtgtcttttaaatgtgacaaataagattttactatcttgtgtatacgtaatgttttctgttcctaaactgggttgactgttgtggagcctgcaaataatggttatacttcaaagtatactatccactcgggcctagctgaagtggttggtgttctatggaaaaaaacttcaaagtatattatgaaatgaaattgctttctaaaagatatatattagcaaagatgaaacagggtttctttttaatctttctgtgtattcgttgtctttatgcatttcttatacaacatatttgtcatatggtgatgtatactggaagctctattatttgtatgtgatactgaaggtaatctctttgatgcagagatatgaccctgacccagcagcaaaagcagctgcggcaactgttttagcgtcgaagttgggtgcagattcaggtctgaaaatgtttttgggagatgaacccaatgttcaagctacaatgggaaagagcaaagatgtagaacttgttcagtctggtggacttcggaataggaaacaatctaacattcactcaggtagtgctgggggaagtcccttgcttcattctggtgaaggtacacctcaatctctggggagtgaggatccccagatatctgagcagagctcgatggttgttagtcattacaatcctcaaggatcccctgctcaggatggaggatggattgctcgaattgcagcattacttgtgggtgaagatccaacacaatcgtatgcactcatttgtggaaactgccacatgcacaacggtgagattttaatttaacaatatataatatgcccatttgtctgacgtacatcttcaggcaaatgcacactgttgtaacctactactagtttgtttttaactaaccagctaagtggactggattttgtctttgcacaggacttgctaggaaggaagatttcccattcatcacatattattgtccacattgtcaggccctaaacaggccacaccaatccgaagagcgtgtttctggctctagtacccctaattcgggatccatcagaggcgcggggagtagcgatgttttgaagactgctagtgttcttgcaagtgagagtgtagtcacaggtgacagttccattattagaaccatcccggagaacaaaatcaaggaaatgacagagacaatggaggatttagccagttgagaagcaagcatgcaaacttaacctgttcaccttggccatgcaggtggaacttttagtgttgtggaggtagtttatatgggatttgcttcatatgcttggttgggttccaagaaaaacgttgagagttcgtgtgcgaaacattatgtgcttttacttttacatatatgatgatttataccgtgtaacaacttaatatgggttgttacattcctgtacattagtttagttttttcattctaattattagtacttccccatgctttaaaattttgtaccagtgatgtggcatcttattattttgtgatgtttttttttctttctatttgtaagttaaaatatttagatgaaaaatgctagtttggttttatgtttttcttttggtactaaacatattaaaattgattttgcctttaatttattaattatagtcttatttaaattatattactatattttcaggaaaacttaatggtgcacaccctaaaaggtgtaccaatgcaccttatccttatttatgtttttgatactcggttagttttattcttaatttatatatataataatgtacaatgttttaagatgttttgtaaattttttttgagaaatttaaaaaattttataacgttaaaaataagatttacatagtttgttgtatgcttgtttttattttattttttacatgtgaaatatgttatttaaactttgttttctatactataaattatttttaaaattttgtaaaatgtcttaattataatatacaatatacaacaaaaatttgagatattataacattcacctattggaagcgcaatggggtgattaacttattttgaaaattaattatataataattaaatgtttttcgatattttgtattggtttgtttgtgtgaatgttggatttgctgactttgtgatgttttgcgagtattttgtgaaattttgcgatattttgttatcgcaaaacatcacaaaattcaacaaattcgtcatttacaaaagtagaccaataaaatattgagaaaaatatcaaaaaacatcatctttaactctaaatttggtcgtataatgaaaatttatcgcatataatttaaaaatatcgagaaaaaaatagaaaaaaaggcgcaaatttgcagtaatttttcgggcataaaatcaataaaatacaagcacaaatgtgtagatttattaaaaacaaactacatgcatataaataatcaaccccaacaacattttttttagtaaaatcactaactcatattgttttcccacaaagaacaacaagacccaaacttatcgttggaaccaaatggttagggccgaggagatgggtcgtcgtaggaaggtttcaggagggtagaaacaattgcagtagtggtggttgcgatatttgagtcttgatggtggtgttggctgatagaaagagagagaagagagaggaaagataggttaggaaagtaatgagagaagtatttaaaaataaacataaattagtaatagtagaggaactattttattattgagctacatttaaacataaaaactcaaatttttctataaatgtatacatatatttctttcatgggatcataattccagtaaattgttattctaattggttttttttccttgtgaaattttaagttaatttttttattgtttaaattatttcttgtgaaaaacatgcaactgaaaaagaagcaacaagaaaagtggttattttaattttaatgaaatattattaatatatattaagaatattaatgttaaaaaaaaaaaaaatcaatcatataaatttgattaaaattgatttatttaataatctaataatctagttttaatttttattatattattatgattattttggcaaaatgtgtgttactaacttatgctagtcatgtacaataaataatttttgtcctttgttgtgttgtgtgatttttgtttagttgattttgtttgtgtaagttgtaacgttgaatgattaatcaacttcacagataaattttctattgttaggtaattttaacttttttacttaaaaagtagagtttaatttgaatactaggcttatgtaatttttttgtatataaatttttattgacattatatgtattggatatttttttgtatgatattattcaattatgcaagtaggtattgtggtatatatgagagtctcacagtctttcaagcagaaacaattcttttgatagaagtgttagattggtatgttcctcttcagtccattgagagtgattatttagctttgattttggttttttccaagcggtcatctttttataatgaattaggatctttcttaaaaatattgttaatttacttttcaattttgttaagttgtccctagtttatgttcaactgctcataaattagttgtgtatgtattaaaggtgaatggtaaattttgaattgacggcgacgacaacgtatgtttttctatctttcataataatatattaaacattcaccattcaccattcacccttaatatatacataactaatttatgagcagttgaacattcaccattcaataagaggcatttgtagcagttttgaattggagaacttgatggaggttcgatgatcgtgttctcatcgagttcatcctcaacttaagacattccacaaacgaaacccttatggatcttatatcgagctcattgagattgtatcgaatttgcattgagcttttatcaaaattatcaagcttaagaaaagaaaaaaaagaagattttataaaatccaacccaattcacacgaacaaactcaaaatcaatcctacaaccaaatatttaacggttcaatgaaggtggtggggcggtggcggtggcaaaggtggaggcaaatggtttgttaggtttgggttttggggttaggaggctttggttttcagagtttaaaggacgacgacattcttttttctgtggtggtcattgtcagaagggacgggtactttaagtagaaattattaacatatttttgttatattcatagaaactttaacatagaatataaacaatattatcctactgaattaaatataaaaatattaaactatttatttattttactcatcatcaattgattttaaaatattaactatttatttactccatttcttattaattgattttaagattaaacccaataattcacttaaatttcctattgcaatttcaatataatacgacctatcaagatttaatacaagaaagagttttgaacttcgaaccatcactttagcacgataacacgtataaatacttacaaaatatacattgaaattttttatgattttttatattttaaaattatattaattttccatgcaacattgaaaaaattaggaattattatataaaaatacaaactaatattttatttataaaaataccttcataaaatgtggacaacattttatacattttatgtgcctttaattactaaaatacctcttacactatcacttacacaatcagacgaaggttgctgagtggttggccgaaggttgcatcaaacgaagattgttgggtggttgactgaaggttgcatcagacgaaggttgctgggtggttcactaaatgttgcatcagacgaaggtttctgtaacgtccccgcttcaacccccaatggggcccttacacccacggaatgaatggctcttatacacgagtacaccactctggctgcttcctggattgatgactgacc

SEQ ID NO: 378568 - DNA, 9922 bp, Cannabis indica
tgtgttaaatgagttggctaagtgtttgaacactgatatggcaactttgatagttcattggctacataaagtgctagcttttgcttttcatcgtgcagatggccaagagttgctatctgttttgcaattttaccaagcccagactggttccgacaagcaagaactttttgcagctgcattaccggggcttttagatgaacttgtatgttttttagatggaactgatgcagatgaaataagcagaaggtatagctgtatactttatatatatatacatatatataattagactaaaaaagaagcaaaaagagcccacaagttgattatcaacttggtttgttgctgtagagatacatttcagctgtctgctatttatgttttggtttgtcattgccttgacatctttttgcttattatttttgcattgtgagtcattggactttttcacaagccatagctaactagtggctattgagtttaatgattgtatattgctttgtgtttatcccgtctctacttatgccaagcattactttttcctatctgtttccaggttagcaagagtacctgagattataaaagaaattgctagggttctaattggcggtgaagatcttccaagctttttgaggcaccattttgttgggctccttaagagtattgatataaagatgctccactcaaacgattattcactgcagaaacaagccttacaacgtattaagatgctgattaagatgatgggttctcaaattggtacctatgtgccaaaactgatggttcttcttatgcatgctattaatacagaaccactgcagagtgagggtctcaacttgttgcattttttcatcaagcaattggctgaactgtcaccatctagcacaaaatatgtagtttctcaagtctttgctgctctgattcccttcacagagagagacaaagaaaatccaacaaaacatctagagaaagtcggaaaaatattagaagaccttgtgttgaacaacaaagttattttaaagcaatatctttgtgagttccccatattgcctaattttccagctctatcagaagtcaataaagttctacaagaagcccgtgggtcaatgactttgaatgatcaattgcgagatgttgttgatggtctgaatcatgagaacgtaaatgtgaaatatatggtagtttgtgagttgagaagttactaaatctgagaagagaagaggttacaggtttaataactgctgaaggtggcagaaacatggatactttgagctctttgatcacatctttattgagaggttgtgcagaagaatcacatacagcagttggacaacgtctgaagttggtctgtgctgattgtctcggagcattgggtgcagttgacccagcaaaggtgaagggtttttcatgccaacgttttaaaattgaatgttctgatgatgaccttatatatgagttgattcacaagcatctcgctagagcttttagagctgcacctaacactagtattcaagactcagctgcattagcaatgcaagagctgctaaagattgctggttgtgaggcaccgatggatgagaatgttgttgcttctaggactgaatcactgaaggagaaatctttagagcatgctggagcaggaacaaaaaatattattgatggtagcattcaggttaagaggggtcaaaaattgtgggacaggttttctaattatgtgaaagaaataatagccccttgtctaacctctagatttcaacttcctaattttgccgattctgcactggttggcccaatttatcaaccatctttgtcatttagaaaatggatattcttttggataaaaaagttgatggcacatgcaacaggttctcgcgcaaggatttttaatgcatgtcgaggtatagtgcgtcatgacatgcagacagcagtatacctactgccatatatagttcttaatgttgtttgccatggaactgaggaggcacgacattgtgtaacagaagaaatcctatgcgttcttgatgctgtagtatcagaaaacagtggagttactattcatggagcgaatggtaggcaaactgaagtttgtgtacaagcggtgtttactcttcttgataatcttgggcaatgggtggatgacgttaaacaagatctggccctttccccatctgcacgaccatcctcttcaaagcaacaagcattaaagccaaaagatcaatctcaaacttcaatgatggatcatgaccaacttataacacaatgtaaacatgtatcagaacttttgtcagtaatcccaaaagtaacacttgccagggcttccttaagatgtcaggcctatgcaaggtccttaatgtactttgaatcttatgtaagggggaagtcaggttctttcaaccctgcagctgagagaagtggaatttttgaggatgaagatgtttcttacctaatggaattatacagttgtctagatgaggttgatggtctatctgggttggcatctttacgtaaatctttgatgctacaagaccaaattctaataaacaaaaaggcaggaaactgggcagaggtcttaacttattgtgaacaagctttgcagatggagcctacttctgtacaaagacattctgatgttctgaattgtttactcaatgtgtgccaccttcaagccatggttactcatgttgatggtttaaactcaagaattcctcagtacaagaaaacatggtgcatgcaaggtgtgcaagcagcatggagacttggcaggtgggacttgatggatgaattccttaagggagctaatgaagacagtttaacttgtagcagctctgagagcaatgcgttatttgagttggatgttgccaagattttccaggcaatgataaagaaggaccagttttcagttgctgaaaagattgcacaatctaagctagcattaattgcttctctggcagctgcaggaatggattcctacacacgggcatacccatttgttgtgaaacttcactttcttcgagagttggaggacttccaaactattcttgctaatgaatccttcttggagaagtcatttcaagtaggtgacatgagcttctctaagatgatggagaactgggaaaatcgccttcgatttacacagccgtcactatggacaagggagcctcttttagcttttcgaagaatggttttcggtactagtggtcttggtgctcaagtaggtaattgttggcttcaatatgcaaagctttgtcgcacagctggtcattatgaaacggccaatcgagccatccttgaagcccaagcttcaggtgctcctaatgtacacatggagaaggctaagcttttgtggaataccaggagatctgatggtgccatagctgagttgcaacaatcactcctgaatatgtctgtggaagttgtaggatctgcagcaatatcatccattagtagtctgtccgtggttccactaaactctgcacctttagtttgtgatactcaatgttcgagtgagagtcgtgatattgcaaaaactcttctcctatatgctagatggattcattacactgggcagaaacagaaagaagaagtaattattttttactctagggtaaaggaattacagcccaagtgggagaaaggattcttctacatggccaagtattgtgatgaagtgcttgctgatgccaggaagcgtcaggaagaaaattctgatttaggtcatgggaagataccatcaagtactgctggttcatcgaattcagctaatgaaaagcgctggtggtcttatgtgcctgatgtgcttttattctatgccaaggggcttcacagggggcataagaatctctttcaggcacttccaaggttgttaaccctatggtttgattttggaagtttttaccaaagaaccaattcatcttctaataaggatatcaaaagcgttcacggaaaggtaattgttattgttaattttttgtattttaaagtggaaattttaccaaaacggggctttatatgttcctttcttcttatgatgacaggtaatgagtataatgagaggttgtttaaaggatttgccaacgtatcagtggttaactgtactgcctcaattggtttctagaatttgtcatcagaatgaggaagttgttcgattggtgaaacacataatcacctcagttcttcgacagtacccacaacaagcactgtgggttatggcagcagtttcaaagtccactgttccttctaggaaggaggcagctgcagaaatcatacaatctgcacggaaaggatttagccagggtaatagtggcaacaatttgtttattcagttcgctagcatggtagatcacttgattaagttgtgctttcatgctggtcaacctaaatcaaggacaattaacatctcaattgagtttagttctctgaagaggatgatgccactaggaattattatgccaattcaacaatctcttacagttaatcttccgacttgtgatgggaatctgagtgattcacttacctctgatatcttttctgtgactgatcttccaacaatagcagggatagcagatgaggctgagattctttcatctcttcaacgacctaagaaagtatgttattttatgaaatgcggttatttgttattattccgaaaatccttccaagttcttttgttcacggttctcataattcacgttttacactagtcagtaccataacgtgataagaaccaagccttgagtctagagaaaccagcactaaaactggaaatagcaccaaaccagcacacacaaacagcaattgcaatagaacagtagaagaatgaaagaagaggtgagctgttattgtaatgaaaatggaaactgagtcacaattctccacaagtatttgagagcctgggactctcaaagatgctaagaaatagtcagttcttgtataacctctcacacagctcaacacgctctttatgagcagctcaccttacacaagaaaattactaaaacacctctccactcactcccacaacaagctagcagaacatacccaacttacccctgtacattctgcctattcccccttctagcataagtaaatcacaccaaaggtctatcatgcctatcgtaacagaactgtgaaacaatctggatactgatcatttttgtgaacttgatgcttgtcctattgatggagaatttaagtctaatacagttactatgtcggagtaaacaatgaaactaaatatttgttatttttaattactttatttagtattatttaattgggatatgggaaaagctatactatttgaatgtttttagtgaacttttaattttggttgattagattatattgttgattgctttctaagttttcctaattgtgctcatttgtttttcaatatttttatgcaacttggtcaaagaaatcaaatcctttctctaaaatttatacacttcacttcctaaattcctctttctcctctctttcttatcttggtgctacaatgtttttttttcttttttctttttcacacatttatttatctatcatatttcagattattctactgggcagtgacggcatggaacgcccattcctctgcaaaccaaaagatgatctccggaaggacgcccgcatgatggagttcactgcaatgataaatcgtttgttgtcaaaatacccagaaagccgtcgaaggaagctctacattcgcacctttgctgtgatacctttgacagaggattgtggcatggtagagtgggtgcctcatactcgtggacttaggcatatactgcaagacatttatattacctgtgggaaatttgacaagctaaagacaaatcctcagattaaacggatatatgatcagtgccatggtaaaatgcctgaagatgagatgctgaaaaataaaattcttccgatgttccctccagtttttcataaatggtttttgacaactttttctgagccagctgcttggtttagagcaaggattgcttatgcacacactactgctgtgtggtcaatggttgggcacattgtgggacttggtgataggcatggtgaaaacattctttttgattctactaccggtgactgtgttcatgttgatttcagttgtttatttgacaagggcttgcagttggagaagccagagctggttccattcaggctaactcaggtgagaaatactcatttcatgagtgcaatttgaactttttaatgactggttcatggatagaatactgcaaggaaaattccatttctggattacaaaattgtcaaaaagttgtttgacttaagccttggcaggattttccagacttgattttcctctccttatgaggacttcattctttatatgtatcattatacgtttgttataatcttaattctagataaataaccatcacccgtgttgagctttttgttatggctcagagttctcatcatcttggaatgtattttgatggactcttttatcaaatttcagaacatgattgatggcttgggaatcactggttatgaaggaatcttcttgagagtgtgtgaaatcacactttcagttctcaggatgcatagggaaactttgatgagtgtgcttgaaaccttcattcatgatcctcttgtggagtggacaaaatctcacaagtccagtggggtggaagttcaaaatccacacgcacaggtttgcatctgagatccccttcattcactttaatgcaatttcttcaaagtaaaaattatatatggtttatacatcattatgttgatacatttttccatagcaccacaacaaagttgatatatttcctggattatagtgacagtaaggttggtaatctgtcggtattgtttggtaattggatttttacaaagaaaacttttgtgagtaaaaataactcggaaagtagaggaaaacatcttccgaacaaattatgtagaagattttattgcatcttttctatttctctaatatgtttataggagttgtaagtgctataaaattacattaaaattgaactcactattctcgtagaaaaagatatcttttttgtttgaacccaaacaaaagaacaattatttgaaatttgttttatttccttaaattcctaagcatagggataaattattatcctatcagtgcaataaaatatcatggagacatgtgaagaagaaactcctttctacttccgttacttgaaagataatctcaatattaatcaaatgacaaggctagccgagtcaatgactcattgtgcctagcctttgccttcatttactccattctgaaacaaatgctaatactttcgtcatttgttgattgctgcagcgtgccatcagtaacattgaagcaaggttgcgaggagttgtggttggagttggtgcagctccatcattgcctcttgctgttgaaggccaggctcgtcggttgattactgaagcaatctcacacaaaaatcttggcaagatgtatatatggtggatgccatggttttgaaactgtgtaaggggactggggacacatcccatgttattgaggcttctacaagtatctccagctattactatggattttctggtttgagcttgcctttttcactgaaaatcaaggtttgcggtagtttatccccaaactaagtatattaataggtttttcaagtaataataatttgcttagtttgggcattaaaataaactaaattaatgggttttgcaaagaaaagtatgttggggagaacatctaataatgaagaagaataaattaggtgacagtcaacataattggtgtcatagatttccttcaacaataaaaagacatgtatattctggttcttttgggtgtaccactaccaggtaattacatgagatgaactgtttttaatagaactcattattaatcattttaattttgtaggtggaaccgtgaaagattgtataaaatattacaataaggtgacagtcttccagatatctcaagttaggagagaataaccaaaaggtttgaacacttgattcttttctttgatattggtcacccaagttcaggctcttatgacaagacatttgttgcaggattccctactttctggatcaacacaaccaatctttcacacttttccctttggcaattaaacaaccggcattctttctatcaattctcatgggactcttcatccgaaccatcatctctttgatcatggttttcactggagaaacacctcttacattgctatgctttcctgatccacagacaactacaacctcagctggtacaacaggtttgccatcattgtttaaactgaatctgcttcgcatctcctctatccactgtaacattatgaagtaagctgagcccagatgcattccatgcaaatccaatttcacctccatagaatcccacaccatggcctcctccaaaacctgtgacccctctaactccttaaccagcagagcctcgtcacctttcaaagtcccatgtagctcatccatggagagtgggatattatttctcaggtcttgtagcattgctgaaatagtcgggcatgcattcaagacagtattatatgtcctgattgagaaaggaatagtagaagttttcattttctgaagccatgagaccatctggggaagatcattatgggctccatacgaagaaagaaccatgttcgaacatattgtgtcaatcaccaacccttcatcctccatttggtgcacaattctgagcatgtcactcaacaatcctattcgtccataggcatacatgagagacctaaactcgaaaacagaaggtttaagaccattgcctctcatctcctccattaagctctccccttcactaggtcgatccatcgtgcataaaccactaaccattgactcaaaggctcggcgtttgacataaacagaggaagagttacaaagaagttgatacagttgagtgtagcaactgtcaaagccatgtgtggagctttgcttagagtgtgactcgaccaagttgcagtagaacatagcaagttctcggtgtcgatccaatttcgaaacagcctccgaaatcagtgcttctgattcgttgtatcggccatgtttatcaagcaatgcagccagtgctgctacaagctttgggttaaactcgaaccaagatgcttctttgatccttgaatacagctgcattcaaatgaactcgattatatattatttagaatataattctgaagctggactaagagacaaaaaaaaatatgaagtacgtactaggagggagtgagaggtgaggtgggggtgagtggtatccggagaaaggagatgagagagagcgttcagagatatggatttaggtgaggctgccacgaattttccgatcaacttgtgggcggcggaggaatccccagctttgactgagagagtggagaggaagcggtggccttgtttcgtcagtgcgcattgaataaacgatggttgcgacgacagtggttgatgttggtgataagcaaaagcgaatggggctgggatttggggagagcttacatgaaaacatactgtcatttgtgcttggttttctcagtctcagctgaggttcgtcactgcagattgattggcttctcgaccctgccaatgctagtctctaccgatatatttgtcgatcgttacttttttaatgggcctcttgcattttctattggctgggctcatcaaaagctaaggcccaagccaactacccttgtgcaatgcataccaacttctcctcttcctttcctatctactctacggtttgaacttttacgtttcattgtgaagattttagattacatattctgtttgttgtttggtgtttaaagttgcaaaatctaatagtttattgagaaattatagtaaatgactaaataatatagggctatttacaaaaatatgggaaaataaagataagttttga

SEQ ID NO: 378569 - DNA, 7675 bp, Cannabis indica
tttttgcgtatagtatgagtgtgacggcaactaatattggcttcagattacaaactgtaaacagccttgcttgcacctacgaataaagcgtctgcatcaacaggttcacaagtgtcagtcaatcaaacaatcttcattagtgcaatattaatatacatcaacatttagaaaaagatttaagtactggttttaacacattattaagagaaaaagaattgctactttttttctacaagaattggaaaagtaagatgatcccctctggtttgatgccatagaaagcttatctcaaatcaagaacaataaagatgtatttctcttaagtaagagaatcaaattcccaagaaaaagaattcttagaatttactagcactaaggaaaatatatttgcacttaattatcttattttttgcaattgtacaatataaaaacatactgtgttacataatatccacttatagaaagaaataaagtttgtttggaaacttacccatccaacggtagaggaggtaagcaacatgtcatcagataccaagaaggctttagaactcgaccacttaagctaagaacaacagctcctgggccaccaacccatgccaggcacagtgagagaaagttataaatgacccatgcttcataactaacaaattagaaaaaaaatagatcattaaaagatgagaaaaaaatgtatgcaggactttacgatctacttatgccatgcattcataatataaaacacagccataaaaacaatagactgcaatgaagaaatgttgttaagaaaactttactcaactagcaatgcacgtaaagctttacataaatggatatcaaaaatcagatgaacgtaaaatggagcatgtttataatgggcaaactagtctccctaaagaaaattatagtatattaaaatagacaatgtacaatcatagttctgaaagaaaaataggaacaaggttcatttataacaagcatctgaccaggtagagaaaaaaaaagaacaacatccatgacgtataaagaaaactagtataaaagtagtccaataagcagcatattcataagtttgatggccaaatgaaaaccttcctcgatcttttcctctgccaattctttttaccattaggtgtgatggttttctaaccaatgaccacccgaaacaacgataattttgtccacttaagtactattatatcaatatgaaatagaaagtaactaagatcaaataacagttgttaaattttgggaatttggtattaattcaatgcgaaatgcatgtaaaaggtcctatgcatgcagttattgtattgtacatgcatgtgaataaatgtgataatttagaacaaatttgtctgcactcttgcacagtcaaatcagatagagcagacaaggcaataaagtgtacaggggacagacaaggttgaggaccatcgacagtagaaaacgaataatctagatatgttataacaacataaaaacgagtacagagtacttacacttctcgaatggaattgaaatatattgaagtgtcgggtaaaacgagagacaggaaagacattaatgcataaacctgtcaaagatacagaaattcacagggttcagaaacgttgaaaagatccaatgcaaactagtgttgtaaatcaatgtaaatgaaacaatcaaacgaaattcaaagtggatcaatgaaaacgagtcactgatcaaacttcatagataaataaaatcactcactggaaccataaaaattattcgaacaatatatctttgataagtgggttcagtataattcaacaggtgcctgtagatatggaaaacagcaagagcaatggctccaacagtacaaaagaaggcgacaatgctcaggtatattgggactgcttcccccattttggatgaccttattctccaagcttcctaaacaaatcaacaacaacgattacaaatcatataacagtacaacaaattccagatacgttctcaaaatcaaacaagcaaaagaggtacacaaattaaaacctgaatttcatccaaagcaccgaaaccaaaggtcgacaagcccaaaccctacactaaatcaaaaaaagtaaataaaagaattcaatcgagtatgaaccatggcggacataaatcattacggttcttcaagaaaaaagagagaataaataaaacgcgtatccctaatagacaagtttgggggattgaaaacacaaaattgggagaaatggcggagaagaaacctcgtcagatccgcctcagagctagagaaaacgtaaaacgctgcgtttgacaagaactaggaaagaagaagaagaagaagcacaagaatttgctttactggcaaacaacaatggcggcttcttccagtcccgttgttgtatgtatatacccatttcaacaatcaataagatattggtattttctcctgtaatttttcattttatttatttttttaaaaataatatttaaaattcaaagaattgtgctgtaaatttataattaaaaattatccaacaaataacagacgtacacgtgtacactgaaacacgtaaccgacctcaaatgattatttttgcattaagaggaattttctttcttttgttaataatagtatatttggtggaaacaaattattttaaataatacttctatttaaataatagcatggttttatttgattttggataacattaacgtatagtgtttaggttatatatataaaatacaaaaacagatagtgtttgtaataatactctatgacctgtatatattatatatggatatttagtaattgacctcatacttcctctctaattttcaaaatatacttgtttagagagggcatggtatatttgacaaccaattgaagtgaactaactaagattagttgagattttctttgtagttattgtaaatagtttggtttgcttattagcttattagttattgtaattaattttatctgattttatttattaatagatattttatttatcctaaaaaagaaaaacttattatctaaattcttggattgatgacttgtacaattccaaagcccgcatatcggtcaactcagacctaggcccaatctaggtaactatccaaccaaatggccaaattaggctatagctctaattcgaaaatgagtccaactcgttgacctgctaaggccggatttccctactccaaagaaggccatttgattgagaagcaaagattctaccaagacaagtctggataccttcacgaggcgattcgaaaatgagtaattgaatagtcatctagatagcatctagatatctccttacacaaaacccttcaaacacagggcaccatggtatcataatgtgtcccccacatcagactagttgagtgcgtacgcaatcaaaaaattattatatcacactaaccgagtgcgtatgcaaccaaaagattatcacttaattcctaaatactaatttttatgcaatagtagttttgctaaagtaacttatattcagactaggatatagaaatctcaacttatatgtaaattttctactcttgtgacaaattaaaacatatcagaggcattaagtaaagaaaccataaaattaaaggaaattaagaacgaatgaaatagatgtacataaaaaattggggaaagaattaaatcatattaaaactataataaaatgtcaaaaaaatccccattaatactctaaataaaagtctagctactcttgttcattgtaaacgattgacacaaattaaataagaacataagaagaaagtagaaaaaaagaaatcgtcgaaaaaatattgtttgaaagtcttctaagtcgcttcgtctctctaattgcttcctccaaaagtgccaaaaaagataaaaaccctaattttcacagcttaaaacaggcgggccgcgatattactcattgagtgtcgcggcccgtgtcttttaagcatgcccaggaattttaggatttttgaggcgcgccaaggtagtgtcgcagtgcttgaagcattatttttggcaaataagaattaagggtttcaatgccttaacattggatcccaattttgaggtgcgcctataaatttgcaaaatatgatattgttgccaaatttttgccttttagcgccatgccattgaattctcatgttaaggtgctactccgtatttttaaattccttagcattagaagctccaatcgcatcagatctgttgaatttttttcttggattaatttcatgatgctctagcgacaagattttatataattaaccttattgcataattttttctcgagtttgctcaacttttcttcaatactaaacttgtaaaatattaataactaaaagcgtaaaattgcacaaaacacaactaaaactatttaaaaacctacctaaacatagtactaataaagtcctaacatcatattctctgacattctctatacggatctggttgagcatgacacctggtatcctcaaacggtctttgcttgtacaaacaagcctcacctcgtgaattaggcctcattcaattggtccaaagttaatagatattgtatcttacctcatcataggacctagtaaatagtgttaaaatattttttaccatgatcttaatttactgctcatgtatgttagattatgactaatctaacatattaatatggataagcctaaaacaataacataaacacataaaggattaagaaaattttacaacagttgcagtagaattaattgactccttctgttcagttctctcactcttgatcctttttgtcacagagtgtgatcagaattgaacctggattctccttagagttggtaaagactaaacaatcttccacactatcctaagtattgccttgatctgtgtgggcaatcactcgatactaagaagcacagaattttaagaagaaatctaaaagaacttcaaaattctaagtgtatataatataatagctcttaattttcttcttgtctgataaagagagagtcaaaatttattatcaggttaagaactataatgttatatttatacctagggttaggtttagagttaaaataaattaaaaaatataaaaataaaatgactttactaaacccttatggtcgaaccctatatggaggcccacaagtttgaattttgtcattttattgcttccttaataaaacttatcttttcttcaaaaatattagttttctattctaattgtttaaatgctaatttaatctatttaataattataattaattattaaaaaaattattatttatcttatttattaattagaccctataaggtctcttaattaacaaataaactatactttctcttttcttctcaagtatgtcattccttagtaaaatttataaataatataaataacaaatagtcttatttataatacattgattaattaaaaccaattaattgagactacaaagtaatgttatctcaactagtgtggggatcattgacttatataatcaagctcccaataagtcgatcttgaaatttattgagtaaattttctaacttattaattcttcacgactctactatagattcggaattgaactctaaattacataaacgctctatatactaaatataaatactctatagtcaatatttttaggttttgtggccccttttgtctatgtctatagataggtagtttctttatttaattatttgtaacaaatattatattttcttaccatttattattgtcttattttcttctattttttatagttaatatcaattatcacataaatatatggggaattacctcatatacttttttttaactttttcttttgtcaaatttacggtttgagtttctaaagtagttgcagcgctaattgcaataagggtttctatacgattttttgttacaatttaggttgtagggatttttatgtacaattccgtaaaaatgtaaaaaaaaatatatatattttgaagtgtaaaaataaaaaagcccctaaatatattttattttattctttatttttcaaattttaataattttttaataaatgataattacatccttatcatcaatataatttataaaataatacgcaatttgattttttcagttttcttcctatatactatatttttgaaaatttaaattaatttttaaggatttcttacataattttttaagaatttctatatataatataattattaaattacatttttattttatggttttctaattagttttttattttataattaccatcacattttttgattttattataaggaataatttagtttcgtgagtttgaaatattttttaccatttataattctattttattttggaaattttattttactctatccttatgaatatattattctataattagtcaattttaattttaattttgtttttataagcccattcattgaaatagtaatttatatttgattatattagtatattttacattcatatttctataattaaattagcatttaaaatacatttatgagtagttttagatttttttttatcgctactttaatgtgattttttttatcaagaagaagaatgaacttcattaatcaccaacaaaacaaaactgtacaagacaacaaacaagggcagcacccgaaatcaaaatgaactcttcaaatagtttctctcatgcccctcaagcacctatttttaatgacttataacctgtaaaatataatttttttacataatttacaatggagttgacagatttaaaatgtcgactgaaaatacaattgtttctattagtccaaagattataaattgtgagggcaaacactgcaacatgaactctatgcatcaagttggagtcacataatgctagccagctcttccaaccattccctgcagttggccttggccatgcttgagtaccaagccaagtaaaaagtttttccaccactctgttcaacaaaacacatttaaaaaataaatggttatgtgtctcggttaccatttcacacacgggacagtccatcgattctaatagaatattacattatatcattttgtctcgggttagaagatgagagttaaccacttgtcaaaggatgaacttgtgtttgggcaagtttagagagttccatatgactttactaaaaatgaattgatgctggggtaatcaactattgtatagccaatttgttttaaatttgccaccagttcttgctttttgaatatcacatcttggaaagttgtctctcaataccagctccaatcttgtttgagaatactcctaaaagttgctattctctaaatagatattattaatccatttgatccagagaaaatctctaaagttactttaatgtgatttttgttacttttatttttatttaatttaaataagcttacacttttatttgtaatttttggtgaaagttgtgtgatttatttttttgattataattttgggcgaaacgatattaaatggttggatattaatttttagtaatgtcgagctagtgatatgagttgtttgttaaattctatgtttatatataattttttattttgaagattgtcattctaatataattatgttttttggtttgatgttgcgatattttttttaatttcgctagctctggcgacaactattaataatgagaaggtattttttcaatatgatg

SEQ ID NO: 378570 - DNA, 3636 bp, Cannabis indica
gcttgagtttatatctcatgaatcggtaggaccttcagaaaatgaccaagaagctcataatttactgatgataacaaggttacgtattgtgcatataagtgataatattcctttctttatatgtatatgaatatgaatatgtaaacgtatattttcttttaggtgcagagaagattggcacaaaatcgtgaagctgcaagaaaaagtcgtttgcggaaaaaggttaaaagaaacttgtttcattttgatgctcatgatttgactgatatatatatatatattcaaaaataatctgtaataaaacttgttcaattaattcataatgaacaagtggcatgtatattaaatgggctaattaaattattataactattacattatgtataggcttatgttcaacaattagaatcaagccgtatgaaactggcccaattggagcaagaacttgagaggtctaggaagcaggtaaggtgaattcattattattattattatcaatattgctacatgatgatatatagtacatcatacataacatctaatttatatatcttgtaataattaacagggtgcagcattcataggcagtaatactaatagctcatcaagtttgaactcaggtttggaaagtatagtattttcattcaaataaaaaagagtgagtgggagttgattgatttgttgaaaattggtttttcgtttttttttttaaatttaattttcagaaatggtagcatttgataataaatacgggtattgggtggaagagctaaacagacagaacggtgagctaagaaatgcactgcaagctagagtagcatcggatgtagaacttggtatgttagtagagaatggtttgaaccattactacaatcttttccagatgaaagaagaggctgccaagtcagacattttctatttaatgtctggaatatggagaaccccagctgaacgttttttcctctggattggaggatttcgtccctctgaccttcttaaggtaattaactttatattttctttttttctttaagaaaagagatcacctgttgcagattccttctctactccttcggtagtttagataatctcacgaatcacgtgctagctataagagccttatacctaatccaatctcgagagttctcatcttagcataaacccgtttatgaggggttgtggtgagatttgaacccttaacccaaacaagttaggatgcgaggaaaggcgggatgccactaaaaaagaattaattgattggttggttgtgatgagtgatgtgttttgtataaccaggttgtgatgccacatatcgagccaatgaacgatcaacaagtggcaggtgtaaataaccttaggcaatcatcacagcaagctgaagatgctctgtcacaaggaatagataaacttcaccagaatctggcctttaatatggcagctgatcccataactgaagctgcttatgaatctataatggccgatgctatagagaagttggaagcacttgagatttttgtgaaccaggtaaaaataaagttaatgaatttatcattttttattattattttgagatttaattgtataattattagtttttgttggatggttggttacatatatatgtatatgtatgtatacatacattattggattggaataaatgtaggctgatcaccttaggctacaaacaatgaggcaaatggctcgtattctaaggcccaaccaagctgcacgggcattgctcgccttaggggactactttcaccgtctgcgcgcgcttagctcactttggtctgctcgtcctcgtcactcctccgcataattacttgttccatcttaattataatatcactactcaaatatatatgcatattttcatttttatatgtatacatatgcactcaatcttctcaaatgaacaattaatatatgggattcaacatgcatgtatgtgcatacagcatatatatatatatgcaatgaaagatcgatcatgttgaattatgttttgtaggttaaaaagtcttaaacgacggcttttttatttttatggtccaatgatgaattagtactaagtctagtgctacttagttaatttgtaaagttaattaaagaagttgtttaatgaaatggttgctagttgctaccaatatttattggtgcttcttttctttattatttccttttttttatccatagatgtggttttgaatcatcgttactagtcgaaatggttatcctttacataaagtattagtaacataactatatgcccctttgatatgataataaaaaccaatgatgtttctttcagcaaaagtctaactttaacgatcgatctataggtggaatgtgtcaaaggcacaccatagaatgtgaaattagtaaaatataacttcattatcattataaaatatatgaaaccccactatctaataaatgttattaagtactagtggtgttcaacactttctattaatagtcttttacgattagttagtgatactacttaaaaattattttcttaaattatatgagatccaatacttaattataccaataacaataccacactaataactaagtgtcttttcgcatttttagtaaagtaaagagctctaaatagtaaatttcgtattaaaatagggaccataccgcattgtgtgaaattttgatggatccgtaccgaactttaaaaggccggtccaatttcagggacggaactacttgtctcttccccaagaaaatatttttgacttttactttcaattgttttagttatagttttgtaaaattttgtttttcacgttaaatccacgtgtccattttataagtcaacttgttttcttataattcgaactctactttctcattttatttttttttaatatatatcatttttaattatttttatatattttttaataatactttacacacaattaagaataatataattataagaatttaaatacttgttaataaatattcatatatttaactcataaattaatatagttttaatattgtattttctaatagttttattatttcattatatataattaaattattattattattaatgtcaaattataaagttttctaatatatcgtacttttaaattagttcatttatatgtcgtgtcgtacttaagattatatttttcttattatatcgtgttaatttgtaatatcctatcgtacctaatccatgcccatattttttatttaatgttatgctcatgcctcctaggtttgcgccaattttatgtcatatcgaaaagtccaatcgacctactataaatatctctttttctctttgcatcaattaataacatcgacaaatgttatagaaacacaaaaatttcacattcttcgcaatttcttttaaaaaaataatcataatctttgcattttaaagtctagcttttgtggcaccatgaactacaatatcgtggttaaacaatcgatgcgctgactcgaggtggttgtgctaattaaggcgcaagttggggctgggtcctgaaggcgttctaattaaatctaacaatctcaatagttcagggaaaatttttaacggccaaaaagttcaggaggcatgatttggtacatgttaaagttcagggaaaaaaa

SEQ ID NO: 378571 - DNA, 2122 bp, Cannabis indica
acatcactttatggcgctcaagaattctactgttccaaagtttattccaaagcgatggggcaacctcacagtgagggtaccgctgcagggcctggattaagtaggccgatttgtatgagaaacgaacatttccttccttagtccagatccaatgatctttcccttggtccgatgggttaccccctttcagaatggccgcaactgtctcacgagtaaagaggttatttagtttgggtatgtcccagttacctgtctcagtcaaaagctttgacactgaattgtatgaattcgttggagtattagataattatggatagaagtcgattccatgtgtaatccaggggtcctcccaaatcttcgtgtcccttccatcagtgataactttacaggtcctcctcctaaggatgtcattagttttcatcacactcttccagaatcaggagtccgaggtcttagccttgcatttgaggatattctggcccctaagatatttggcttcaagaattttacaacatagtgattgacaccctgtaagcaacttccaaccccatttagtcagaaaggcttggttcatctcctttgtttttctaaaaccaagaccgccccgagacttagggaggcatagcttgtcccaggcccttaaatgaattccatggttacctttttcaaatccccaccaaaagtcacgcatcataccatcaattcttgagcacaaacgattataaagcttggtagactgcatggcatacacaggcattgccaagcccacagatttaataagggtggctcttcccgccttggacaaagttttcgcttttctacccatgtaatttggacgttagattctccacaataaagttaaaatccgcatccttgcctctaaagcaaaatatggggagtcctaagtatttaaggacgcccacagggccaccgatacctagggccgatttgacatcctctgtcatgtgaaccggagtgttctcactgaagaaaatagtagttttaagcttatttacttgttgccccgaccagtcacataatttctctagacaattccacatgtttctggcctcccctatggtagcccttacaaccaagatgaggtcgtccgcaaaaatgatatgaaaaatggttggtccaccccgactaaggttgattcctttgatactaccatttctcaaggcatcattgataagtctagaaaggatttcagcagcccaaatgaacaaggatggtgaaagaggatcgccttgacgaatcccgcatgatggataaattctacccacttggcccccattcaggcagatgattaatggtgaaaaatgcacaattattggtcttaaagtttaaaataaattaagtttaaattaatattttcatgaaattaatgaaatatatttttatgttgaaaatattttatttgaatttaatttattgttattttgtaggaattaaagtgtgcttttgttaaagaaaagaaaaagaaaaaaagagaaagaagaaagtagcaaatttgaaaaatgaataggagaagcccaaagaaaaagaaaagaaaggaggaaatgcaaaggcccagctaaagcccaatctgcctcctcaacccaagatgtccttctgggccctgcaacccaatcagcgccaactggcgcatttctattcgctcccaaaagcctcgtcaacgccaactgagcagttctcctcctccagcttgatgcacacgtggcccttccctattggatttgcatgtgcttcctctcctttctctgaagcccaagtgtcctgtcccatcaattcagtccttccttttcccaaacgccaactcccatgcttatctgcacaggggagatcaattacaagacttttcaaagtgcatcagccaaaatataataataaaaataatttagggtgattctacaatgcacccacttaaaagggatgtattaatgcacccttaacttatttcggcattcagaaaattttttttgtctaattttctttcatattcatgtacgttatagctatttaagatatcctacaaaattttgaaaaattcggaataatttacaatatagaaaacaatgttcaaacaatctattttacactcgtataaaataaaatagtc

SEQ ID NO: 378572 - DNA, 3909 bp, Cannabis indica
agtactagtacatataggaattagttactttttaactattgatatgagtatttatatgtttgaactaacaaattaattaccaaacctaaccaacatatatataatttttacttatttaaattcaataacaatttttgttaatttaaatgtacacaataattaatactttgttcatttttattttgaacaataatttacttagaaaattataaaatattcaaattgtgttaaataatcttataataatcaattcaaccaaaaaattatcatagtatttgtaatgacaaaagaaaccaaagaatgaagagtttctaagcaaaagacttttagatgaaattaattgtaagacacacaatatcagctaagaccattcttatttatagacaaaagatgtacaaggctaatcaagaaaagctaattacattcaacagaaaataactaactaactaatctcaacaaaaagttagttactgatcttaacatctaccctcaaataaaatggggttgttcccattttaagtttggacatcaaataaatgaatctattggtcgttagagcctttgtcgaagcatctgccacttgatccaaaataggtatacatattgaattaagttgcttctcaatgatctgatccctgataaaatgcaaatcaatttctatgcactttgattatccacacaaatgataggacaagtaggcaaagatacatgtaactctaaaaggagatatttcatccatttaagctcaacagcaacattcgcaaagccttgaattcactttcagtacttgatgtggcttcaacatgccttttcttagtggaccaactaacaagaatgtcctcatggaagatcagataccccctgtagacctctgatgaaacttgccaaatctgcatctgaataggctgtaagagtgagagcgttagctagggttaagtgtaaaccttctaaaatggtgcctttaagttatctgagtgttagttttatggtactaaattagatacgtagcggaaagatttcatatattaattatcaactatagcccaaaggatctccagatgtgtgtactttaaatcaaaacataaaatagcaggtttagagtatttatctcttgaagactatcacggtatcctcgaaacctatcgtatgttgtatcttttaattcagatgatgaggaatgcaattagactcgcaccagtgtcttccaaattgatcaaccacatacaaggaataatatgggatattaggataaagtgtacaatattgttcttattgagttctcaacgcatgagcaagaataattgagagagaaagcttatttccttctcctctctatattatgtacgaacataatacttatttaaagagattttagaaaaaccaattaaaatgaatttgaattgaagaaacaaaaaattcaagaaaagaaataagaaaaatgcacacagtttttatgtgattggggtgttaacgagccttaattaatgagtcaatattattatgtatttcagctagaaaagcctctgggaatacaatgaatacaaggtctcttagtttgcctgagcaagtattgcaagagagttcaacctttaaattgaaagatttgtttggtatttatagtgttaagggaattatactttgtttccctttttccctctaatggggcgtttacatgaaattacatattttaagctgttcttgtgaagtctagccgacgaaagagtagatctgctgactagacagattgaataagattgaatttgtcaaaattgtgtcttataattgtgggcaattaattatgaattaattgtttgatttccagtttaggtagtttccccttttagattgatatgatcttctgtcgagatttgaggagcatttactttcttattctatgtgcttaaataaaaaggaaatgagacttatcttttgggaacacactgtctggctctccgcaccacggtactggagctgcttccggatacggattatcattggtgacagctcatctgatcacaaagttatggtgcattcctggaaggtcctgtgtgacttgggcttggcctaaattgtcttctttgaaacccaatggtgggttattggtgctgacctagaacccacgtgttccttgccgaaaatacggataacattaccccaagcttctagaatgctactcatggtggaagcttgccccattccattagtgtggacatgtggaaatttaaaagtaatcttgcatgactttctagttgttagtcaatcatgcaaggtgacttcaatcttgagtcgtagtaggtcaacgtggaaatcatccagtcgtggaggagcatgtttatcgaggagttgctttccagaaaggcttttattttgagaactgttcactttttggtacgggaattaaaaaaaagcatcttcatcatcagtttacgcctcgattctagagcataataatttctttgacacgcttgactgttggagtccccaactgtcggatgtaattgtgcttttggagattcgttcgtggatcgtttattcctcttcacatgaatagacacatcaagtataaatacccttagaagactccttttactacttttcccctaatttcaaatcatcaacctttagaattcaagttttctctacaacttcacgagttggaactacacctaaagcaaaatctgttagttttatgctactaaatcaggtatgcagcggaagagttttgtattgtctgattatcattgtaccatatcccctaggatctccaatgtgtgtacattaaatctaaataatgaaaattgtaagtttagagtatacctcttgaagcctatcagggtatcctcgaaacttctcatatgttgtatcccttaatccagttaatgaggaatatgcaatttggactcacaccagtgtcttgcaaattgatccatcacacacaaggaatagtgtgagctattataataaagtgtataacttcgctcttgttgatttctcaatacatgagaaagaacaacagagagaaaaaaaataaagtttccttttctctctatagatttttaatttagcagtatacagtgatacttgatttcttaaattaggcttctatttgtagtagttaaatcgttttgtttccccagatttttggaaacagaatgaaaaaaataagaactgaagtaataataatcgaaagagaaaatataacaagagacaagtagttttttacgtggttggggcgttaactagccttagtccacgacacaattttattttgtaagttttttacttgtaaatgctttgagaaatacacaggatataagttcgtatgttttcttgagcaaagtacgtaaaagagttcaacccgtaatccatgagattgattgggtatttatagtagttgtaggattacattaaggttttcccttttccctctactgggaagtttataattaaacagtatctttgggcttttccataaagtaccagccgatgaagaacatgatatgttgactaggaaaatagaatttggttgatcgagtcaaaactgcatccgctaattgtgggtagttattctaaaataactacactgcgcttgttatgggaagtttcctctttaattgtgatgtgatattatggcacgatctggcaactgacatttccttatttataggccagaataaataaggaaaccaaagggtctttcaggaaggtactatcttaccctccagcctcatgacaccggaggcgtcttctgggctcgctctgccgagggtggaggactctgcaaatacggaaccaagacaactcttagaagggcatatccaggtgggatttgcccactttatcattgattattgccctactgatgggtctttaatgctaacttggaatccacatgtccaatgccgaaaa

SEQ ID NO: 378573 - DNA, 6957 bp, Cannabis indica
acaaatttgaacaatttttagaccatttatttcctctatttactaagtaaaataaaaattaaaatctttacaaattattttggtgtcttaaagtacccttttttttttttctttttcttttttttttaatttttttggtgtgatgaggtggcataaaatggtcaaaatctaagggataaaaaaagtacaccaaaagaccaaacaaacgctataagaccgcaccaaagacgctgtcttgtccagttgtttccatctaatctccgactctaactctcccttgtctttatcttacacttcaccgattttaatgttaaataaaaatcaaaactttttctattttttcaactaaaaaaagcaaagtaaattctgggttttgattattattgaattaagaaacaagtaagtaaaaaaaaaaaggaaaagactcaaaaaatttacttgtacgttttctttcccactttctctctctaaaaactcagactgtcggtggagtagtgaagagagagagagagagagtttgagaccgtagttactctgtctctttcgtccccttgaagctatttttctcttttttctattttataatattttccttttctatatatctacagctatacaaagagagaagcgtttttagagagagagagagaaagagctgtgcttagcatagcatagcatagcagtagtctctctttgtgaccacttattttgttgatctgtgagatttgagcatctgggtttgtttcagataatcagatttgagatctggttgtgattttgatcaatttggctttggagctcaattgggtctaattacaaagctcagttttttgtttttcttaaggtaaagtttcaatctttattcatacttaatttcagtacaatatatgagtgttttagtgtacctaattccaactgtaaagataagatttttgatgtttatatgtatcttctttttcagttacagatctgggttttgaaagtgagagtatttggaggtatgcatagatctgattaagtcaatttgagctaccaatttgacccatttgagcttggtggcaatggaatcagaaggagaaactggggtaagtagtaacattgtactttcatgtttttattagtttgattagaaactatgatgttacatagtcaaaatactagaaacttaaaactttgatgatgttttagatttaggcaaattcatgattgtccttttgttattggatttggtttaacttagggaaatgccatgaagaatcttggtggtttggtctgtctgatatgtggtgatggtgttggaaagactgtggatggtaagccctttgttgcttgtgatgtatgcgatttcccggtatgcagaccgtgctatgagtatgagcgaaaagacgggaatcaatcttgtcctcaatgcaaaaccagatataggaggcacaaaggtttgatttttagttgaattgggatatgaatttgatgttaatgaagtgaatgtgttggaatctgactttgtttttcgatcgaatgtttgtttagggagtccggctatactcggggataaagaagaggatgttgatgttgatgatggtgggagtgatttcaattacccttcggaaaaccagagtgagcagcagaagattgcagagcgaatgttgagctggcaaatgacgtatgggcggggagaggatgttacggctcctaattatgataaagaggtttctcacaaccacataccattgctcaccaatggtcatgaggtgagtctatctaatctacaatgtgtagtttcggtttttggaatgaaaagcctaatgtttttgaaatgttttgtgtttaggtttcgggggaattgtcagctgcttctcctgagcggctttctatggcatctcctggacaagctggtgggaagcgtcaccattcctattcatccgatgttaatcaatcacgtatgtttgaaataatgaaatttaagaaaaaacagaacaaaacattttattgagattttgattgattcttgcagcaaacattagagttgtggatcccgtgagggagttcggttcacctggtatagggaatgtggcatggaaagagagagtggatggttggaagatgaagcaagagaagaatgttgttccaatgagcaccggccaagctaactccgaaagaggaggtggtgatatcgatgctagcactgatgtactcgtcgatgatactttactgtaagagtttatactcttcacttgatttagtagaactgctaaatttttctctttcacttgttgattcggttttttatattattttttcagaaatgatgaagccaggcagcctctttcgaggaaggtttctattccttcatcgaggataaatccttataggatggtgattgttcttcggcttgttattctatgcattttcttgcattaccggcttacaaatcccgtgccaaatgcatatgctctgtggttaatctctgtcatttgtgagatttggtttgctgtctcttggattctcgatcagtttcccaagtggcttcctgtaaaccgagaaacttatctcgacaggcttgctttaaggtaaaagacttaaatcgagtaactttgtcattttagattcgaagagtatctgtctatagaaattaagatctaattatttgtatttcaggtatgaccgagaaggtgaaacgtcacagttagctgcagttgacatctttgtcagtactgtcgacccattgaaagagccgccacttgtcacagccaacactgtgttatccattctcgctgttgactaccctgttgacaaggtttcctgctatgtttctgatgatggtgcagctatgctttcgtttgaatctctgtccgaaactgctgaattcgctaggagatgggttcctttctgcaagaaatatagtatcgagcctcgtgcaccagaatggtacttcactcagaaaatcgattacttgaaagacaaggtccaaccgtctttggtcaaggagcgtagagctatgaagagagaatatgaagagttcaaagtccgagtcaatggactcgttgctaaggcacagaaagttcccgaagaagggtggattatgcaagacggtaccccatggcctggaaataacaccagagatcacccgggaatgatccaagtagatttccattcgtaaatttggaaaacctcgggagctacgaaagccttgttatgtaaaattgcttattctgtttgtttgtttgtttgtttcaggttttcttgggacaaagcggaggacttgattctgatggcaacgagctacctcgattggtatatgtttctcgtgaaaagcgtcctggatttcagcatcacaagaaggccggtgctatgaatgcacttgtaagtatcgaaaaattcaaatgctaaagcaatttaattcttttttgcaagttttcttatacgaaatgttcgattttattacactttgcaggttcgagtttcagcggtgcttaccaacggacccttcttgttgaatctcgattgtgatcattacattaacaacagcaaagccttgagagaagccatgtgtttcttaatggatcccaacttaggaaagaacgtttgttacgttcaattcccacagagattcgatggtattgataggaacgatagatatgccaatcgaaacactgtcttcttcgatgtaagttggtttttagtttatttttttcactcattttatctgccttttgtgtttattttctcactttgtttatttcagattaacttgcgaggtttggatggaattcaagggcccgtttatgtgggtacgggatgtgttttcaaccgaacagccttgtacggttatgaaccacccgttaagcccaagcataagaagactggcgtcatggcttcactatgctgtggttcgagaaagaagcgttcgaaatcaagtaaaaagggttcggataagaaaaaatctagcaagaatgctgatcctaccgtgccaattttcaatctcgaagatatagaagagggcgtggaaggtacacaattaatttcgatttactgtttttctctaaccatatctttgcaaatcggtctcattttctttttcacaattcaattcaggtgctggatttgatgacgagaaatcgttgcttatgtcacaaatgagcctcgagaaacgattcggtcagtctgctgtttttgtagcctcaacactaatggagaacggcggtgtacctcagtctgctactcccgaaacgcttcttaaagaggctattcatgtcatcagttgtggatacgaagataaaacagattggggaaatgaggtttgtgccattttctgatcttaaatgcttttgcagacatttttgaaatttcttatttttttaaccaatcttgtgctcgaacagattggatggatctacggttctgtcacagaagatattctcacgggattcaagatgcacgctcgtggttggaggtcgatttactgtatgcctaagcttgcagcctttaaagggtctgcacctatcaatctttccgatcgtttgaaccaagtgcttcgatgggctttaggttcagtcgaaattcttctcagtcggcattgtcctatttggtacggttacagtggtcggctcaaatggctcgaacggttcgcctatgtcaacaccaccatttatccaatcacttccattcctcttctcgcgtattgtacattgcccgccgtctgtcttctcacaaacaagttcatcattcctcaggttcgttcactcgacttatccacgaattcgtaataattgaaacttgtgcgtgttttgtcccacattgctcgtatgcaagtaatttggggggtttatagggttttggtaattggataaaagctcgaaatctcaaaccctattgtttccgaaatgcagattagtaaccttgcaagtatatggtttatttccctctttctttccattttcgcaacgggtatcctcgagatgagatggagcggtgtagggatcgacgagtggtggagaaacgagcaattttgggtcatcggtggtgtttcagcccatctcttcgccgtggtccaaggtttgctcaaagtactagctggaatcgacacaaacttcactgtcacctcaaaggcatcagacgaagacggggatttcgccgagctttacttgttcaaatggacaactctgctcatcccgccaaccacgctcctcatcatcaacttggtgggagttgtggcgggaatctcgtacgctattaacagcggttaccaatcgtggggacccttgttcggaaagttgtttttcgctttctgggtgattgttcatctctatcctttccttaaaggtctcatgggaagacagaacagaactcccaccattgttgtggtttggtctgttctacttgcttcaatcttctccttattgtgggttcgggttgacccgtttacaacccgagttaccggcccagatgttgagttgtgtggaatcaactgctagagatgaaaaaaattcaatctttattattttttagattatttattgttctaagggaaaaaaaaaagaacaacaacaaaagaaagctataaatcccataatatatgcaaatttgttttgcaatttcattttttttttggagatgtaatatgatgtttttttgtctttactgaactgaactggtttgtactccatgttaatcataaattatgtgcagataaaatagttgttaaagtttaaagattatattttgttgtatgaacatttttcttttgtattttgagatctttgactgaattgagctacataatttataaattttgtatttggcttctttatgttttttcccaagattatttggggcaatattttgtttcagcaattagcataatttcttttgactaattaaaatttttgcttcctgtatcaaattttgtcttcaaaattattgaatgtaagaatgtgtctaatttcgttcaatttgattaatttcgtaattgtttaagtattaaatcgtactttctgaattttaatatttattaaatcgttctctccaaattctatcaagtattaaattaagtttattgaactttcattcacgtcaaactttcagtagttagacaatttattttatccaataattttaatagtttaggaataatttgtaacagtttaaaaaatttaaaagcataatttaatataaatcaaagttctctaaaaacaaattagtcaattttttttttagaattagtagaatttatgtctctaattaaactttttgggtgataattgttacacctaaaaaaaatattaatatagcatttggtacttatgaaaacatggcaaacaattggtgctataattcttgtgtatacattaatcttctaccaaatacttatttattttattaataattaaatactttgtttatttataatatatatattttttatataattaatagaaatagatgtgttatagataaagattagagatattgaggaccaaatgattttggctattctcttattttctatggataaaaacaaatgaatgacatcaattgagatatgaataagctaatgatttctcctcaacaagttcttttgcagtttcatccattttttctcgagaaaactcatcaatcttcagccctacaacatttaatgaaaccaaattcaatatagtaaatttcccaaaattaaaattacttttaccaaaaagacttgaattgaaaacaaaaaaaaatagctatataccttggacaatagaccattctccttttttgacatgtaacaggaaacgagtaaataagaccaggttggaccccataagaaccatcagaatacactcccattgaaacccatgtgccctaaattatattaaattcaaccaaatccaacaaacaactcattactcattattattacaagaatttacaagtttccaataaaaaaacaaatgtaaagaatataagttaattaaa

SEQ ID NO: 378574 - DNA, 2296 bp, Cannabis indica
cgccataggaaccctatggcgtcgggttttttcataataactgaagccataggattcctctgccgtcggttgttatttaccctacaacatcacctgaaatagcatcggtaccgaatttcgccaaaattgacgctaaaagcccttaaaaatcgcctctaaaacctaattttgtagtagtgatactttatgatagtttaggtaggtaatctacaagcaaataatataaacacttactataccatgagtcaacctgtcttcgcagcaaatgtacatattcgaccagtcttgaagaccattaaaactatagctactctgacaccaacttgtaacgcctactctgataccaacttgtaacgccctattccatagggacgccatgtgtgtgattttataaactactttagtactaataaagtaataattgtattaaaagttttgtgataatattaaaaacttcactaaaataaaacacaaaaaattgacatcataacgatactaaaactgtgtttcggggatccctgttgtaaaagttttacaaaaagactagatacgacaacaagtcaaaatattaaataaaaataaatggcagatacaactttaaaacaactcctcacaactcggcacataggccggtaggatcaatatgtacattgctggagaagacagtcacctcatggctgctctagcttttctttacctttacctgcaccatatagcacccgtgattcacgaggacttggcaagaaaagtaatagcaagaataatataatgcattgatcaaatattgtcatttatactcagataatcaaaaacaaacaattagacattgctcataagataaaatctaaatcaacactgacatctatcacaattaaacgtgtgtgtagatatttggtaatataaaatcattctactaataatagaagatattcatttaataattgttgtcaaaatttttgtaagtttgacacatggaacctaaccaaggaagttgagataacaatcaactggataatgcctcaagctctagctcccgcgaagggcttccacaaaggatactcccgcgcaaagtggggaagtgtggagcattcgcatgccatgatatctcccagtccttggagcggaagccaagcctccaacgaaggctgagagtttccttaagtacgccatgcgggtcgcggaaggactaagaaagttgtatccctgttcagtatcacgggagagcttcgcccgatcagattagactacaaaggagacaaccatgcttatgctggtacaatgccaggttttgtcccccacgccgggccacaatactgggcatgcatgctaacttgtacctgcccaagtgatccaacgaccatttataagggaaattcaaaaagggaaggccttggagttaccgtatgagatgttcggatagtacgagctgacacccctatacaccatgtgatggattggccacttactaaatcaacggtcgaatctgttctagtgagatcaatccagcaagcatgtgaaagaagaaatcacatataaataccattgcatttcgtgagataggagcaacctttgaaacttgaaaaaagttaagaaaaaccatagtctacttataaaaactctactgaaattcctattgagcttcttattcttcaagaggaacgtgagggatacagtgttctagtccataatgtaacttcttgtaatattaactacttgtcgatgaggctaataaaatggaatcttggactaaggatagttaatgcctgaaccacgtaaaaaattgctcatctgttgtttaatatcatttattttcttaagctcttattagtttgtttctaaaaatctcggtaaatattttgctcatttcattgagatctgaggaaagattgaaacatgcacagtgttttccatcacaaatctcaagttgcaagaaggagaacccatccaaaaaaggaaaaaagacacagcttgactaccaaccgagatctggtcagaactcgaaggctcactgaccaagggcattgtcgacaatgaaggcctacatccctacctaagcgaggagaatggagaagatggatgtaaacaaccttggagttaatgcagtacccaaacacatttgggaaaactcatatccgatcggtcgacactctaaaagcgctgcaggccagtggtgccttcaagcttgggcgccctcctactcacaaaagcgcaaccatgcagaaacggtgagatatgagaaatgttaggttttatgccctaaagaaaaccccatttcaatgtaatctattttattcaa

SEQ ID NO: 378575 - DNA, 2812 bp, Cannabis indica
gaagttggagccaacagtattggtcgtaggaagaaaaaagacttcgatgtaatataaaattttgaggaaatataaaattttctccgaattccaaccaagtccactctcaaaatattttcacttccaaataattctcagtatgctgggtccagttctaataaatatgatgcagttcatctcgttcaactgcacatgtatcgtgaggattggtgctcaatcactagagatgcctttggtttgatcatcaaattgaggcaacttgtcaaatttatgacagtccactgatgtaagtattcaccagatagcaatagcactcaatcttggatgatcaagagaactgcagcaacaattctttacaaagatcgataagatgacttcaatccatccattgatgtctatgtttgtgattatggcaccaggagaaatccctagtctggaactagtttctcaccagtagtcattacaagagcatattccatctttgaaatggtggaagcggtttgaatctctcaccattatttccctttgaagatgatttgctgctagtttcatgaaattatggcaatccacgcaaatcctgatgttctttacaattcttatgacactcccacgagcatttaaatgaccttcatttattacagaaaacatcaatgcaagcttctcactatgatgatacaagtgctcttccttttgttcctcctctaaatcatacaaggccaagttcgtctctggaacataacccatttcctttaatttccctattagtctttcaagcttgctgcatataatctccctctctggatgacgttgacctcctgaggcaaactcatgaacccgattcccgacttcaacccaacttaatccaggttcttttctcactcgatagtccttcatttcgttccaaacagcacctgcttcatcaaagttaccactgtagcactgtatgtttgacatttgtacatagcctaacgaatttctaggctccaattgctttagcttaaccgccgcaaacttggccaactgagtattcccatacttcctacatgatgcaataagtgcactccaaatcacagaatctggctccattggcatctcatcaataagtttctcagcctcatgaattcgccctgcacgcccgtaaaggtcaaccatgcaggcgtagtgatcaacttgaggaacaatgctataacttctttgcatacagtcaaacattttaattccttcttctactaacccagcatggctacaagcagaaagaagagcaacaaaggtagtgggatcaggtttaatgtttatttgacaaaagagctgtatggcctctctagcttgcccatgcaaggcataagccttgatcatggaattccaagaaattatatcacggtcttcaatttcatcaaacacttgcttagacatggaaatggaaccacacctagcataggcatggatcaaggaatttgcgagaactgtgtcaccttcaaaactcagtttaataacttgagaatgaactgctgaggcatgacgctctgtcacaagacctgcacaagcctttaagacaatagagtatgtataccagtctggaactagaccttcttgaaacaattgagaaaacagaagtaatgctttctctggttcccgttctgcaaatattgttataatgctagtccatgaaacaatatcccatacacaacttgtctcgaggaagagcttataacagtctgcagccttccctccgagatctgaataagcctttattagagcagtagccaccttgacttctgatacaaagccagttttgacagtaagacagtgcatttgaaaacaaaatctgaaaaacatatcggtgtcgttgtcgttgcttaaaaaagaagaaaaaatgctgagaagtgtggtccggtcaaaactaattcccttgctatgcatttgagtgaaaagatccatagctcgagctcgaagcccatgaaacagaaacacggaaatcattgaattccacgatatggtatttcgatgctccatgaacttaaacacagtccaagcatcggttgttccatcacatatgccactccttttatacatggtaataagagcattcccaacataagtacatgcgtccaaacacattttcaaagcaagagcatggacctgcagcccaaattgaccataactttcaacacatgaagttaggacacttgcaaatgcaaactcattgggacgaaattctgacagcattctcgtaaaaagcctacagcaattgtctgtcagtccacattgtgcatacccagagatgagagcagtccaagaaataagatttctctcaggcattttatcaaacaactgatgcgcataatccaagtagccacatttacagtacatgttaagaaggtggtttgtaacatagaggttatgctgggtggtggggctgtggccaaccatgtagtgatgcagtgatacaccttctctaagggaaccatggcgggcgcattcatggaataaagaagcgtaaatttgatcgcaatgagtttctccgttggcgtagaagagggaaagagcttgatcaagacggccgcaagttgcgagcagacggactctgttgagaaggctgtgagattcaggtgtagtgagagattcaggtggaggaggaagattagttgagccgaatcttcttaaggaaataaaccatgagcaagtagcaggacgtaacatcatacattcgtaagttacgcaccttctactagtggctggctaataataaacaaccaagctttcaagttcttttcaatttttttttatttttttgaatgggaatggataattt

SEQ ID NO: 378576 - DNA, 2854 bp, Cannabis indica
tctaaactctttcattttaaagtctatttaaaatttactattcatgtgctacaatatttatagaatactactcattacactaaatatattttttaattgtcttaggttttaataattatttttgtatagggatatgcgtataatattatatatttgaaatgaataaaacatagtaaaattttaaaaatgtgaggtttgagtagtgatgtattttaaagaagttgataggtggtctaatataaatgtgtattgtaaaataaagaaaataaagttttgatgatatattttaaaaaataaaaagtaatcaattaataaggattttctaaatggttttcacatacaattttattttcaagagtatatttatatatataagttaattaatagttttaagtagataaaattaaggtatcactatatatatagtcttactaaaatcaattttcaccaaacttttaatttagtgtatattttgatataattatgtggatgtaagtcatgtatattaaagcaaaatatagtgcgtatagcttaatatacatcctatttacttgcaagacactctaatttaagtacactacatctctatgtagaaatgtaaatattaatttaagttaaactggcattattttttgaaaggtatattatatgtatataattctctagatattttctcactttttaactatacatgatataatgatttggtgaattgtctcatattaattgattatatcatgacacatatagtacccctttatttcaaaaattaagttctttttcactttttgtcctaataataatgagatgctaatgcattcgttagaggttagcggtgcccagtattaaccctaacgatacatttagtaaattatggttggaatatgaataatcaataaaataaaggtgaattaagatttttaccttgtgaactttgacatgcaccaaattatgctcctgaaattttaaggttgctaaaaatgtcctatgaattattgaaattgttgaatttaaggacttagtttaggttgttattattattagtattattatttttttttctaatatattttatgaaagagcattgttatcaggtagcaccttctcgaaatgtcgcgttgcgattggtcaacgatactccctaaaagctattatattaaattatataaaactcaatacttagttggaccaataacaatattccctaataaaattgattaaaatttcaaccattccctttaaattcagtcgactttgttgctgcggatattttcgaaacatttaatgcgaaacaccaatccgaaattattgctaactagttcatgtggcctgttgagttgagtgatcagcttgtaaggataatttggtaattttaaatgtgtatgaataataaaaatgtgtgtgaattgatttgaatcaagtccactcgttataattattgaattggcttcaactttaatggtctccaaaagttgctacagttgctactttataaatgctttgccacgtaagctatgaaatgggacccacaccttgccacctgggatgactgaagaaaatatagattatagaagacaaaactacagctaggtaaactaataatgctacaattaatttggaaaatgcatactattgtatttttcttcaccgaatttcattttcatgttttaaaaataaataatattaatcaaaatagtaggattatctatcattcatcaaattattagctagtttaaatttagatatactatattcatttaaactaaattcttatgcatatatgtgagtgtgatgagtaaattaatatatgttaatttttttcatatatattatttaattaagcgggttgtttattaattaattgttataaatatatatacatgtacacattacacacccataagtatactgttcgtgaaattaaataattacatgcttgtactgtcttttaataaatagaagtatctcaaatttatgggtgagtagtataaatgtaaatacatgcacgtatgcacgtacgtacacacatatacatactttgtatttataaatatatatcatgtatacacataaccttttgctcatgataacgatgtataaatattatctttcaatatggatatatttatagtaacacaattcatcatatcccataatagataaactggccaaaatgcttctatagtagatttatacgtatcattgaattcatggcatgtgaagtttcacatgctcttccttccataactatataaatctttaaataaatttctttcttcaaaaaaaaaatataattgaatgccaaatatatattattctctcatttatttttgaagctttttgttattgtgtgaactgaattgagctatagccatgtgccacatgacacactggcaaagcggtacagcatgcctgttatattattttatataatataatatttagattaaataattaagttgtaaataattaagtgtgacaaagtattaattttgtcaaattgtaacatacattatggagttacaaaatgtatgtagaatgatcacaaaataggagttgcaaatcctttaaattgatgatcacttgaatatgtaactctcatctctttttcactcttaaattagtaaaagatgttactaattatttatgaatgtgaatgaatgatagctattaaaaatatagttgttggagacttgatttattcatttataaggtgtataaatggttcaaaatcaagtgggaatgatttggaacactttggaaaagaattggccaaagctgaaaaaatggtaactagtaactagttactgttttttttagcatattattgcccacgtttttgaaagtttgagag

SEQ ID NO: 378577 - DNA, 2770 bp, Cannabis indica
gcctaattatttagggggttacacttaccgagacatagtatatcatttagttaaaaatcttaaaaattatttgagatatgttaatttgtgtttttttttttcatatattcattacttgttaaatgtttacaaatttttgaaaatgtgtatgaatttgtattgaaccaagaattaatttctatatattgatacttgtagttgctaccatgactttatcgaaccccattatatcactttcatttgacaaataggtctctacaactaacttcatcaagtggagagagaacattaatattgctctcataggtaaaaattctatgtttattctgggtgaggaagaacttgagaaaccaagtgaaaatgcaaacataacagtaagagacagacacaagcgttggcgaacttccaacagtaaggctcatttctttatgctatccagcatgattgataccttgaaaataaggtttgttggaactctcacaaaggctaagactatgaataagttaactaaattattttagaatggtcaaatcaagcttagtttgatgtaactaagaacttcacaaacgcacagatgaaaccaaatcaacatgtttgtgatcacctactccagatggatggttacttctaggatgatgaaatccatagagctgttatcgatcaggaaacacaagttagtgtgatccttaacagtttatctctagcttttctgccctttacttcaaagtatgccatgaacaagttaaaatttgactttcacaagtttatcaagaactttcagatgtttgagagtttgattggaggtccatagaaagggggtaacaaagctcctattgctgctcctgctaccaatggtgcaaccaaggctgatgcaaacattgccactgcgtccaaggcgaacaagaaaaagaagtggaataataccatgaccaaactacttaaatctgttaacatagataataagggtaagaaggctactagtactaaagcaaaggaaaaagaaaaatgcttctattgtagtgaaaaggggcaatggaaactatagtgtcttatgcttttggtaaagtatcaaggtatttctaagtcttttgtttaggattcatgtgttcaagagaattattaatccttttaggttattgattctggatctactaaccatgtgtatattcgtgttttagctttagctacttgaaacttaagatctgtaccctaaagagttgtggttgatagttaggacggtgaagtagagtcagtccaagatagaaaacaaagttcacaattttagattttaaatattttttaattttggaacttcaattacaaattctagttatgaattgcaacatcatattgaaattttggagttttaacttaattttaattttctcttaaagtatttcattatgagttgcttttatggaattaagatttatattttgtgacttattcatttattttgtattacctattatctatttatcagttttatgtgttctatattaataatatgctatctatggtatagaatttgttcatgtagttttgacaagatacttgtcaaaactacttggtcaatgcaaagtgttattgttaaatccaaaagtgcttatggatattttgtcaagtccttacacaattagtatgatattatttatgatgtctactttaaaagctcttttcatctgatagggattgagacatattagatatgtgcaatttaaagattatttaaaatgaattccacatcgtattcaaacttactatctcaaaatatcaaaaccacatatagatgaaaataattagacatatgcttaactaattaaatctaccaaaatcattaggaatactaagatttcaactattttcaagcttagttggcttttcaaaaatgattaaggattgaccttattatggttatcgaaatcattttacaaacacttcaatactaaagtagcaaattagtgaaatttgtctatttgattttgttcctaaaaatgttctattgttttttacaactatatcagataatcctactttatccattgtatcagctcaattaatgacagctgaagagatcaataccattgaagttcctagacagataatcacggtacctagtattagtaggagggtttttaggaatctacctcattatgactagggtgacactagtgatgataagtcattgttaattttaacaagcaatggaatgttcgagaaaggaactctaaaacaaagttatgataacttggtctaatcgttcacatggacagtccaaagtcttcaaaatacaaggataagataggaaaacttgctcgatctattaaaaagacttaagcacaattttaattcctagtatcatgggtttgttgagaccaacaaagacaatggcttatggtatatgtggtaatttacttacttcttagcaagtatcttacattagtaaaattctagaacactatctcaatgacttattctaaaggaaatcattagacttatttccagaattaaaattaattcatctaaggaatagttttgataatttcacgaaaaggtaaatgtcaagaaagtattttcccaagtatgaacacacattagattaaacacctgttgttgagtggaagttataaataattataagtatactctaggaaggaaacattggaagataatcaaataaatctttagactaacaggtacatactcgacccgaacacgacccgcttaataattgtgtcaaaaaaatgaaacccgaacacgacccgtttat

SEQ ID NO: 378578 - DNA, 2461 bp, Cannabis indica
aatccaaggtataatcttctagcttctccatctttgatttccttaaagctcaagttaggtttaatgtatgatgaatctttgagttagggtactatagtgatacttggtgtttgattttgtgttctgaagttaatttgaggtaatctaagttgaattatgtaaagtttgctgagtttggtggtgtttgagcaaggtttgagtttaagaactcaaactttgctctttaatggtgatttgggtttctgtgttaattattgaggtttattacttgttttgagtttattatggtatatacaagtgttctgaaggttattggaaagtttggggttaaattgaagtgttgagagtatttttggtggttcttgcactgaactagtcgaccagtttaggaggaccgaactggaattttagttagtacccaggaaactccaccgaaccagtctttcagttggggcggttttgtgaaccctaatttttcctatttttgtgatatttaagatattgccatgttacccatcgatagggaaatttctaattttgatttttaagtccccaaaaagtattttagcgtgtctctcatcaaaattatgaatattatgatatagggccttgtaattcgtcgagttgatgttccactcaggttgactgacacacctgaacttagaaataaggtaagattagcatagaacatattatatatgcatgctgtatttatgaatgtatatgttttgggtaatatcatagcggcacaaccattgtgtcggttcggcagtacatgcaccgtactggttaagagtgatattcaccccaaaaagtattaattggggctatcatagtggcataacctgtgtcagttcggcaatacatgtaacgtattggttaagagtaatatcatggccaattgtactttcaggggctattgatgctatcatagcaatacgaacatagtcccggtctatagtatgatcatagtgatggtagtgggtgatatcatggtcaatagcaccagctgttaagaatgttcttaatcatttggttagtcttgtagataggtgtatgggtgcctaaacacaagtcgatgatatataatttgttatatgcatatcttactgagctaaaaatactaagctaaagatgccttgttccatttaggacctctcaaaatcccaagccacctagctttctcggcttacaaacaaggctccaagaagccatatgaaatttgctatgacatctaattgaaacatgctcatccaataacatctaattccaagtaagactgtgttaatgggtagagctctacctgcaaaagacaagtaatgactttcccaagtatgcaacttcaacttcagtttctttaagataatatcacaatcctcttgcttccacttggttggtctaaggaggactcctagattattctttggaaaagaacccgccttaaaagaaacttcttactgaatattaagaattgtaccattagtcataccagcaaaatagatgttggattttttattattagccttgaggcacgaacaactgctaaaatgagttaaagcctccaatatacaccttaccgagtctctattccctttgtagaacagaattaggccgttggtaaaacaaagattgatgagtttcaggcttttatgcattgggtgataaaaaaggctttgtctcaagctttccatttaagagtccaagttagatattccatgacaagcacaaagagaaggagagacataagatccccttgtcttaggcttttgctcattcaaattgaccttacactttcacattcaccactagaaaatagcaagatcctcaaacacaaaccaatatccaatccacaaataatctcgagaaccaataggtatttaatgatttgtcaaaaaaaattcaatcaattgtgtcataggccttgcttaaatctatgttcattaaacaactaggatagatttgttttcgatgataacctttgattaaaacttgaaggatcaatatattgtgagtgagggagcgatttttgacaaatgcttcttagttatcactgaccagccatggaagaactttatagattctattgcaaatcaacttcgagatgcatttgtatagtgtgttacaacaaactatcagcctgtagtctacaaccttggaaggactttccactttcggaatgagcatcaatagagtttcatttagttgcttaggcaagataccatcctgaaaaaaatctcataatagcagaagaaaactcttagcctagctcttaccacatgtttttgaaaagtttcaaaccataaccattcgatcaaggactttttaaatcaggtactgaaaataacacccttttaatatcttgaacaaaaaaaggcttgataatttttacatgctgttttagataattatcaaaattgatttttaaaagagtcttataatttcactacaagaaatatcactt

SEQ ID NO: 378579 - DNA, 1029 bp, Cannabis indica
ttcattcgtctttctctttctctgcatatcgagatcttcgactccagttgcttccctagccaaagctgccctggtcatacggctaccatgaggtgaatactctaattcatgtgcaatgttagaagatctctgacaaacgtgggaacatatggaattgggagctcagctaaccatgttttaatcattttttgttcgggccatcctttctctctcaaacttttttgccttttcttcttcgtgtattgacgctcacatttataagggccttttttttatcattattataagactataaaataagaattgaattaaagatagagaaatactaaggggtatcttaaggtgcaaaacgccacaagagataacatacaactatttgtataatttaatatcgagtcccacacatttaattagaaaatttgggtattcatacttaaattgtggccaaattaaacaaagacaaatcttttttttatcccctttaaaaaaatatgcacatttcccctaaatctaaaattacccctcccatcaaagtcctccctctaactcactttctctctctctctctctttgtttctcttcccttctctcctcgctttctcttctcttcatcacgcccagtcacccaaacccacattcccaccattttctccagtcgagtcaccacccgcaatgacccaacctacgacgatgaagacgtaccttttacgtttatttagttgtgtgttttgttaatttgttggtgaaaaaaatcagatatgcatttcttgtgcttttctcattttttctgtgtaaaattggataattctattcatgttcgatagttgctcggtaaaagtatttttagaggttagagatgaagtttcgatggtgttcgatagagaaaagttgtacgatatgatcgataatttcacaatatatgttcgataatatagattgttataagtttcgatcctatatgatacttgctcgatgtttgtccgattgttcatgatattttagaataaaattattttattatattgttca

SEQ ID NO: 378580 - DNA, 3418 bp, Cannabis indica
gtattaataatcatcatcaattcattctcaaaattcaattcagattcgttttgatcacaacaacgaaccaaatcaatccaaaaatcgctattcaaacatgagttacgatcctccaccaggtgagtttttcgattcaatttctcaatcatttcgttgttttcgcttctaatttcaattcaatttccgtactttgtgttttgtgatcttgttttgatgtgaatttttggtttttgattatctttgtgttgttttaggttacggatcctcgtataaccatcatcatgttcatcatcaaccaccgcctccaccgggatttccatcggcgccgcctcctccagggtatccgggatacccaccaccactgccaaatcagcctcctcagtatgaagggtatcaagggtattttggaggagggtatccaccaccaccgcctcctcctcaaccccaacgataccacgaacactgtcataattacgagcattaccgttaccagcaggaacacaatggttgtctttcgtttctccaaggctggtatgcactctctattgggtctttttcttatgttcattacatttacattgatcttgttttttttttcctatttgtgggtcatgattttggtgttagttgtgtttttaattgaaattgtttgtgatcataaagctaagctaaaacccaatttcataagttatccaaaagtaggattagcttaactttataatgcaattgctgtttgctgagattattatgtgatataattttatattattttttagcttttttcccaaaagtagtacataacaccttcaaaaaattcgacccaaaaggctcaaatcgtcattgaatgtgttttgttattaataatctatgatgtttgaggacatctatgtagtaattgttataatttatgtctattgaattagtagtgtagtttaacttaagccttgattctatccaactctaaactatcttcttattgttttttttttttttgttttagtgattctgacaataattcaatgtatcatgcagtttcgccgctctttgctgctgttgtttgttagaagaatgctgctgctgctatttttgatgaattcaaaaagcaagtgattgataataatcatttcagcactttctttctgctcttggtgttgtgctagagattttcatctaaagctaaaattgttttaattattacgaaagagttgctgttgttaacctctttgagttatattgaagaggttttgtgacattgtttattggggttgcttcatcattctcccctttattttgtgcagtttgtgtgtaaaaaaatgtttcattattaacagtatatgatttctgacatttctggatagtgtgttgttcctttgagtttccaatgctgtttctcacatttttttcttcccattttcacctatgcaattcccaaagtttattggcatctttgttagaaccgaattgaaattaagaattttataatttgacatccataaagtccattcaaaaagcacttctttttggtaaaagaggtctcctcctcttcattcaattcaagagcatatagtttgagttggctaatatctatatacaaaataccaatctgacttggaaaagaacaaacaatatctgcaagtgctaacaccgtctaaattatcacatcggtttacaatagtcaaaaccttcgtaaacaaacacaattacatgccaccactaaccattaataaccaacatcaagctatataagtccacttatctgttctgctaaacagagtacaacatcttgcaactactaaattaaagaagaacaaaaaataaagtggaagcctaaaaaagaaagaaaaaaaggtaaaaaccccaactgcagctacagcgtcaccacaaactctggcgcatcaccccttctccctaccatcgtccggtacaggtacattttctctacattgtgcccgtcttggttgaggcaaaactcgctctcttcattgtcgtttataatttcaacattaagactgggcatcttcttggccactgtcttgcagcctcccaaggtgactccacaggacgacatccaaagggatcgcattgtttcatactttcccacgtccgatagtagtgccacgtcaccaaaggggcaatccctaatctcgagctttcgaagcttcttgcagccattcaacacatacagcattcctttgtcactgtctccagcaaatgcaatagacaacatttcaagctgctcggcatacattccaatgtagagaaaaacttggtctgtaagaaggccagagagggacaaacgcctaatgtttttgcatccctggacgatcgctccaaaaccttcatccaacggctgtgaggtcaccgggtctggttttgtaggatcaaggatgcataacctgaaacggataaaattaggacaattcttggctactgttatcagagccgcattggtcatctgctggcagaagtacagcaaggaatgaagctttgggcatcccatagatatggcaactaagccttcttctgtaacagcatcatgcccaattccattaggatcagatggaaaaactctcaattcctgcaactctttacaagtagaagctacaaccgccaaccctttgtctccaatgcaatctagtatctgctcaatcacaaagaccaatgttatttgatgcaaaattaataaaaagcaactaaaattttactaaagggttaaaactatacatacccacaagcgctgaagtttaacacatcgacgaattagcttaatgagatcaaaaccatgtatgcccggagcataactcaagttcaaagatgtgaggttatcacaaagcggatagaaagctccgacgcacctaggtgtaacctccaaaaaccctgacaagctcctaattgatgtacatttcgaaagagtgttcttcaggttgaggtaggactcagaatgggggtcttggacacaagacccagtacccaaatccactagttgaggagctttcaccagtattttctgaagggtgtcaagaggaacagcacggtttaccctcaatactttgaggccaggggaccttgcaactagtctctcaagagcagctaaattaatttctcctttgaggcaagcaaaattaagtgacaccagagaagtgcattgatcagcaaagcagctcagccagtgccctttatggtcatcaatatcattctcttgaagatccaactccctcagatgcctataccaaaaaaaaaaaaacaaacaacaacacataaagaaagagtaagacagtgtcagatacaagctcaacaacaacatcctgacaccaatatagcattaattgcctcatttggctcgatctacacgttcctatacctctttagttcaccaacacataataatgtttaacaagagccttaaacagaaatactc

SEQ ID NO: 378581 - DNA, 7440 bp, Cannabis indica
ttcgtggaagagcgcaccttcaagttgctgtgggtttctctttctgggttcagtggcaaggggttcatatgacatgtcccactttttttatttttttattttttaatttttggaatgcagaactcgactagttgggctggagctctactggacttgcctcagtttcagaatgtcccggactcatagaaaatgattcaaggtttttagtctttcatttttttctactttgtaacttgttctagtgtaatcctttaagcatttgaggattgaaaatattactatacttgtctatgactataattatagtttttgatcatcgtctctaaattggggttacttatttttccttgaatttttttagctctttaagaaatttgggtcattgattatctgacaaatgaagtttgattgctcagatgcaattacaaagcttgatgaggcatttgtgattaatcctaagaaacatgatgccctttggtgcctgggaaaagctcatggtttcaatgcattttcgacccacgatgtagctgaagtgaggtgaggttcatgtcttagtcttaccatttgagaccatttgggatataaaattatatattagggttataaagtatgtatatgttgggaaaatttaagatgccttaatgtttacaagcgtggttgtactttttcggttgttgctcttatcatagggactaggcagtgtaagccaaatgtcattttggggggttttggataatttttcatagacctcggaagagcaccatgttggagttatatatgtgtgtaatttttcttttattattattttaaaaaatgaatcgatcagtgtgatatttttaaatattattatctgcagctagacatgcttttcttagagtcaaaactgaaagctatcacaaattatttttatatttctgcaataggatagttgatatataccagagcagtgaataaccctctaagatatcaccacaaacaaaagcagaaaaataaaagaagctgcataataatatagtatgagctacttctggctacccagacagatatatattgatacaaactagaggtttttttttttttttttcctttatctcagttgtggattttgaaatttgatgattgttgttgatcacactttagggcttttggagggatactgttttacaaaatatagtatttgagcttgtgttaagattgatatgtttaacccttgcactatgtgaagttgagtttagaaaagaaaagcttggagtatgttttcccacttataaactgcagtcagttattcaaagaaactaacttagatatcataaagtgagattatttactcgtgagtaatgcagtttacaaagtcggatggactttatacaagtcatagcttgtcaaaatggtcttaaatattggctttactattatttcacctgttaagtctttatttattttcacaaagaaaaattgtggcctagtgcttgttattttgaataacatgctaaacttttagttcattgtaatatatgacaagtacattttttttaattttgtttctgaaaaaccctttctctttggggccagcagtaataaacagaggagaccaataattgttaattgcgtggtttgtttgattcctgaccataacaaaaaatttcctgtggatatgatgttgtaaaatttaattatttcgttgtttgtatttatttattttatttgggtggttgataccatatcttattattttttttcctttgtaggttgttatgagccagtatttaactttgaaagaatgtcaaatctgttgattctgtttcagaagcttgtgcagagtttataacatgagttgatgttttgtttttttgctaattatcacgggtcagtgttaagcactcaaaaactggaatgtccctttttatatgtaaactaatttgaagtagctcaagttcctaattcttttttcatgcttgggtcttggtgcatttttttatgtatagtttgcttcgtagcaagatgcaattagcataagcagccagaataatttttctgtagagtattgctgccttcagtaatgcagtgaggttgttttctggtggactttgtagaggtctaaagcagacggaaaagacattggtgagtattataaaacatagctaaaacggggtcgctttgttgtgtggctgcaaggccacatggatctcataccagtacggactggtcgatgggtccacatgagccgtattggcgaactaatacaagcttctcgccacctccatcaagatgggatttccagttccattctgaaggactacaacatggttcacatgatggaaatcaacagaatggatccttttcgtcatcaaacagtaaagaaagtaggaactggttaagaggcaatcaactttatagtcaccagtacgcatctgatggtactggaatgtttttgagtagttcatcagacctttctcagggtcctcaatggacgcctcctgcaatacaggaaatcagaggggatgattttgaatctgccgctgcaaggagaggtaattagcaatttattattttaatattacaaattgaggattaatgattatgaatctgagtacatatttttctgaggccattatctgatttgttactttgtgatcttgggtttggaatagataagcttggaatgttctttgttagaagtcaagtagtcaccttttagcccaaatgtttatgattatagattctgtctttcatcatatatatgtcaaacatactgtgcatgttcatgtgaatctatatgcctgcatcctttcatagatgcaagtgttgtgtaagtttaatcgttgtgtgataatttgaaaaataaaaaatattggacgcaattgattgcgacactgttttaaatgtatgaatgcaatcccaaagcccaagaggctgccagtgaacacgccgttatgggaaagtatacatgttaccatgttgacctgttgtctgttgtagggattttaaatgcttcatacgattttcatctttcaggagttataatttctacctatgtaatgttttaatattttccttcgcgtcgagtcatcaactatacagcttacatgatctatgatctatctatgagtaagatgtgttgttgataatgagttagctatttattccttcatataggtgatataaatctattcttaagtttttttccgacgctgattggattatgcagttagatttgaaaatgtagaaaatccagacaaatgttgttccaatttctcaatattataccttctaaaattatagatcagtcattattttgctgagataatataaaattttaaaccttattgattgttgttcctgtttttttctttgtttttcccccacataaaatatattgtcatttttgttatactatttactaaaaacatttagtgtctttcgaatttgctaggtatggctttgggtccaccatcctttagaccttcagtggaggtacttcatcataattaaactgtcttggatcaaatccactgtttatccttccattggcacatatttttaatctgttataattttgcagggaacttcagaaattcaagatagcgggggctccacctcgttccgttcagacagcagcgagtctgaacacaagtcacgctcatcctcacatcgtaccttttcagggcgtcgatcttttatgtctaaacctattcatcccttgtccttccccagacaaggagagttttctgacttcactgctgctggattgccagagtttgatgctaccactcaaagagatgcccagagctggagcagtgccagcagcagcattgattttgcagatgtttcagaaacatttgaatctgaaataagcaatcggtcttataatttgtctgatggtgttagatgtggcctgtgtgaaaagtttcttacccaaagatccccatggagctctcgtagaattgtgagaagtggagacatgccagttactggggtcctttcttgttatcatgtttttcacgcggaatgcttggaacaaacaacacccaaggcatgtaagagtgatcctccctgccccttgtgtctgaaattggaagaggaaaattgccctgaaaagaggagctgttcaagatcaagggctggttctccaaggcttagatcgtacaatgaggatgggtcatcaagaccttggggctgtgcgcaggtgggagattgtgtggaaggtgcattgcatgtgccaacacgcaacactatgcttttactcaacaggaatcggattaaaaagaatctttcattgaagggtaattcaagtaaagagttccctgggaagttgaggaaaagtgggtcctattcttcacagcaactcagtgtaagatcaatcgatcatgcagcagttgggtgttcgaagtcaaaggttaaagctgggccaagcatgaactgacttgaactgaaagtagttatgatgtagataaaactgacatgaacaccactctgcgcttcaaagagccaattttctcatacacgttaaagtctgcttgcttagatgaatagatttttttagcaatgtgattggattacttggttatgctgtacttgtatagatatatgattgtgttaactgtggctgcaaagtagacagattttacatttccaaaatgttcgtttgcattcgtttcatgcctttacagactgcaccttttggaataaatatgtgcgacatatccctttaaaaataataagggggtggggggaacttttattattattattatttcaaaatcgagatcaagaacctcatgaacttaaatttggtactttgtataaaaattcaatccgcaatgtttttagcaaacaaaaataggttagataggaattttgtgggtatcaggcagagatatgtctaatgcttgtgagatagtctagaatgatgttttaagaagttggatatcgaatatatattctactgtcaccttttcaattcttattattttttaactggtcaattcttattattaatgagtagctttctatttgatttctatctctttaagtttgacggaaattaaacaaaaaatttatatattttattgttgctttgaatttatctcaacacacctgacaagtgaggaatgaaaaatgaatccttatcaaagaattagttagttggggttagttagtattagctgtcaagttggttattttctgttagagttgttagtttgtaaccgattcttgtcagctatatattgctgatctttcattcattctgtaattgattgtattgattcaattcataataataaaaagttccattgtttcctcttctatttttctctctgttttctctgttgctggtttataccagctgttatggtatcagagcctagcttcgagtaagctctgttcttcttccttttcttctttttgcttccgcttctgtatcgtgttcatggctagaggaggaggtgtgcgaactcgaagcaatcgcgatcttgatggcaactcgaacgattccaatagattctcagttcttggtgagaattctaggtcgacgagctgtaatgatttgtctaatccgtatttcctctcaaatggcgataatccaggtgctactctggttccgaaaattctcacagggagtgagaattatagtacatggaggagatctatgataattgctcttgtagcttggaataaagtgaaatttgtcaatggaaagcttcctaaaccagatgaagatcatgaagattatgacagctggtgcagatgcaatagcacagtaatctcatggattctttatgctatttcaggggagattgctgatagtataatgtatcttgataatgctgcagatatttgggaggaattacatgaaagatttaatgagaaaaatgctcctaggatttttgaggtgaaaaagacaatgcaaaggcttaatcaaggatccaatacagtaacaacttatttcactcgtctgaaatcattgtgggatcagattagggaattaagaccacaacccgtttgtagttgtggtgctgtggagattatccaggagcaaaaagagaggatcggctgttagaatttcttgttggtttaaatgattcctacagtatggttaggtctcaaatccttatgcgtgatccattacctagtgttaataaggcctatgctactgttattcaagaagaaaggcaaaggagtttaacaaatgataaccatacgattactgaaccagacaagaactctaccagcaatgaaggtcaatttgctgggagtgtccagccttttcgaccaaagtactcttgtacaaattgtggaatgactggtcacaccattgataggtgtttcaggataataggttatccaccaggtcacaaactttatgggaagtttcctaacaggaatgctaaagaacctccaacaaaatcagcatctgctaatttcacaggaggaggtgaacagaagtctgaaactgtgaatggtgagaaggatttcatggcagggttgtcaagttctcagtgtcaaagacttatggcaatgcttgctcaaaaggttgctgacaattccacaccagaaaactcaccagatcagcccattgtgtcacacttttctggtatgcaatctatcactcataatttgaattggattatagacacaggggcaactcaccatgtttgttctaatctgtcattgttcaaaattaccttttctaactccaatttaaggtctgttcttttacctactggtgtttatgctaaagtaaattgtgtaggaactgtcatgataacactagatttaattctgcagaatgttctctatgtacctacttttaaatgcaatttactttcagttaattctctcacagccaccactgattgcacattccttttttctcatggaaaatgtgttattcaggacattacgaagaacaaggtgattggaatgggtaaaaaatgtggtgacctttattttctgaactgtaatctgtccagcagtgatgaaaatgtctttgtgtcttcttctatttcagattctgtcatttctaatgaaactgtatggcactacaggttaggccatccttcatgtgtaaaatctcatcctttgaataaagatttgagtttcaattccaattctaattccctctttcattgttctatttgccactatgctaaacaaagaaaattgccttttccctacaatcataacattgttgaaaattgttttgaccttatacacattgatatatggggaccttttaatactttgactactgagggtttcaagtatttttattaccatagatgattgttcaagatatacttggattcatctactcaaaaataaatctcaagcccaagttatcattccccaatttataaggtttgttcaaaatcaatttcacaaaaccattaagggaataaggtctgataatgctaaggagttactgttgggttttat

SEQ ID NO: 378582 - DNA, 2318 bp, Cannabis indica
gtttttcctagtatgccttttgaggagatcctaaaaaataaggatgttatgagcaagcagcttattcttaacaaacgctcgttgattatgatgaacaagaagtgtaagaacttctgacagtcttgtataaagcatcttcgagatacacttataaagactgttacaacaagcgataagtctgtaatcattggcagtttttcgggtcagccactttcaggattagggaaataactatttcattaagagcattaggcagcaggccttcttgaaaaaaatcaaggatagcataagaaatttgatctcctaagttatcctaaagtcctttgtagaagcatgaactgaagccatttaaactcggtcttttagatgagtgaatactgaagagagccttcttaacatcacttttagtaaaaggcctgattagacttagttgttgcttaatgtctagtttgtttccttggttaagggagtcaatatcaagcttcctcctggtcgagctactcctccccataaagtttttgaaatgggaatgaaagtgcttgacaacctttgaataatcatcaaccattgtgtccccgattatgactgaagtaattctattttccattcttcttttcctcgtagtagtacgaaaatatcttgagttttcatcattagttttaagccaatttattttgctttgctgcttgaggaaacaagagtactttcctatagatccaggagttgttgctgcttgattttcactatgtatatcactgaactcctcctttgaatttttgtactccaaagcaatgttccccacagtatttttactgaatctctttaaagcatgcttaattcgaaacatgttctaaacaatctgttacagattaccattctgataagtattaagcttccagtgattcatcactgtttctttataaccgtttcaagaaacccagtgataacaatacctaaattgtataaaacccatctttgactcttgatttttaatcaaccaatagttctggtaaaaaataaagtccaatttgaagcaagcttcagcttttgggaaattttctaaccagtgaaaattcacaaaaaacatatctgacttggagaaaatacaatcacctttatcatgcttattagtccaggtgaaatgagatccagagctttgaattcttccacttggcctaaggcaagccaatcttgagcatcctctatctcattgtcaagaatttgtctttccccaactctgttctcatagctaaacatgacattaaaatccctaaaaatcagccatgggtttttcaaatgaccaatgttagctataccatcccataactttttcctttccactatggaattactcccataaactgtagtgacatacaaacaatcttgttggtcgcacactttcactttacaatgaacaaattgatgatcctaaattaacacatccacctatacaaacttagcttgccaaatcaacaaaattctaaacagcagtagaactcaagcaaatatcccagtttggggaattattttctatcatatccttcactttatcattcttaacttttgtctttaaaagagctcccaaacctactttattttccttacacacctcaagaatagcattttccttttctcttttattcatatccctcacattccaccctactatattccaactatccatcagttttgaaaaactataatacccaggactcattcccctgttaattgaagaacctcatagccattacctgaattttccttactgatgttcatgtcttccttctttttggtgttatccatttgccatcttcaccaactataccctcttcacaaactggtttgttactgttcatctctcttaattcgctagcttcaaaattcaccatattatttccattatttccatcgagattatcatcaagatctatacttccctcttatttttcctcagcaattgctttagtcatcatctcgtggttatcattatctaaaataccaggttgttgcttcaacactcttttgttagtggtgctttttttcctccaactcactactttatccttattgttatacccaaaattcagctgacactttagaggatgacacgtgtcaaccttcgggaatacgaataacaaatatcacgacaattaaattgaaagatactaaatggaataactcattaaatgcggagttgatagaacacatctataactcactgactgtatagtattaagcgagacaaagatgtacaaactattgattcacgtattgatgagaaaccatttcgcgtcagaagacacgatcataaggatgac

SEQ ID NO: 378583 - DNA, 1614 bp, Cannabis indica
ttttttatttttaataaaaaaaggaatacagttaataagagggaaaaaataaatgagaaaagtttaataaaatcctagaaatgtgcaaatatgattgaaaaatgaggtgcatggtaaagagtatgatattttatctcaaaattatttagtgatgagtgtagtaggatgttaagtttctatcaatacgagactatgtaatattttccttaagatgttagactacttttattcaccaattctttgactcaaaattctcaaatcaagtgattctatttgactcacaatctctaaatcacaagtaattttttttttacttttattttacaattagtttttggatttttgatgaaatactccttagagttgtcttaattctcatactatcttataatgtaaaatataactaaaagtagaacagaatgaaatgataagtaaagtagtctataatattattaatagtattaagttttttacatgttaaaattgtaagactctctaacaaagagcattacatcaatcattctactctattttaaaaagacatcactaattaaaactatatttattattattttacattaccgtacatcaatttttctataattttttatatgaattatatagtctaatatctttattcatttcataaaatttattattcaatcagtaaaaagagtatgtaataagtattaacaaaaaccaattcatttatatagagtctacagttggctctacatgtagagcaacactatagacaaagtaaaatagagattagttttatggtaggtgatggtgatgtgtaagactttcttcttgacatttataattttcattaaaatttaatataataaataatgtgtgttttgtaaatatacaaattaatatatatgggatagctctaaactctaatgaaagtgttacctctaattgagcagcatttgcagtggcaagggctatgcggagttgaaaagttgcattagcagtctcaattttgttgtcaagatcaaacttgatttgccaagtggtctcttcatatgtgtcattctcagtcttcctgccatttaaaatttggaggtagtctcttttattaaatgcaatgaaacgagaaatataattaatataatagttaagtgtggtaattatattattttgtgacattaattgtttatcttggaacaatgaaaatgtgaaattttaagaaactgatctacaatattttaatatgcaaagtattacaatgaatgatattaattaaataacattgtatcaaattagttccaccataaccaacaattttcatatagtaattattactagagtggaattaatattgacctggtaacatgagcaaagaaccagtcttttgtatagtcgttaacaccaattgtataaatcaaatctccatcaggatataactccgcgtatctttcccataatccatactgtctaaatctgcatatatttatataaattataaaatataaaataaaaaataaaaaaaaattgagacaccaaaaacaagacctattttcaattccgtttggtaacacttttgtttttcaattttttaatcacaaaatgaaagtaaaatttttgtttttaaaaaatttattt

SEQ ID NO: 378584 - DNA, 1554 bp, Cannabis indica
tgtgttttttcgttcttagaattatttttgccttttgtgcaggctatgcatgctcaatcttcagttgctgttggcattcagggtgccagtaaggcaatgtcagccataaataaggtcagaatttagtgacttttacagcacaaattgtatataattgtacattcaagttcatttcgaaatctgagatgtttcgcttgcagcaaatggcacccgaaaagcaagcaaaagtcatccgggagttccagaagcaatctgcacaaatggatatgactgtaagatcctttattctatcttcagaacaactttacatagagagaacttcatgcttgattatgaatatgtttattcatgcagactgaaatgatgtctgatgcaatagaagatgccttggatgatgatgaggccgaagaggaaactgatgagctaacaaaccaggtaagactgctacaagaccaaatattttctatttttcggaatactcctgaaaaaagcaagtagatttggtccattggaattgatgacattgtctttaacttgatttttcggcaggtgctagatgaaattggcgttgaagttgtctcacaggttggtattccattacttctagtctttgttgttattcggaacttgattcttcgtcctttaagctgattgtgaacacacttgaacttttgttagttgtcaacggctccaaaaggaagaattgcaacaaaaaatactggggatgctagcaggtaccttccttcctttctcattgaactttattgataactaattttgtgttcgtttggtacaccatattacatcgcatcacattatatagtattatattttttatataatggtatgtgtagtattgacttatatagcatataaatatacaatatggtaatataaatcaaaatttaacatataatacatctgtctaattcggcgtaccaaacaaactctttacttctttaggagctaaatagtaaattatcaatttcattttgtgacgaagtcattacacactatcttgaaacaaacttcctttttacttctattttctttgttttcttatttgcttttgtggttggtgaaaacccaacatgtcctggttgagcttgatcatatccaattgagatggccaaatgttcatcatctcgattaacaatcatattgatgtatgaatttacacttccttgcagttctggcattgatgagcttgagcagcggttagcagctctaagaaatccatgaactgaagaagattccaactcattttttcccccaaccttgtaatctgtcgatctaaattatgtgaggctgtactttgtacatagtttatggtgttaattcagatataccaattgttactggaaaatggaaataggaaaaagtccaagttcaatattttgttggatgcatgtaatgtaatataatgagatttggtttatgacttttctccaattggctctcaatagaattttccctgatttcattcactatttctcttttcttcttttcttttctcagctactagaatattactatatatatatatatatggaa

SEQ ID NO: 378585 - DNA, 4573 bp, Cannabis indica
atcaaaggacaccatatttagtacattctaaccaactaataaataaaagattatctctccaattttctatcttaaacttcttcaatttgatgattttttttagttattaataaaattcttatatttaaaatattttttattcataaccctcttccccttttaaacgtagtttaaataattgaactagagtgaaacattaaaattacatttatacccccaagaacaaaagaatgaagaaaaaacaaaacctagtaaatatttaatatagagattaatgtaacctattcaaaagagaacaaagaagttgaaagaatagaccccaactttaatgtgtcatatgttaatttcaatttttaatgccttgtgagtcgtgactaagaaaaacacttaaatttgattcaggtaatgaagtaaaataaaaaaaaattattcaattcttttgtcgatgttattttaaaatattataatgctacttttattctaattatatttttattctttcaaaccaaacaatatttattaaagactaattagtaattttttccccaaattttgacatataccaaatcgtgcccgtaaacttttttgaccgttaaaaattcctctgaactattgattttactgtttcagtgattgtttatgtactaaaccatgctccccaactttgatatctactaaatcatactcctcaaactttgatatgtactaaatcatgccccttgaactttcatccatgttaaaattttttaacggccaaaaaaattcaagaggcacgatttaatacatgtcaaagtttgggaagaaaaattactaattaatctttattaaaataattagagaaacataaaaatgttaaattttaatttaaaaaacaaaactcacttaaaaacacaaaacctgaagcattaaaatttaatatccccattcaagtaattttattttacataacatttggttaaacatccctgttctcattctcattcctcaaataaacgtcacttcaagtattagaatgtcattcccattcaaccgatattgaattatactaataatgatataacacttcgtgatcgtgttcgtgaccacaagaggcctataaattcccttagtaccaaagcaatgtaatataaaaaaacacccacatgaagaaaagaactttggtgaaaaagaaaaaagataagagcttcttcaagacacctttgtaagaaagaaaggaaaaacacacacaaacacagcttttgcacagaggaagaaaatccactccaaacaataaaattctgaaaatttgtctttgaaactaaaaaaagaaagtacaaagaaaacatggaaacaaaatttggaataatggtttttacttctacacacccaaaaacaggaatttggagcatatcccaaaattttgggggtcaagttcgatccattctaacaaacaccattcacctacaagaaaaagaagataataataataataatagtaatgattaaggcttccaaaataaatcttttgcctttataccacacctgatcagagtcaagagcaaaaatactttgatttaaaggagatcggcaacgtttgcaggcagctcttcgacaaccacattgtaaaacttctgaatatcgaacagcatcctttcgtcatccttggtcacaaagttaatggcaacaccctttctcccaaatcgtccactacgaccgatacgatggaggtagttttcgggctgtgttggaagatcgtagtttataacaagggaaacttgctgcacatcaataccacgagctaagagatcggtggtgatgaggactctagaggaacctgatcggaattctctcatgatgatgtccctagtgttctggtccatgtctccgtgggttgcagaaactgtgtgatctctgctacgcatcttgtctgtaagccaatcgacctttcgccttgtgttaacaaagataacactctgggtgattgccaatgtttcgtaaagatcacaaagtgtctcgagcttccattcctccttctccacgttgacgtgaaattgtttgataccctcgagggtgagctcatcacgtttcaccaagattctcacaggtttgttcatgaacttccttgtgatctcaagagcctcaggtggcatagtagcagagaacacaccgacctgaatcttcgatggtagcaactgaaagatgtcgtaaatctgcaaaaatacaaatcaaaattatcaacacgagtaatagcttgttaactaaataaaagactcgaaacatggtgatcacaaaaagataaagaaatttgagagctttataaacctgatccttgaaccctcgtgaaagcatttcatcagcttcatcaagaacaaacatcttaatgttatcagggcgaagagactgtctcctcaacatgtcaaaaacacgaccaggggtaccaacaacaacatgcacaccactggaaagaattcgttgatcttcacgaacactggtaccaccaacacaagcatgaaccttaacaccaagatagtcaccaagtgctcgcataaccttctcaatctgttgggcaagttctcgagtgggtgcaagaaccaaagcctggcattcaagtaagccatagtcaagttgctgcagaattccagagcagaaagtagctgtctttccagttccagactgtgcttgttgaatcacatcgagtcctttacaaaaggggacgatccctctctgctgaattgcagatggcttctcaaaacctaatatgaattatcaacttagatatacaatactaaatcatccaatgattccaatcacagacaatattatcgaaattcccctcataaaaataagatgcggtacataccataagcataaatgcctcttaggagattctcttgcaatcccataacatcgaaactatcatgaacctcatcatatgatgtaaagaaatcttgtccatcactacccagtctgttcccacaagtaaacaaagcattagttattgcataaaaccgaaaacgaaaggtaacgatacaaggagaaactcacaattcgctcatcttagaatcatactgacgagcatcaaattgagagccttccggagctaagcctgccatgactgaagaaaagcacataaaccatgtcaaactcaaaaactaaaacacacccaaaattcaattcatccaaaaaaactatacagcaaaaaagagaatcatgaattgataagcctaagcactgtacttctacatgtgaatgaacataagtctcttcaatactgagcatgattataacatacatgacaagtttcttctagtgttgttttaacaaactccaatccaaatccaaacaccatatcaattcaaagagcttaatctcaaaacaaaacattgaaactaaatttttatcagtataacatattccattaagaaaaaaacactgatcgatccaaatccaaatcaaaacacccagaaaaaaaaaataaacactattctctttccagatcaaaaatatatcaaaccaaaccaaaacaaaaaccccacacagaccaaatcttcaaacctaggttttctcccattaaaaacaaacccagatacaaaaaagcaaataaagccataaaaacaatcgatccagccctaaaactcaaattaaagctaaaactccatgaataagaagcaaaagagtaaaaaaaagagtgagattagatagtacctgatgaaagtgatagaatataaagattgaaaatttgtggttttggggtttagggttcgcttcccaaactccttggatctcgaatggattggatctctgggcgagaaatcggtggagttaagggaaggcaaacgcaggagaagaagaagagcagagtttgagtttgagaagggaaaagaggattagggaaatcctaaagatctcttttttatgcctttcacgtttctttttctaattaccaattttacccctcttacccttctttttgggttttcttccttacgacgtcgttttgtaatttccccccctaaatgataataataatatatgaatttattatttatgtgatttttttttagaattatctatatattattttttaattctttttttttaaaaaaaaaaatacgatttaggttactttggtaatttttatgtgggttgctatatagatttgacttgcaatttagattgcttcgttagttgctaggtgagctgctatgtggatttttataaaaatacaaaaaaaaattattttgaagtgttaaaataaaaaaaaaaatccaatttactatttatgagattttttttcttttttgaaataggttttttaaattctaaaacaaagtgtatgtttttttttttaaaacaaattgtatatttgctattatatatatataacataaattatttaaaaataatatatgatataaaagattttatttgtgttattagaaaaattccactttgaatttaaaaattttatttctcaaaatttaaataaagtaagtatataatataatatttttttaaaataatttttaaccaataactcttaaatgaaattaaaattagtctttaaacgttgttttttttttttttttacttg

SEQ ID NO: 378586 - DNA, 5006 bp, Cannabis indica
tttgctttaagtccaacaattattttttttctttcttttttataacatgatttttcttcttattgtcaattgatcgatataacattttgacccaccaacacttgattacatttaccatgttacattaaattaatagtacactattacacataattaattaataaagaaccataattgatcatgatcaagactaattaataacaaaaataataagactattgaggaatattattaatcctccttgaaaaaattttctgaccgggagcaaggatcgccttcgggtcgaaattaagtttcctctgaacaaatctcgaccactgatttccaaaatgtcttttccactctttctccgttcgataatgaggtaaatacaacttgaaatcaaaaccttttgcaaagcaataattaacaatgtctttattctgatcaattaatttatcaactgaaggaccttttgggtacgcagggctaaatcgtaataacgccaccaagtaaaatatttcaccatccggtaacacggtagatgtccgattatcccatctaaacaataattaaaaaaaaatcatattaattattattagaaaatgaaaagataaggttctcatttctttacaagtccttattaaacaatgcaagaaaaaaggataagatgacatgtcaccattctgatcaaagctcttcttttttcttagtattctatgatttgatttttccaattctttttttggtttagtattattttattttatttattttcacatcttcatataaatatatatatttttgtaaaaaaataaaaataaaaattaataataggacaatagagaagagtgatttggtatggaagccaagacaaaatataatgtcactataatcccgttggcgaataaatactcttgtcgttttattcccaagtccaaatgacgaaaatacccctcaccagctcattcaactctaacacccataacataaccggcataatctcacatcatccggagtagaggacagctactgaattgaccaatttacccttttccttaaacctttcttaattagtaaatttatatattttatttaatcacacctgcgggccccactgtatctttgtcccataaaataacattgcacaattagctattatagtgagcttaatattagcctccaatcacctattataaaagtaattaagactaatttggtacgcaaagatttattaaaaaacactattaatatcgaatttcatataatttaagaaaataattttttaaaaatattactaattaattgttgggcactactggtaccttataacaatatttttttatataatactatacaataaaaaagtgtaaatgaactcgaattgatttaaaatttaattttaaattaattttactaatgatgatataatattttaattaaacataattactagacaaattactaaacaaaaatctagcataatttaactacttcttgtactaaactaataagctttggcaattttctagtgagtttggtccactacggtagggtccaaaataatatggtacaacttttatttatttttttactctaactaaggtgggtcccactcaaagtagaaaatatttgacctaatatgaggaggatcttaacaaccaggattcagatagtgaaagtcaggtgagtgagtgactcaatgtacctgtggacccctgccccacatgcttaacacgtgtcgattttataggctcttagtattattgctcactcatatcagatgtggcactataattatttggcatgacaaaagttaatacagcattcatatttggcccagtacaattagttaagcatagtattaaattatatcatactccatactaaaatatattatagttatataatatatgaaagagtattatacaagtgtttttttaatatttctcaaagttaaaaaagtttatattagattaattaagtatagaatattatttttatatattttaatttaataagagtaattttttttgaaagtatttaataagagtaattagtgatataaatatttaaatgtttgagtttgtaaacattataaactcaatattttctttagcgctaatatagaatgtttgtgaaaaatgtaatttctcttcaattttatcagtaaacactcggtaattatcttaaacattatacatataagaaccagattccaaattacaagatttgtacgaaaacatgtaacatcagttactttcagatcttcttttcataaatttaaaatggagtcttactgatgaaactgaagaaaaattaaagttttataaatattaaatacttatttcacttataaactcaaaactttgaatatttatatcgttatttatcaatttaataactattataaaaccccttacttattcacaaaacaccacattatagttgtagtgaatgctactaatattaatagcaatttttatttgctaattactatgagaaatgtaattaagttaaagaaaatttatataaaatcactgtgtaaaacagtgattataactttattgcattttattcatatcgaatcattcttctacttttattattatccttaatcactaagtcccatgtatttaatattcaactaatcaaattcttaattttcacaaattaaataaaacaaaaacagtaaacataattaataattaattattaaaacttacttgctgcgaagtaaagggtagatcaacatgggcccaccaacgccttccttcaataagtttttgaacaccacgcgatcaaattctgccacgtcagatttcgacacgaacaagttcaaccacgggtgtggcgcgtcccacataccgttcgccttagcgtcttcctccgcacgcttcacacgtaacaagaattccatgtagctgaggtccacctggaactccaaccgttccacgaatcccagcctcgctagctgtcgagtcacagcctgcaaccaaggctattttagtcaattcaatcacaattacagattccagaaaatgatggctttttcagccaatttgtaggaacttgcggggaccattgcgtcagcaaaatcacaatgatccagctattgtgccggtataattaccattttacccttctctcgaattaaaattacgaaagtgaccttacgggaacaatgggagcgaagtacagtgccactttcgtaattaagaactatattttgggcttttaaatagccgtacttgtcagaaaatccaatcgaagatacattataccgtatagtcagtttcaaatttaattattattattatttaaaataataattaagcaaagtattagtcgggtcctccatcaacgaggtttaaacacgtgttattaagttcaagtttgattttgactttttcaccgtgcagtgggacccacttctttactgtcaaaatttcgtaatcgtctaggtcaaatcccgggtcgccgaatccaacggctaccaagttagggtgcaaattacaatttctggcacgaatgtacaggaatatagagagagatagaattagttaccgtatcaaccgttgaagggtggtcagtgttgttgtagtgaagagctaattcaagacagtagagaaccgatccggtacaccgtggaagaagattcgggtcaaattcttgggtcgggtgtaatggaaccgtgggtcgacccgttaatgggttatcattgtttgagaaaacgaaaccttccacgtaatcaaacgaatcgttttccgaccgagtcacaagaaactcagcgtcacgagtgaaatcttcgaactcagtatacactaatcttatccatctcacctaaaataatcataattaattaataattaaacgtaattttcttgcattaattagatttaattaaagaaattagttagtttagttaagtaccatatcaggagctggctgtagcaaaatcctagcccgagtaataatcccgaactgacccaacccacccaatgacccgaaaaatagatccgggttttcggattcggagcaaattagagtctcgcctttaccattaacgacttccaattccgttacgtttgacgtttgcggtccgtaacgaaaagcttgaccactaactccaccgttagataacgtcccaccgaccgttaaacttagataatcggtccaagaccttggagccaaaccaaactccaaacaccgtttcaaaacttcttcccataatgcccctcccgaaacgtcggcgtaagccgagccgacgtggatagagccggtggcgagagaacgcatatcgagtacgattccacgatcggccatcgcctgaccgttgatcgagtgaccgttaccgcgagccgcgacggtcagattcggcgaactcgacgcggctctaattagccgtgccacgtcttcggtgctggaaggtttcaagaaagctaaaggctcgacggaataaatgccgccgaaatctttgctggctgaaacggcggcggcggcgtcgattgttgatttgagttcgagagcattggaaatggtggaaacgtcgtcgtcttggttcgattcggcgtcgttttcgtggacgaatcgctctagataagctatcatctttgattttgagccgaaaagaagaagaagataatttttaaatttttatttaaaaaaaattgaaaaaataaaataaaattaaatttttttttttttaattgtattaaattaattgagtttaaaataattaaataaataaataggggagtgacgtcagcaagctaggttcgatatcctgtttgacgttttgaatcctatggacaacctctgtctgtccacttctatttttcaagtataattaattaattaattaattaattatttgttaatgcttaattaattcattgattatttctagggtgattaattcttaatttgtaaaattttggaaattttttttgggaaattttgattttttatgcttacatttggttaaaatttttttctaaacaaataataactaatatttgtaaaat

SEQ ID NO: 378587 - DNA, 1247 bp, Cannabis indica
atttatttattttaatttatataaatacaaattttgttggtattgttttggacaaaacataagcatataaaattggtaaaaaaaaaagacatatgaaagtgtatatgttccccccaacatattgagtatatacttttccaacattataaaccaaccaaccaaatgtacatatatatatatgaaattaattaatttgttcccaaacagcaactatagccagaaatgtaatcgacttgtctacgtccttcttcaatgaataaagttaaaaacaatgaaaaatcactcttcatttttccaatatataaatataacattatgttcatgatccctttttcctttatattttttttctagctactctttcaaaaatcttattaataataataaatggaccactcagaaaataatattgcaggcgatacaatgcacggctactgctatgaaaaattgctatcaaactgatgaatttggaagaaaatctgtggacttactgcatattcccatatcatatcattattaaattaatgtgtgtttgggtacagaaatatacttatgttgtctccccttcaaccaacggaccacaacccaataaaattaaatattttcaaaaataataatatcaataaatatccttatttatggatattagtgaccattcattcattaggtttgactgtatatgtatttgctgtttccacatattgtagctatacacacaaaaattcccatgtgggtagtgttcagaagaatcagtattttgtaagtttttttttttttttattatttatttgctattattaggaggagtggtgatctcttgtcctatagtctgatggggacgtattttgtttttgtttcttttttattaagttgaagtggaactgattaattaagtaactttagtttgaagtgtcatatatgtattaaattcaaacatttcttgattaatgtagttgcaaacaagagagggtggaattattgcaactattagtgacgtcctcatagaaaagagaaatgataaaaaatattatttgtccgtgttatatttttattagtgtaaataagtatcgagttttatataatttaagttaattagtaattttttttccctgaattttgacatgtattaaattgtgtccgctgaacttttttggctgttaaaaattttccccaaactattgagattgttaaatttaaggacttttgtctaacttcattcaattttactgtttcagtgattgtttatg

SEQ ID NO: 378588 - DNA, 5912 bp, Cannabis indica
tctttttgtatcagaaaagaataaaggggggtttcaagtttgtgtcttttcttttctctgatcatggcggttgctgagaatgcacaaaagtttgaggacaacaacactgtagtatcttctgtctctaatgggtcatcaaatgatgttgaaaatccaaaacccagaaatgattcttcaggggttttgagtgttgttgctgttgttgattctgctgctgctgatgatgatgatgatcagaattctcctgtcaagtttcaaagccaagagaaagttgctgcgaacccagctggtttttcagtcccaaagactcaaattgctcagatgcaaaatgggtttgagtccaatggggttgataataataataataataatcaacaacaacaacagatggtgatggttaactctggtggtggtggtgggtatgggattgatcacagttctaatggtgatgaaagctataaaaatgatatgagagatttggaggatttactgtctaagcttaatcccatggctgaggagtttgttcctccttctcttgccaaaaattctggatacccttttggtgctgcgtttggttatgctggaaatattttaatgcacattaacaactctgccaatgtaaatggatttcttgctaggaaggtatgttttgttttgcttttacaaattatgttttcttttctgtttaatttggtcgtttgtttcctgagaaaattgtatgactagaaagtagaatgataataactttggtatgttagcttaagaggttttggttctcatttctcagtgttcaaagttgataatattctaatgtttttgttcactgtttgacttaatagaagaatggctatactcaggggagaagaaggaattatcacaagttgagcccggcacaacgagatgcaatgattaggaggactgtttatgtatcagacattgatcaacaggttagtttttttcatttcatttggcttgtggttggttgttacattgttagatttctttccaacatgctttgggattattttgcattgaattaggtaaccgaagagaatctcgccgcgctctttcttaattgtggacaggtaaccttttcggttttgctggcatttacttgttttgtagataatgatgggattattttgtctgaatcttttgtcttgttactctcttaaaggtggttgattgtcgtgtttgcggtgatccaaactctatccttcgctttgcttttgtggaattcacagatgaaggtaatgttaattgaagtgtttaatcgatgcccattgctgtgtttttccgtttttaatggctttttatatgtttgtagatggtgcaagggctgctttgagtctttcgggaaccatgcttgggtattacccagtgagagtgcttccttccaaaacggcaatagctcctgttaacccaacatttttgccaagggtgagattgagaacgcataatttggcatggccttaatatgattgtagagtttagaattattttgaattcgtgtttaacatctgcttctttgactttgcactatgattttcagtcggatgatgaacgtgaaatgtgctctagaactatttattgtacaaatattgacaagaaggtaggactttaaatcacatttctgttttatgttacaagatgaaattttgttctatttggttctaattcttatgcttttccgattaggtcactcaggcagatgtgaaactgttctttgagtcactttgtggagaggtttgtaccgtatttttgagcaaaattcgttgctttcttttgtattacgaaatatgctcatgtttttctttttcctataggttcaacgcttgaggctgctcggggactatcaccattccacacgcattgctttcgttgagttcacaatggtaactatcgttgaaaactcatgctggttcaactctcttttcttattttaattttcttttgaaaatcttttcgttgtatgtacattaggtcatgttaaagaatattgaaagtaattacaaagatcatgttattgagatatcatctagagtatttatgatgctaattgcaataattgtcttgatatgtcatggcggaaaaaacagaaattttgcatgctttattattgattacgtacgtggtattcgggtaagcgttacaattttactttaggaattaatgacaatagttgcattttctttattttgtaattttatgccaacttatactccgagtcatttctattatatagaataaattgttcttgtgcctttcagaggcgccttgtgtagcttatatgtattttttatagcttatatcccaacccgagatttgaatcgggttttatccttcaataaatatggctttgatcacgccaatgaaagccattcgtggcttatacggttctggggtttcttaactcatttagttcacttctgtgcttgttgctgaatatgtttgatgaagttttgttgtcatgaaataataattaccatgttgttcgaataccgatgaaaattctgagtagcatttcattgaaacagatacatatgtatcttcaaaatatatgtttttgtggaaatagtcttgtagatcctatgagatttattcaactacattgaattccttgaccactttaacatcatcccgatcgtgtatctatcatttaattccagttctatatctaacgtccgaatggattcgaatgaatttgtattggaaatctttgttgataccgattatcactaaatgttataccgtttcttagtttgttatttcgaatttcgcaggctgaaagtgcaattgcagctcttaactgcagtggtgtggttcttggaactctgccgataaggttagtttagtataaagccaagccacccttctctttttaattttcggttttgaccaaattcgtgagtaaataatcccaatatttgcagggtaagcccgtcaaagacgcctgttcggccccgtgctcctcgtcctccattgcactgaagtgacccccctacccctactagccatgttgttcccttggactaatttcctgctgatagatatatttacatatatacatacatagatacacaatcttttaaggtacttgtggtgtttatctctatactttttcctctgaagtgctgctacccggtatcggttgttctttttatgtatggaggaggggttaaggataatttatggggtttctattttgttttagcatatatcatgtagatgatgatgatgatgatgatgatcaagagttggatgggaattttgaggtgccgaaatcgtttaatttattatgatcatgaaattattatcaggaggagaatggtactactggtgatgactgagataactgttttttctttctttcttaaccgttcgggatgttaacaacccgaaaaagaattcttatgaacaaccttttttcatgttattattgtctatctatatgtgtttatacttcttattgtgttcttcttcttcttctgcccttttgctatgttattatggtaaaaaattatggtctttgctatataaaaatatagataaatactctaataccccacaaaacttaatacattgtgttcttttgagttggttttcattcttgccatgaacccttttacatatttatatataagcaaatcaagtgtgttgagaatgagatgtagttccaagcaatggtgaagcagcatttactgttgttgttgctcctgcaaagaattgcagtgttagttattcttcttcaaaccatggaagatttttaagtgtgaaaaaaagttcaccttgggtggttttgggattgattgttgagaatggtaacaatggatgttgaagatgattttggtaccaagtgaagtagagttcattaggggaccctattacatattgagctggaaaatcttgtaattgcccattaacaccataactagcattgttgtaataataattcttcacaaacaaacacaaattcaaacacttgattcaaatgaaacttaaaaagaaagaatgaatgaaagtataaaaattactgaccagtgtataaatgtcttgctggtaatttgggtacctggtttagtgtttaatgaaacaaaaaacttagaaattagtacaagaagagtgtttattcatttgcacctatgcttattttggtactaatacaataataaaagaggaagtgaattatataagaatattacccataagctccataagggtatgcataaggttggcagttatatgttgagacacctaaagaattagaagctggtcttgccacacccattgttgatgatttcaccttccataaccctaaaaatccttaatcatgtttagtgaatataccatacacaaaaagtgtaatcatatttttgtaattagttgtgtttagtctaatttaatctatcatataacatatgcaaggttgaccctgagattgggtgaactttaagagaataaaattattaagccatttatttaaaatacatgtggtatttttaaaaatgagcccttcggtggttgggtaagtcgagcctaattcactttaattcaggttcagtttacatatgtataatgtcaaataagtaatttgtattgtgcacacaaactaacatgatattgtttaattggtcaacaatctaaaaaatttattattgctcgatgtttttcgtaagatatctaaaaagacaacaaaatcgagattcatactaaccgcgttgagcattgttgtaggattttgtgatgatgaggaccaaaagcagcaaggttacaattagctcttcttccatcaatgacagggtaaggattctcacaagcttttatagctgaatttggatccttaaatgtcacctaataattaacaacaacaacaatacatattcaaatttttctaatactcaagtatatattaatgttaaaaaaaaagagaaaggtgaaaagaagttacaaagccatagcctttggatctttgagtgtgtttatcagaaataacaacagcttcaacaatgtgaccaaactgatcaaaataggttttcatggagtctgtttgagttgcccaagccaaccctcctacaaatatctttctatatcttgtgtcaccttcttctacatctacttctgatgatgaacccaccaccatttccttcatttttctttctctatacatatacatataaaaatatatatatatatatttgtagaggttttgatcaaaacaacaaaaagggtaataataaagagaagaagatgaagaaatgagtgaaaccaaatcaagtattttgtttagtatataagtaataataataataatagtacttgaattttaatagtaacgtttggcattagattccacaataaaagataccttcaacgatgaaaataataataataataataataataataattactagatatattattatggttttggtaggatttgattatgaaagctattaaaattaaataaaataaaaaattagatcaaatgtggtagtgaaatattattattattatggttaataatgagtgggtaaatattattttgaaccctatgttttgtaaaaattattaattggacattcttattttgtaaaatgataaattggactgtattttctaaaatagtactaaaaatatcttgaattaatttttttgtcaaaataaaacttaataataacatgatattgaggtgttataacaaaattatttacgttttctacatttgttcgtgttaaaaattgagctcaaagtcttatttgtactattttaaaaaatacataatctttttttgtcatttaacaaagagaaatgctaaagggcacccatagtgcctaacacccttgtgaaatagaatattgctaggaaaatttacatggtatactaacttttgtcatttttttacaaaaata

SEQ ID NO: 378589 - DNA, 2979 bp, Cannabis indica
ggtatgatggtgttcatggtggtcaattcttctagaacaagtcctagtcctagtcctagcccaagtgctagtgctagtgctagttctagttctgatgatataacatgcaaagatgccattacaaaattgatgtcatgtacaggctacttatcaggctcggacccgccaacgccgagcgttagctgctgtttggcttgccaagacgtatttcaagcggccaacaccaccgcagtgcgcagagacctttgtgtgtgtttgaaggaagctgccattgagtataaaattgtccctgacagagctaaacagcttccccaactttgcaatcttcaaggccttgacgtaccccttgaccccagcgtcgactgcagcacgtacgtaatctaattctctctccacctcaattttgttttttcttatacaagtaagttatgcatttgtccttacaaaataatatatgcgtttcaattagagaagtgttatttcttagtgattctttttgttgtgattgtgcgcagaattaaactgtactaaaaagggtagagatgatggaagtgctattaatttggtggagaaaagatggccaaaatttgcccccaactatagctttcccttttgttatcctagttatgctttggaaaggctgtataaataaagggatgatttagatttcgatcttttgctcctttttaattttgctttatattttattttcatttacatgcttaataatgctggaaaagtcaaaatttggccttaatgtactttgttcagtagcaatgttaggtcttaatcaaacaatgaattctatttttgttagcaaaaaaataaaataaaataaaactggtcagataagtcatataaataatctcaaatgcccttgaattttatttacttatttgaaggaaacccttcattacttttacatcttgtaaacaaaactatgcattttgggccaagtaaagaaaaaagacacttcagattgtgaggccttctattcttttcttcttcttattccattctctttcttaattaagttctctggtaatagtcattattaccttcacaactttaatcaattgatgtttttaagcctcttcatccattatgaagtagttcaaactcaagatttcatgaagaattagcttaataaaggagtcctcttgtctgaacttcattgctcatgtgtttgacctttgaaccagatcaagatcaataagctgctggatttccaaaagagaaaaaagacatttttcaatcaaatactgtggtttttatgaggcagctttactctgttttaactttcaatttgtttgattaatatgcactgtcatgtctcaggaacccttgaattgtttaattttttgccaaactcaaatagctatgagctaattatttatatatatacactaaaattgtatctagtcttattgtgtatcatgagatttaaggcctaaaagaaatttgcaaaattttcaagtaaatcactctagtacaaaatgtcaaacaaaaggggagaaagaagtataatttagcagagtacatattttaaaaattgacatgtaaatcattatacatgatatagatatataccacttagaagatttaagaaataccaattgtcttattgagtagccaaagcaaaagagcaagttgaatcccaaaaatggagtgaagccatgttctgtccagcatgaatccaaacactgtaattcctgctttgttattctccaaatacgtcactgcaacaaaacacacacatatcatcaaacacatacataggatagaataggccttgctggtataaatatatacatataattcacattacactaacctaaagcttgccgtttgtgaaatgatatggtgtgagtgaaaattgggaccaacttggtgtcgttcaaatcatcatcatcatctccactccctgattcctcatccgatccatactcgccccctataggaaaaacttgacccgaagaaagttgggctgctgtcatggccgaagttggagtctcctcatccaaagaatcaaaggagttgacagtagcacatacatgccattttgcagccaaccctgtgagtgactgagccttgtgacttactttagtcgcgctacgcaggcatacgtaaagccctgtcactatgcttgtagagcatatctgcgtgccaccaaaacagaacaatatgatttgagtgagatcactagacagtattttatttgctaaaagaaaaaagagaaggaattatttatattaccgcaagttctccagctttgaaaacgttgacatgagaacttgacttggttaccatgagcagagcaatgagttgacttaaagtgactaaaaggagagagaacaagatgaagagtctatatctatggctaatggtccggagatttcttctgatgctgaggtgttcgattaggataagacccacttcagtttccttctgaaaaactcgtgcaaaatcttctagtcttagtatttgaagataacagataaggcggaagagaacacagacaaggaaaattagtgtgattcgatatagccatgaaaagagctccaacatgcagaaaagtgtctcgcttagaacgaggttgccgaaatatgggatttcctgtgcgcctgagacgtaccaccatattttgtatgcaaactcagcagcagagtacaaaaggatgatcgctaccagaaacttcagagattccttcacaaagaacaacaaaaataatttcagataacaaataaaaaacaacaagaaaaataatgaaaaaaaaaaaaaaaaaaaaaatgtcatgaaaaattattcttttgtgaaaaaactgtagataaattatattttttttttttgtgtagttcaatcctccgcgaatgtttgatcaaattcaactatatgggtattagaaagtctacagtatatgttacgggaagtcttatatgtttttctttttttttttaccaaaaaataaaaataaaaaat

SEQ ID NO: 378590 - DNA, 2751 bp, Cannabis indica
attgtcacactcaacagtgtggtgggcattttggtgcttctaggacgaaaactaaagtattgcaaagtggtttctacaagccttctttgtttaaagatacgaatatttttgtcaaggcttgtgattgttgtcaacgaactagtaatatctcaagaagaaataaaatgcctttatacatagaattcttgaagtgaaactttttaatatttggagcattgatttcgtggggccttttccacaatcttataatgatgaatacattcttctagaagtagactatgtatctaaatgggtggaagctacaactaaggttattcgtggtacgggtggtgcagtttttgattatttttttaaaccaacatgcacatctggtttttctaatttcccaaaccgcacccgcactacaaactaaaaaactgttttagagtttaattgcaaagtttatgaaaaattgataatatactttgcaaatgcaatattttagattttttatatgcttgactagggttaggagtttgttaatttaaattggatagaactccttgaggacttgtgctttgaaaaataatttagacaatttttggaatgtttgtgcacttcaagcctactatttcataatttttttctagtttacccttttggagctttgacttgtttatttttattttccacatttttttaagttaaaaattactcaattattgtcttcccttatccttaattataacataagtttaggaaaaattgtaattggataatttagatgtgatatgtggaaaaaattaaagtaagacaaattgagagaatataaataatgtgttgaatgagttgagttacaacatcttcaaacaaagaaaaaaaaattgtgtttagagttgtttcactaatgtgagtattaattagttttctcatctttgtttcaaaaagaaaagggattgagatagtaatgtaatgtatattgggggtggcttggaatgttaagcttgtagtatggttgaatctaaatggtatttttatctactttttacctaaacttaccggttaaagtacttttgattttgattttgattttgattttgaagtacgtgttattgacattagtaaaaaatgttaaatgatggaagtctattgaaaattgatttgtggatatagttagtttgagttgattatatggagtccaattattgtagttatatacgaattatattgttaatttttttaattgagcattaaggttaaatattttaaagcagttagactgaaattctacctaatgttgcaatttaaatgttaagagtaatgacaaaacagtcagattttaatagtggcttattaacttaaagtcttccactaattccatcatgattggtaagtaattctaatcattagtttttttttgttttaaaaaattggtgtagaagtatagtcatagtatatttatattttggttattatctatatatcaaacatttttattgtaataatgttgtgcatgtggcgttgtggtttagggaagtcaaaggtgaaagagtaaaaaaaaggttggtcaacgtagtttagaaaaatcggcgagtagtgagagatattagcgccatatttgtgggaccaaccaactgtcggtctcattgccagctctttgcaacttattacttatgccttacttttccccaaaaccacaccaaaaataaaccttctttttcctactcatttccacttttacccttccctattttcagaatcatatcaccaagaaaatcaaaatttgttttttatttatttacaagccaaaatttgtgtattttggtctaattaattttttaaggcaaagtacttgttaggctaaaaattattgtccacgcactgacacagaccagaatgataatcttaggtttaattttcatcttaataaatattcacaactaaattccaaaaatattttaccaaaaaaagttccaaaaatacaatatatataattttaatagcaaataaaaaagtgtgtatccttttaaaagaaattttagtataagagataaatatgtattttgtttcctcttttgagtgaaagttaaaaaaaaaattaataattcaaccgaaaaaaaattaaaaacagaattaaagttcacaaatctcacattggagatgataattaaacataacatgaacaaagccaataatacaggacatgatttttctttatcaaatgtttgtagatatatagatattctataataaatttgtgaatagataaaataaaatgtttttgttaaaaaagaaaaaagcaaaaagatctattttagatcaagtagaggctaatctatgataaatttaatgagatgtagattttttttttgtaaggttaattaatgagatgttgtagattattatcaaatttattgacttaattattttgtaaaaaacctaatcattactgatctctcttccacaataagaaatgactttatatgcctaaaatttacaaaatgaatcacaacaaaatttgtgaagtatcttaaaccagttaattatatatcatcaaatcttatataaatataatacgagaaatgttttgaaaggatataatggtagccaaaattatcttcaagtgtgaattattattagtatataagtttttggatggtgatatttattggatgttagaaatcttacatattttttctgttgccggaaatgatttctaatgtataataataataataattttttttataaataagataaatgctaattagg

SEQ ID NO: 378591 - DNA, 3300 bp, Cannabis indica
aaaaaaaaaaaaaaaaaaaaaaaaaaagaagagcaatgatcaaagcactacttcaacatcatgaggtgcttacaataaacttttaaaaccaaaatcgtgatgaaattaatctttcttatgaatccaaaattgataaatatttttaatgcaaagataaacttacattgatgccgataatcgatggcctccacgaggggaagaacccattgctcccctcatttagtgtagtcaatcaatagtaagtttacagaaccgtttcctattatgaagagagaattaagaaaactctgagaagcttaaaaatgaaaatatgataagatataataagatttgatgaatcaaatggcagaagtaaaacaatgttaacaagcctcttgatattgaaatatagcataactgaaaaaactatgaattggtggaaaagctttaggaaagacatcataataaaagtttgcataaacagagaagagagagagagaggatcatacctgtaaactcttgaggtagctaatgaagaagggtgtgagagatagacaggttgataatataataaatcaaaaagttaagagtacagaaacgtctattataatttactttccacaatagaacttcactctcaatttctaaactatctcccttctgtcaccaactttttattttttatttttccttcttatttaataatctcttaatatatatttgttttttgttcaatagttgtttacttgactgttacatttcatatacacaattttctatttatttatttgttttaatttgttatttctaattgtttgttgaaagttgaattagttgacacttatatattagatgagtcatcagccataactcttccagatttagccttgatatcataaggaaattatacttgaagaaacttaaataattaggtttatggttcatattatatatagtaatgattaatgattaactaatttcattttaaagtggtgttgaacagaaattttctgggtttaagaagaaacttaactttcattcaagtctttttagggtaatattgactcttaagcatacaccaagaatggagatcaacataaaacactcggtagagtttgtacaaatatgtataattaggtagataactgtaccaaatggaatagtaggaataaaggttccatttaacagcattgacaattttgattatataataataagagttgactacataaatactcatattaggttcaaattaacaaacattttaattagttaaaacaacacaatatttgtaataaacaaatttgattaatttgatataacagtaagggttgactctattaatactcatattaggttgaaatttacaaacaaaatatttgtaataaattatagaatctctaatggagtagtaatatagtgatgtattggatatcttaatagggttattaaaaaaaatacaaaccgaccatctaactaaaccgttcaaataaaccgaataaatcgataaaacacacaatatataaaccgcgcaataaatatattagatgtattgaaaattattctaagccttaatccgaataaatcgatttctatatttttttttttaaaaaaaaaaaacgtacgtggacatcaatgtttgacatgtgacacgaaggatgacatcacggagttgagtagacccgagtcatagcagtcgaccttagaggggaccgtagccttgcgcccaagttaactttaaaatctctaggatgaaacttcagactttaataacttgaatccagcccactatcttttagtattttgtaccatgaagacatggagcaatctaatccaagtcccaagagctgaaattacacaaacttgtaacccaaaatccaacctgggcacctagggtttcacccagcgcccaagttgacatcctcaactggggttttagtttttgagactatcttagtgcaaaagggtcaaaacttgcattggcacatcagctagacataccacggacatatttgaggcattagaatcatattcaaagaaagttaatttttgagcgtccaggggcctagggtcctaggctcctagtgccaaggttaacaatctgttaatttgggcaccttccaagtatctatcgtagatcttacttttgcatcttcttcgtcttcattaaaagcggggaaatatgtcttttcggaggaaaacaacaattcttgggtataaatatcagggcccaatacccacattaatacttggggctggccctacgcctaggttgacattttgtcaacttgggccattttaaatagagttttcaggaattctttagagcatcttctttgtttttaaaaaaatgttgagattcaactatttttggggatgaaacgaaatttccaaaagggcaaaaagggggacccagtgcgtaggttgacacttggggctgggccttgcacccaggctgacatattgtcaacttgggctgttctgatcaagtccaacaaaatgttccgagcattttttccgtaattagaaatcacgaagattcaagaaatctcggagagaaaatcacaatcccgagtcccaagaaatagggcctagcgcccaggttgacctaaggctgggcccgacgcccaggttgacaatcaatctgggacgctgtcttcaattgctcaaatgtcaaatccaatacatcgattgaatctgaaatggtcaaaatagggtaggagacctcgtcctcaagttcagaagccttggaagtatcaaaaacaaaatcctaggagctcgggagtatgtacctagggcccaggttgacaaaaggcatggtgcgttggaatctgcttattcgaatctaatgtcgttttgatcgtccgtctagcttttcacaatgacaataatcaataaagtcagagaaatcaaattcacaattttgcatttatcattttcagctcacccggaaatgaagagtttcaagtctctcatatgtcacatgggcgctcagtcatgaattgtcttcactaagtcataactcactaaatttttttccaattgacgcgattgaacttgtgtttcgaagcaaattcaatgttctatcaagtcatgtttcccactgtagacgttattttgaagctatcatcattaaaatttaccccaagggagttacaaaaataacctccacgttacccgcaatgggaccctccaggctccaaaaaatagtcatcaccaccaagagctaatttttaccgttagataatcatcaacggtcagaaacctcttatttatatctttctcttatttttgtgggcctccttcacctataaaaggaga

SEQ ID NO: 378592 - DNA, 5619 bp, Cannabis indica
agctataataataacaaaatgagctgaccaaaccagagtggattattttgattgtgacagtagtcaatatatagtcttaatagttaataatggctgtggaaatagaaaagaagaagttgaacttcacataagaatcttaacattgtacaataagaaaaaaaaaaagaataattatatgaatcaaaactactaatctagttagtgccttgagggtcccaatgtttgtttggtcactttcctttatattccttttatcatgcaacaaatataattggaccttaagggtcaaatatatattgaaactaggattccggcctaaccctacaatatttgcgaactaagaaactgtaacaattgttattttgtagacgagtttactataacaattgttatgtaggtacctaacagggcctcgaaactcagaccttgttgaagcaaaccacatgcctgaccgtttgattaaaccgtatatgtgtgtgtgactattatgaatcgttatgtaggtacctaactaacagggtctcgaacctcaaaccttgtaagagcaaactacatgcttgaccatttgagtaaactatatatgtgtgtgtatgactattatgaatcgttatgtaggtatctaactaacagggcgacgaatttcaaactttgtaagagcaaaccacatgcctgaccatttgagtaaaccatatatgtgtgtgactattatgcttttgagaatttaaggaacagatcatggcatgttaattactgtaacttttttcatgtgctcatatcaataggtgtagattatgtaatatagacatgtacctaatgaggctcaaattgactttgctacacattgcacttactcatgactattcagaagtacttttattaagtagagtttaaaaagttgatggagaaaagatatggtgtgtgtatatacaagataccagaagctaatataataaacttgttaaagtggaacttcttaaatgtttagaattttctataaaaagttgtctatgataaagatatttgaagtacaatcaatgtgttgttttgtttaatgttattctctaaattcttatttgttgttgagttttgatcactgtgttttgaaggtttattagatgattttcagattgattttaaagcaattggagagctagacctgagaaaaagcatcataactccacgaaatcaagtttcgcgagtctagaatgctattaaagggaatttcaagattcggcgtcgcaatgccagagtgcaattatcgaatacatgaaaaatcgaccacttgaaaagttgaccaccaagagaaacagcttgagcggtcaaccatgtggtttgttcccacaaagtctgaaatttgagtctaaatctatttgtagttgagttttgatcactgtgttttgaaggtttattaggtgattttcagattgattttaaagcaattggagagctagacctgtcaaaaagcatcataacaccacgaaaacaagtttcgcggtgctagaatgcgattaaagggaatttcgagactcagcatcgcaatcccagagtgcaattatcgaatacatgaaaaatcgaccacatgagagatgtagctcgagcggtcaaccatgtagtttgttcccacaaagtctgaagattgagtccctcctaagcatcaacatagtaattgatataaaatgttttgatcccaatatattataggaaaagtaatgtaaatagccattagatactaagtaaaccttatacaatcaaatggccttgcattgatagattcttcaaagctattgttaggtatcgggttctcttcgagacaggacaaattttcgaaatgcattctttgagacaatttcaatctcccaattgaactaaaattctgttttctcaatccatattacacaataactatacaattacatatttatagacttttacactattttcaatttactaataagcccctacactatttcatagtgtaacagctgtactcttattttacgctatgaaaaaaaataagaaaaaggaaggaacctttcctagctcatacacattttctgaaaaacataaatacattgatatcgattttctaactagatagaaaaattaaaattttgtactcaaaagtaatcaaattcttctagctttcacatatacaaagctacaatatatggaccaagaggaaacaaaataagtgagtgagaaattccacattcaacaagttacaatttataacaaagcccagcacaaaaggcaacaaacattttatgtttaactacattcaactaaatttccctatgatctcagtgttgttgttgttgtaagattacttctactcctctccactgtgttgtttcctctcttttcttttttctaaaagaacattttactagttagtctgttttcgtatgatgcaatgtgcgacgtacaagtacaaataagaacgatgccgccattccaataaggtatccagatatagctccataactcacacatataggccattcctacaggttaacataccatttcagaccttaacaaatcacataaactaaacaaactatgaatagaaaataaccttgtctttatgtgtgtgtagtgtcctacaatattttattgattaactatgtaaacgaaaaatctcctaaactacaacccttttagagttttgctcctgaacttttttttgttccaaaaattctccgaactatacagattgttgcaaatattcccctacaattaaattctgctcgttttttaaaacaattcgcttatatggcttagaacttaaaactacccaaaattcaatttagtgacatacaacaacagaatgtaagtaaaaggaaatatttgaaacgattttaatacttcagggaaaaaattttgcaacaaaaaaaaggtttagaggcaactctacaaagtcataatttgggggagacaaatcttatttattctattttatttatacttaaaagtcttgcaaactcacttacttaagcccaacttcgaaatttgccaaatcctacaatacttatgaagtggaaaactatagcagttactatcataccatgcgagattgtaaatcacaagtctgaccatttgagctaccccgcttgttattttcacacacatgtataaaaactcgattatagcatgcgtacctgccaaggcctttcccagtcaagtggcataggccaagccccaaaccatgctccaattacagctccatgtgctggtaaacaaatcatataatctataggtccaactggtctgcatattcatagattaaattttatgtcagcagcaaatagcagaagaaaattctctaaatgcaaaggcaattgccggttagcaagaaactgattcgtgtaaaaatgaccgagcaagtcgcatagtactaaatatgagatgaaactcactttgtattagcaaatatgcgctgccaatctgtccacgatgaaccaaacaccgaagctgcgggcacaacctgtaaaacaaaagatttttactagatgtatcgaaagccaacatgtaatgtctcatcttgaaacattattttgaatacatatcatgatcaaaagaatatcgagtaattatgtaccgtgaacaatgacatcattatagaccaattaacagtcttcgaaatatacctacatcaagaaagacaatcataacacagcttttgataacaaaagaaagaactaagtaacacacagatcaaatgaaagaccaggaagcttttctgcctctataatttgaagcataacaaaaatcagtgttgagagaggacaccactattaaatacttaagccaaaacttcagagcaaatttgctaaacttcaggacaaggctcaaatccttcaaatatataattgaccaaatctagataataatgggttgaaagaaagttgtgaacttattaacattccaatctcaactgtgatttcctacaatcaaatcatggataagctaatcactaaaaagaatagcatgccaagcttgtaagttacatacttttcgcctatcggtgcgcccaaagcaatggctacaaaagcattaaccagagcccctacagagtaaacaacacaaagcttacaatttacaacaaaaaacagaaaggcagaaacataaatgtatgaacaaatagacagcatacttccatgaatatcatgaagaagaacaacaacaaaaaatgtatgaactttcatgaatatctgaatccaaactaaaaaaagaacattgtagaacaacttcttctcatattttctttaatttgaacttgtaacaagattattataatagtaatgaagctacacataataagcaatatgaagaatgttttgtaaaaatagactttattagcgaaataactttacaaaaattttattagaaagataaccatgtgtgacataaattagactctgcggccataaaaagactatcattgtgacagtcagtagtctcgtgatccgtaaaaggaaataccaggtaagctatgcaattccatatcgcccgggaaatatcaagtaggcttaaatggattaattggtactatctatatcaacaaagtacatcttgttttctgatagcccattacgaaaaaactatgatgggtgaccttacaaattttactatttaagattgttagtttgtcgaattccaccaatatgaatcaaatttcttttacatatttttgtccaatatgtaatgtgagaaaaccatagataaaaacatgaacaacattaacatcaataacatatcataattaacataatttagaaatgaaatgattatatgaactaaccagcaaaaattcctacaatgccacgcaaaacagctctgaagaactgcacaaccaataatgaacactcaactttaacttcaaaaatcaaaactttctgccattttccaacattttcccaataaccaaacactaaaacagaaagctcaccgaacattgttgacgattctgtctaaaacgactgtagagaataatcacaattgggcattgaatcacctttaaacaaaaaaaaatagagtaagaacagaacaaaaaaaacaaaacctaattaaaatcaaattgagaggaaaggtactaacccagatcaggaggagggtttgggaagggtgagaaatgagagtgatgaagtgaagatatttagtcagagaaatggatatggctattccaatggcgcaaatcaaatggactagagcaatctccgaagtagatggtgatggtgattgaggtggtgaggtgttaacaatggcgggtttgggtttctggttctccatagctaagtttctttcttccaccattaccaccatgtgagggagaagactgagacagaggtgaggtagtcatattgggcctaatgggctttatttttgggcttgtatgggccttgtttagataaatatttagcacaaaaaataattttgtggtaaatttacactaaattttagctttgtgctccaatgcacaattgcaaaattttgatgtaatttcctcaatttaatatctaattaatgttttattaaaaaaaatctaataactttataatcaatttaattgttattttaatatgtaagacaataaaaaaataatataaatattttataatt

SEQ ID NO: 378593 - DNA, 3164 bp, Cannabis indica
ttaaaaaaatataaaatttaattatcaaattttataaaaacggcgcaaagcgtggtattgtttcctagttattgaataaccaaattgatcaaagaagatacatgcctttatataggctaataggagaatggaaaacttaactactataattaatttaaccgtgatttacaaactaagataactctaataatctgcattatgatatatatgcagcatatactactaaaaatagacattcgcgtaatattacgtaggacaaaaaaataaaaaaaaataaatactaatgccttgtcttttgacatgttttgagagtatcttgttttttgttctttgtgtgtcttggtttttctgttatggcttcgagtagtcatcaagatggtgattggatggatcagtatgcacagttacaaatagaggaggaagaggagggagctctgattactgacgatcaggaaggtgatgtcaaagcttttgatgataggtggtgtttggttagaaatatctcactaatagaatgatcgattttgacgctctgaggcatatgtttgcttctctttggcagcctggtaaaggagtctatattaaagaactggatactaatcgctacctttttcaattctatcttgaacttgatgttcaagctattattgatgggagtccatggactttcaataggatgtaacttgtgtttcatcgcttaaagagaggggaggatcctagattggttcaattgcatgagttggatatgtgggttcgcgacatgacttaaaatatggttttatgtcagattgggttgttaggcatgctgggaatcacattggaaagttcatcaaatcggatccgaaaaattttataggcatatggcgtgattatctttgagtgcgggttacaattgacatcaataaaccgttgaagcgacgtatgaaactgattaaacaagatggaatttggatttagactacatttaaatatgaacatgttccaacattctgttttatatgtggatttattggtcattcagataagtttttccctcggcagttcgatccacacttttatcaggatattaaaccttatggggagtggatgaaagctatcactaagaagaataactatctcattggggctcaatggctacgttcaagttgtgaggaagatgatggctcggctgttggcagtggaaggcaccggagtaaggcggaggcgatggaagtaaatcctcctacaatgatgcgatttgatagagggaatttaggagcaaataagggagtgaatcaagtcaccaatactggagagaatcaagggaaggctatcatagaccataatggaaataatgataatgacgaattgcaagtggaaagtcaaaatgatgattctgtgcttattttagataataaaaggagacgtactgataaggaaataatgaaggagtctgttgatttgggagatagcaatatgggccatatggagaattcagatgctacttcaaaaaacgatttgcaggtgggccttggtgttcaggcccaccaatcatcatgggtatattgtattggaattgccatgggctattcaattcattaaggatttagttatccgaaagcatcccaaagttgtgtttctttgtgaaactttgtctaaagctgaggtattggaaaagattcgtgtggcattgggttttgagggtgtgttttctgttgatgttagggggaaaagtggtggtgtagctatgctttggcgtgagagcaatgatgttaagttactttgttaagggatgaattttattgatgtttcaatttctgggaatgatgggaaacaatgggatctcactggcctctatggagagccaaaccgaagtctcaggaaaaatacttgggatcaaattcgggttcttaagaacaagagttctctgccatggtgtgttgttggagacctcaataatgtcacttctctatcggataaaaggggtggtaatccctatcccaattggcttattgaaggctttggtaacatgttggaagagtgtagtttgtgtgatatggatttgtgtggatatccctatatgtgggagaaaggcaggggtactagtgcttggattgaagtctggattgatcgagtgttagtctctcagagttggcttgatttttttccacttgctaagctcattaatttagaggtttcaacatcacatcattgctcgatacaactggttcttgatgtagagaagagaactgtgtctcaaaagcagtttcggttcgaaaatctctggctttgtgagcctgcttgtttacagcttgtaaaggacacctgggaactttttttgggcttttctgttatagagaaaatcatttattgtggggagaagttgctggtgtgggggaaagactacataaggaattttagagagcgaattcaagcctgtaaaactgagatgcgtaggtggaaagaaggcagggatgctgcatctgttgaatagaaaaatgcggaggctcggctacaagaagtgttgattcaaaaagaaattttttggtgaaaaagatcgaaataactatggctaaaggagggggatcagaattctaagtattttcatgctatggccacttcaagaagaaggaataattcaatccagaagctgaaaaatgatcaaggtgtatggattgattggaagaataacttggttagccttatggttgattatttcagcaatctttttacttcatcctccctgaagtttaatgaagtgactgatactattcctggaaccaattactaatgttgaagttcgaagagctctgtttcaaatgcacccagataagtctcctaggccagatggtatgacacttggattctttcaaaaatgttggacagtggtgggtgatgatattatctcgcaagtcaggatgttttttgatacaggttacttctctcctatgctcaatgaaactaatattgttctcaacctaagaagaaaaaaacctgagtccatgatggatttgcgtcctatttttccttataatgttgcttataagatcatatctaaggttcttgtaaatagactgaaggttggtttgccttgtgtgatctcacaaactcagagtgcttttgttcaagggaggttaatttctgacaatattatgatctcttttgagataatgcactacctaaaa

SEQ ID NO: 378594 - DNA, 1799 bp, Cannabis indica
tgcattgcttggtggctatgaaatctaatttcctttctttatctttagcttatgttatcttgcctttctttatctttagcttatgttatcttctttctttttgtgttttccagatacaagataacatcaatcttttctgtcaaagtcgggacaacatcttcaagattctaaacgagtatgttgtcattcacaatttcttgttaggttctattttttttttacaagcatatgttcattctgtgtttatttttgtttggctgctttgcatcttgttcgtttatctgccaaattgccattataaagttgaggacaaagtgcaatattagtttgtcactttcttgtacctgttctttcagcaagttaaatttccgtggatctttgcatgtgtttggaagaatttgagcttaccaagtgtatttggaggcttattttgttagttagatgcattatattcttgattcatgctgagctttttgtcttctctctgtctgtaacaactatgcttatcatataaatcctggctctgtctattactactttgcagatttaaagacttccccgaggtaatgaagcagatgccaccacttcctgtgaaactgaacgaagagctagctaacaccatcctcccccgaacaaacaattcaatgcaatcatgatccagctgctcgatctttgtcggggcacttctaattagtttcgtaaaacagacatctggtgggtacccccaatttaaatcacaacgtcgatcagataattacgaagtaactctcaacagagttgacccaaaattgcttttaccatacagatgtctcttcctttttcaatgtctttctgcgtttaatgtttggtttcttttctttctttagtttcatagtgggcatatgactcagttgtactgtgtagaaagtagggaaggatataattttttttttcttctttttagctattcatggtaataaatagggaatggagaagtgaaatagtttaataaggcatttcatttcaattggttctgttctatagattgtgctttctattctctcatgtggatactaagcagtaatgcaataaggtttcccaagtgtgaatagttctttgacactaattttattattctctattttgaagcattgaacaatttgtgcacaaaggagtattgattactattccacaaaatgaccttaatgatactcatattagtaaatatatgagcacatttgtatgtgctcattacaatgtacttggggactataagtcccttttagaaattgcaatgaggtttcgctataatatctctagtcttttttcttttagtatggaaactcatattctttaaaaaaggatatttacagcataaatactatatgttttaagttttatacatttaaatatcatatgttttcttttaacggattaaatactttatgttatatttgtattactttcgttactacttttctgttaaatataccaaaatttgatttatatgccacatgttaatctgctattagtctaaataatagtattttttttttaaaaaaatatttattaatttttaattaaaaaataagtataaaaattaaaaaacaaacatagttataattaaaattagaaaaagaaataagaaaaaaaaatcatcttctacgctatattgcttcttcttcttattagggttgttcatccgatccaatccgcacttttttggtcaaacaacatccaatccgcactaagtgcggatttcattttttggatccaatccaatccgcacaatagctcaaatccaatccaatccaatccgc

SEQ ID NO: 378595 - DNA, 2740 bp, Cannabis indica
ttttgttttgttttttaatttatgtattatctgaaaaacgttcactgtttgtgctttcgatttagtgtaattaggctatgattctttgatatattgtttggattgaaaagttacttttaacttaggttgtggattaagatctatttgctttcggtttagatccgttgaccggttttgggtcaaaattagggtaacaaatttctggatgagaatcagaattttgataaaattcggtggaacaattattatatatgtctgttaattggaagaatctggttcaaatcttcaaagcgtaaaagatttacgaagtttagatacttactttaggggaattgcttcggatgattgcccgaattggtatgttgttttttagaatttggggataagtattttagattactttagctcccttatttgcgatgctctggacgaagtcacctatgggttatggaacttaagctgtttgtggtgcttaaccactgcgaaatcatttgtcagatttaatgatcattagttgtggaccttttgacgtaaaattcttatttcttacctctggtgatctcatacatgcagtgactatctgtttaagcttttgcttattggagattctggtgtcggtaaatcatgtctacttctgaggtttgctgtaagtttctttgccttttctcttttgggatataaaacttatttgtgttgcatttaaaaaggagatatatttggcaaaatgctctgtgatggtcgaacatgtgctatgctatgtgtttgaagttagtatagttcacggtcatttggtttttgcgttgttgatgaacgtctggtgttcttataaatattatatggaagatcattcagtatagttcttatctgactttcatgttttggcattataggatgattcatacctggacagctacatcagcactattggggttgattttgtaagttgttatttctgtacaatactatgttacatatctaatactaatatctttaatataggcgtctctaactctctatttctttttcctttcctagaaaatcagaactgtggaacaggatgggaagaccattaaacttcaaattgtaagtaaacgaatttcctcattgcgtgttgcttttatgatcatgatgctattatctatctcactgcatttgcctgatgtttaaagcttgtcaaatgttttaaagaataatatatctgttacttttgttgtaatgtaatcacattccttcatccaatattcttttatgaatttgtgatgcatttctctgttgcgattgctaattgtcattcctgccgtttggatatgcagtgggacactgctggccaagaacgtttcaggacaatcaccaacagttactaccatggggctcatggcattattgtaagtacattatttctctttttgttattttgtgtgtgcctttctagatatggcccatgttggtattcccctgtacaactttattttatgttaattggccgcttttgttcaggttgtctatgatgtcacagaccaagagagcttcaataatgtcaagcaatggttgaatgaaattgatcgctacgcaagtgaaaatgtgaacaagcttctagttggaaacaagagcgatcttacagcaaacaaagtagtatcctatgagactgctaaggtaaatctaaataagattttgttatattatgctgtgagtggtggtcgagaacagacattgaccatttaatcattgttcaggcattcgctgatgaaattggaatcccattcatggaaactagtgccaagaatgcaacaaatgtagagcaagctttcatggccatggctgctgaaattaagaacaggtaatcatgattgatattttgccttttgtcccattttctttttctcttccaactcaactgttcttacatatcattatcatacaggatggctagccagcccgttaacaatgcgaggccaccaacggtccagatccgaggacagcccgtgaaccagaagtccggttgctgctcgtcttaaatggaaatagtagtggtggtggtggtgggaatgatgttaattcgtgtttccatggcatgtaaaactagttccttatcttaaatgctttgatataaaagataattgtctctcatgatttctcttttttttacttcttttcctttctcagttgtcagtactttgttaaatctaccattcttttcaatgtattttgattttggtaaaacatttctgtacaaattggtggatagcagtatttgcccccctctcttattatgctcctattatttgtcacattttatccaaatcagtgttctaatttacatttgtctttacttgcctaatttcaatttgtttcattaaataaatcgatctaatctataatattattagtatctcccaatagttatctatccaaaggcactatggatccgatataattaaggagtgttgttaatagtattgtgtttcgtgtacgtcaggattgagctatttattttaaagtaaactatcatttatgattgatttaaaatttatatattatttaaaaaaaaaataatacttttttgtattgcttctcattaatctttaagttgttttgaaagattattatatattaattcatgttgtaactcgttgagtgatatgtgtaactttttaaagttatgtttaagtatagttacaattatacccttttactttttattaataattaaaatgtattatctcatttacttatttttttt

SEQ ID NO: 378596 - DNA, 3159 bp, Cannabis indica
ttttttccctataatttaccttgaagagcaagaaaaaaatgtataatatttggaaatagtgttcaaggttagacgaatttaccttgaggagctattggctatatatagtagtaagctatatatttttatataattaatttaatataatccaacaaattaataatatggatggtttagattgtcaaagggtacagtttcatacgatcgatctagtactgtttcattgaatatattcctccactcactccaccaccaaaacaagtacaataattaagcatataatatattcatagatctatctcatcttgtacccatctatactattaaccctagcttaaagatatatataataatataaatatgtatacaatttaattctatgttttcaggatgtataatataacagaatatattttttttttcatgtgtgatctttttgtttttcaataatttaagatgttaatattacaatttaaataattaattatacgatgatttagacatcctaaattattttcaactttgaaaatttatgaaatttaatttgtgtacgtgtaactatgttatatagcttcatgtaaaagaaatagaaaatattaaaatacattatgcaaataattcacaatatacacatatacatatataattcaaatttgtccacccttatataaatatatatatgacacaaaatacttaattactataaattaagtacataacacgtgcatgcatatattatacacatataaatgtgttcatggggtgatgataatatataaaagaacatacacatcaccatacatatacgtatagttatattacatgagagaacaagcattaacgttgtcgtcgttgaacatgttgctgaccttgtcgtctcccctctgagtgacaggaattcgaccatgtttgtcgccaatgttgtagccatgcttgtaatagttatagctttccttgaactcatttgtggtgtctctgaaataatcacttgtggaagtgaagtagaggggcggatcggggtaaggccagaactccgccctcttccccgccctcctcaccgcctttaacaccttgttccggtcaacatatcccaccactgtcaccctctcaagctctaggtttacctctaccgagtcaatccctatataattaaatatagtagtgcacgttagggacacacataataattaaaatgttaaatgtgtgtgttttgtaaatttgatcaacatagtactttctaaaaattaataattttttcattaacagaaatcaatataaaattattttaactaaaatcaaattcagaagactatccaaaaaaaaatattgttttaaatgattgaaaataaaaaaagtaataaaattaataaaaactatccctaatttcattaaagcataataacatttaatttttagatatattttttgtattattttgaatatatattgaagaaatatatgatgatatatatatatatatatcaattaattattaaaataaattacggatgtgtttggtaacactattttagtcaaatttttgtattataatttaaaaaagtaaaaatattttcaaaaatcatattttataaaactgttttcactttttaattttttaattgagaattaaaattttgaaaacaaaacaaataaactttcaaaaaaaaatgtaaacaatttttttctttcttaattaatattttggattctgacctcaacctagaccttagtactcggactccgatcctagacccaaacgtcgacctcgacccagacctcgaacctggaccctagactcagatctcgactcgaaccccgaaccccaaccccgaccttagacccatatcccaacccgaccctagacccatatcccaacccaaccctggacccagatcccaacccaaccccggacccggatcccaaccccagacccgaatcccaaccccccgaacccgtatcccaattcgactccgtacccagaccccgaccccggactcagattcgaaccccggtcggccagaccaaagccccagagtcaacccagaccccaaccctggcctcagaccccaaaccctgacattggaccccggcctcggcccaagaccccagccccagaccccgaccccgactcggatcccgaacccagacttgacttaaataaaatcaacaaataaaaatgaaaataatattcataaagcacacttttatttttgtgattaaataatatttaaaaaaaaaaatattaccaaacacaaccttaagctaaataatcataaatattttacctctaagtttaagaatggcacttttgactacacgttcacagccagtgcaacacattctcactttaagatccacagtctgcaatgaacataaaatttaaaataataaaaaataaaatacacacaaaatttacacggctaagtttgaaaaaaaagttaaattttaaataaagaaatcttaaaaaatgattcttctaaaatatatgtgtttatatttagtctttcatcatattcttcttttgaagatacctttatgctttctacactaggcaaattatcataaaaggggattaagaaaaggcatatgtttcggatcaatattgtagcttattatacttaaactttagttaattaatttaataacacgtcatgacataattaaagatctctaattatatgatatatatgttatccaagagcgcggatccatagaatttgattttaattaattttgagtttatggtacagtactgctactaacttgattcaaattaaaaaaagagattatagtaaaatattaatacatatatatacacaaaaaagaagattctatataggcaaaacatgcattaatatgtatccaactttttataaaaataatatgcttaagcctgaaaggccacatttactttcatactagcgacctttttctcgattttagctcttcaaataactcacgatctaaataattaaagttctttttttttttgttataacatgtacaagaaaaataaaaaagagcgcgcacacgtacagttgattaatttaacatggtcgcatgcatattaattaatataagaagttttcttggggagaaagcaaaaaggaaaacttttcttgttggtcagtattgcttaatttttcattcttatatatt

SEQ ID NO: 378597 - DNA, 3157 bp, Cannabis indica
gattctttcacatggagtttgtcaattagaaattggaacctggctggtgacaaccctttggtgagacaatccgcaacttgatcgtgtgatggaatgtatcgaatctccaattttctttgcagaactttatctcttatgaagtgcacatctagctctatgtgcttagtccttgcatgatacacggggttggaagctagtgcacttgcactcatattgtcgcaccagattacaggagaagcagaagtgcatagcttcatttctttaaacagttcctgcagccatgacaactcagatgcaagttgagcaagggatctatactctgactcagtactagatcgtgcaactacggactgtttctttgaagaccatgagatcagagagtctcccatgtaaacacaataaccagcaatggattttctgtcatctgggcagcaggcccaatcggcatcagaaaatccaactagattgagattagttcctggtgaaatgtgaattccatgatacatggtgccttttaaatatctcagaactctctttgtcgcatgccagtgagcagttgttggagccttgagaaactggctgagtttattcacggcaaacgaaatatctggtctggtgtgactcagatattgcaaagctccaattgtgcttctgtaggcagttggtgagttgagaagttctccatctgtcaatgacaagggtcttccagcaaccatgggtgtaggactcggttttacatttgttaattccactttttgcagcagttctgcaatatattttccttgggaaaggtgtatccctgtgttgtctcgaaagacttcaatgccgagaaagtagtttagtggcccaaggtctttaagggagaaaactttgttgagttgagtaatgaacaaattcaattcccgtgagctatttcctgtgataattatgtcatcgacataaattaatagcatgatcacatactgaggcttcttcaaaatgaagaatgatgtatcggctttcgagttgacaaattgccattgcagcaaggtgcttttgaaccgatcaaaccaggctctcggtgcttgtttaaggccataaattgccttatttaacttgcacacatgagtaggatgctgagtagattcgaatcctggaggttgcaccatgtaaacatcctcttcaagtgtgccattgagaaacgcattattgatgtcgagctgtctaatctcccagtcctttgtaacagcaagagtgagaactactcttactgttggtgccttaacaactggactaaaggtctcactaaaatcaacacctggtctttggtgaaagcctttagcaaccaatctcgatttaagtctttgaagggatccatctgcatttaatttaaccttatgaacccatttgcagccaacaatattgtactgaggagaataggggaccaatatccatgtattatttttcttaagtgcccaaatttcatcattcattgatctattccacccagggtgttgaagagcagctgctacagttgctggtgcatgattagacaagtcgaattttgcttctccaaggtacaccttcggcttaaagatccccgcctttgctcttgtcatcatgggatgagagatgacaggagcagtttgttcgacttgagctgctgcaggtgactgagatgacacactttctgcactaccaggttcagtaacaaattgagcagcagtagtgttatcaaattgaaagttatcactgacctggttgtgtgagagagactgagatgatgattgtgagttgagcacatcagtatgacctgtagcttgagtttcctgagagtgaggagttatgttttgggccattgagggtagagtgaaccaggaatgtggtgtgctgagtgtaacagtactttctggtttgtaattatttagaaacccatgctcgaaagggaactcatcttcattgaaaataacatgtcttgaaatgtaaattctaccatgaggacttagacacttgtagcctttaaagacttcactataccctaaattaacacattttatggaatgaaactgaaatttatgttgttggtagggtcttatacatggaaaacaagcagctccaaaaacttttaagagcttatactcgggtaccttggaattgattaattcatagggtgatttgccatctagcacagcagtaggaagtctattaattaaatagactgaagtctgaaaagcatcagaccaatactttaagggcatgtgagcttgagctagaagtgtgagtcccatttcgactatatgcctatgctttctctcggctcttccattttgagctgaggttctcgggcatgagtgttggaattcaattccacttttgataaccaaatccgagaatgcctcatactcacctccccaatcacatctaatcattttgttttcttttcaaatttattttcagcaagagccttaaactgaacaaaggcagccaaggcatcagatttttgtttcaatgggaagagccaagtaaaacggctatgatcatctataaaatggatgtaatatttatagttagtatgagatgcaattggtgcaggaccccaaaggtcagtatgtatgatttcaagtaacattttggctctactttgagaagtattaaaaggtaatgcatgagatttaccatactggcaggcatcacaaaagcagagtttttcattgattggattttttacattggacacttttaagacttgattcaaaacagataaagatggatgtcctagcctcctgtgccaggtatcctttagggaatgagaaatgacatttggagtagattgaacttgaacagagaacagacaaggttgaaattggttgaaacagttaggtgaattgttgacaggtgttcccaagctgtagaggccatccttaagtgttcctctcagaatcaccttccctgtttgatccttcacacaacaaaaaccagcaaaaaattcaattgacacattgttatctcgagttaattttgagacactaatcaggttttttgcaatggatggaacatgtaaaacatccttgagaactaaaggtgctgcagtaagtgttgtaagagaactatttccaattttagaaatgtgtaacttactaccatcacctatagtcactttctccttaccaccatagtc

SEQ ID NO: 378598 - DNA, 799 bp, Cannabis indica
tctctctctctctctctcagccgtccggtggcaagattttcacttgagctatccaacgctagtgaccaagaccctgataccccatcttctcgccatcacaaagaaccctaagacccaccgtcgtcgccgtcacctctcatccaaaaccctaatagaccacgcccccctctacatctgtgactcctcccaaatcagtctccatcaacgaaaactcacttgtgaaactctcctatatatttttcccgaattcttaacttcagaactcgaaatccttatcgccctcgactactcaatctctaggatttctcacaaatctgagcgcaagtgagagagagagagagaaatagaatatctgagtgagggagattaacatcagatctgagcgagagagtgagagtgagaatcttgagagaagttctagagtatctctgacagttgagatgtgctccgtcaattggggttttagagatccgatattctagggattttagtgactgagatagggagagggggagaggatctgaggtctcatcattctgagtttcaaggattttagggtcttgtcggtcggggtagtggggttctggtgtttcgtcagctgccgttggagctagtccttagaaagcatgtgttagtggctgccatcaaaggagaaaagaaaaagaactaaggcgaaagaagaaagaggaagaagaagaaaagaaaaggaaaagaagatgaattttttttaatttttattttttcttaattttttaaattattatttttttattctcaattattttttatagttttaaat

SEQ ID NO: 378599 - DNA, 3408 bp, Cannabis indica
tatccactttgttgatgatcacagccgatatatatggatatatcccttaaaaaccaaactgatgccatttcagcatttcaacaattcaaagctcttgtagaaacccaattcgatcaaaaaattaaagcccttagaacagattgggggtgaatttcagactttccaacattgtgttactgagaatgggatagagtttcaacactcgtgcccacatgattcatcacaaaatggtagagctgaacgaaaacatagatacattgtcgagatgagactaactctacttgctcaagcctacatgccactcaaatattaatgggatgcatttcaaaatgttgtgtatctcatcaataggctgcctaccattattctcacaaatcattccccatatgaggttctctactctaagaaacctgactataaatttcttagagtttttggagcttcctgctatccttgtattagaccctaccaaacctataagtttcaattccattctattaagtgcattaatctgggttatagtgattcccacaagggttacaaatgtcttagcacaattggcagactatatatctctagaaatgtgatctttaatgaaagtgatttccctttcaaattaggtttcttaaacactcatagggaagagcaacaaatgtcttttagtgtcccttcttggactgagacaagctcctcgagcatggtatgatcaatagaaatccactctcacaagttggaagtttcaaaactctaaggccgattcctcattgtttttctataagacatccactttaattatcatggtgctcatttatgtggacgatataattatagctgggaatgactccaagaagttgctggacttcattacttatctcaacaccatgtttgcattgaaagacctaggaccacttcactattttcttggcatagaagttcaccgagacaaaacagggttatatctcagccaagcaaagtacataaaagaattactcactaagactgagatgcttcaccataaactttgttcaacacctatgacagtaggcaaggcactttcaaaaactgatggagaaccattgctgcagcaacctacagcatattgcagcatcattagaggcctacaatatttgactcacacttggccagatctgtcttttacagttaacaagttgagtcaatatttgcaggcatcgacaacaacacacaagacagcgacaaagagagtactcagatatttaaagggcacaatcaatcacgacctacatattaagtattcagatcatcttgctatcactggttactcagacgtagactgtgcttgatgtcctgaggatagaataagtgtttctggctactgtgtttatcttggagacaacctagtatcttgttatcaaagaagcaagatgtggtgtcacactcaagtacataatctgagtattgagctttggcacatatggctacataaatctcatggattcaggccttactaagtgaattcaaatttcttttacaaagaattcccatcacctcctgtgacaatatgggggctagtgcactagcaaccaatccaatttatcatgcacgtaaaaagcacatcgaattaaatgtacactttgtgagagataaagttctaaagaagcaactcaaaatcagatatgtgtcgtctcatgatcagattggagactgtctaaccaagagcttaacacaccatagattccatttccctagtgacaaacttggagtggtagaaacccctcttagtttgtggaaaggtattaagaagtgagttaatccttgattattggcttaattgtatttattactaactatgccttgttgtcaattttgtacagttagcatgtggtcccaaggataacaaattatgtgatgtcagatgtttgttcagattctctccttttttgtgtatcattcttttccctgtaattgcactatctagaatgtactgaacatgcctataaaatgaaatcagtcagcctcatttttccttgaagtgagctttatacaaattgtgcctttttactctaccattctttgttattctttgtttctaactatgccaagtacctttgtttttcactaatgctgaccaagttcacagaagtttggtggaagagattgcctcccgaatggcttcatggctggaaggagttgcagtctgccttttagaaacagtttatagctacgacatactacaatatggaggtcggttcactgaccaacctcaaataacaactaggtgaaagtgtaaataacttcatcgagtgaatgatagaagcagctgcaaagatgaaggttagtgatgacatgaaacttgtggctctccagcccagcagtaggctccttcttatggagcaaagtgcaaaataatagggttgagactctgtccaaattcatgtctaaggcacaagggattattaacttggaagacacttatcactaagtttttagaatccctctggcacctactccaccagtagtaacactaagttttaccctgccagttccaattttgatagttacactcctagctagagaccctaatatactttgattgtctacggacccactgcctctgggtaggcacccacacaagcccattttttttgggtatggagcggtacaacatggatgtaatgtcacttctggatagtcaacacaataaataaaagtccctgaaccaagtgtaagccattcccggagcaaggaaggtgggaaagattagaacagaatgaggttctaatgaaactaaggaaggaatattagcccaaattttttgagtacacaggtctacttgatactcgagaaaatgtgtacaaggccacctacaatatgatcaactaccgaaagcctccaaggatgccctaaggaggaaaacacaaaagagatcaaagtaagaggtgtgaatatcacggagacatatgacacaccaccaacgagtgtggttacttgaaagatgaaattgaaacactagtcagagctagacacctaggtcagtggatctagatccaaatcatctatcgtggataggggtggtctacgggttgttgctcgttctggctcaatagggaactataaatcctccacaaggggtatgtctccctcaagctcctagaacatagcttccagtcctacctgctctactaagacatgctatggtggtagttttagctccgggactagggaatctatacccactaggtttagctctgtcgcccgttgatggccatgttgccaccatttctggagggccacacattgcatgaagcactcgaaactcccaaaaatgatacttgaaagtgttatccatgtttttgagcatatgacatgtggcatgtaaagaaaaagattaatctcataatctcactaattaaaatcccccattacaat

SEQ ID NO: 378600 - DNA, 1729 bp, Cannabis indica
  modified_base (65)..(65): a, c, t, g, unknown or other
attttccacatattcgtaatccaaaaatccgattccctccatcaacacagcaacctactctaacncaacaagatggaaatgttctgacattcgatattggcttttatctctgtcaaaaattcatgcactccttgctttgattgagccgatagtgcctttaccgcaactactacaccgtctctcaaagttccctaccgaattttcaacaaaacaaatttgcctaaaagctaagttcattgttttcaagattttgatcctatttcataaatgaagttcaacaaaagataagaatgacatagttcgaataccttgtaaacggttccaaagcctccgcgccctagtttattgctcacgtgaaaattatttgttgcggattttatctcgttgtaggagaaatgccttatactttccagcaaattttctattgataggataagaaaaacataaattaaatcaataatttcaaagtctaagctcataagaactgcattttctccctcgaattaaacttttcgaataccaaatctttcgatgaaggttaaacaatttaacaatgaaaatgtgtcaaaacactaaaagaatctttgtgtgataacttagcataagaactagttctcttatacactgaaattcatgagattcaaccaagaaccgaaataatctttcaatacacaagttaacaatgaaatgtgtcaagactacaagaatttttgtatgataaattgaggaaccgaaataatctttcaacaaatcaaacaatttcaaagtcaagctcataagaagtgcattttcgccctccaattaagcttttcgaatactaaaattttcaatgaagttaacaatgaaatatgccaagagtctttgtatgataaattaggataaactaaggttttaactacaccagaagaactagttctcttaaacactgagacttgttaaattcaaccagaaaccgaaatgttaaccgaaactacaagaattttcgaaataatctttcaacgaatcaacaatttcaagtcaagcttataagaagtgcattttcgccctcaaattgaacttttcaaatacgaaatctttcaatgaagacacacaagttaacaatgaaatgtgtcaagaatctttgtatgataaattagcataaagtatggttttaactacacaagaagaactagttctcttatacactgagactcattaaattcaaccagaaaccgaaatgttaaccgaaactacacgaattttcaaaataatctttcaatgaaggtttaattacaccagaagaaccagcttttacacactgaaactcattagattcaaacaggaaccgaaaatacaaaccgaaaatcagtacaagatagacaattttagagaaagtactcataccatctatgccattgttagcttgaccagaaaaaccctttttggtctttgttgctgaagcaccaaagcaactacaactcattattttctccaacacctttcattaaaaaaaaacaaacaaaacaaacatgaaattcatgttagaaaaacaaaacccagatgaatataatcaaaacccatataaaaagtaccaaacttattccaaagcaagagtctttaagaacagaaacacccatatgagaatttccatacttttcaaaaaaattcttctaaataaacaaatcccatttctctacaatcttatataatcaatacccatatgaaaagtttcaaaatttttccaaaaaaa

SEQ ID NO: 378601 - DNA, 4484 bp, Cannabis indica
aaataaaaaaaaaccctaactttatctgtatctctcttcccgtcctatctcgaactcgaagtcgcaccagggcaccaccatggcacccttcttctctctccctctctagcgatctcaactaggcagtaagttctctattatatgattgctcttctcttctctgttttgtttgatcaatgatgtttgcagttagtactaagtataatatgaaaggatttattttgctttgtttgatcaagtaatagagtggctgatttttgattgtttatttgaatatttatttttgtattttgcagaataaaatacaatattttgttggtgaggatctttggaaatttagggcctggggataaccccaaatgtataaatccccatgttttattgcatcaattgtactacaacataatgccggaaacccataatcagaaagttcattcgggctcgcaattttttccaattcaggtataagaaactatcatcagctcttgtttttgagaagcctacatattatatatttatatcatacgtactcaatgagtaagaacaaatgaaggtcggttttttttcttgataatcgggtactgttgtcttttgataagatcaaatgtccacatttgtacttgtagtgttcatatttaaatgctaattaatttgttttgtaatttgtgtccatgttatcaattttaaagtatcaatcttgcatctaaatttttgctcatgatgcagctagccaatcatagaagaattatttgtaagagttcctgaatggttgaaattgatggcacctgttcgttccactggacttgttgaccctggatgggagcatggcattgctcaagatgagaaaaagaagaaggttaagtgcaattactgtggaaaagtagttagtggtggaatatacagattaaaacaacatttagctagagtttctggagaagtgacttactgtaataaggctccagaggaagtgtacttgagaatgaaggagaatttggaaggatgtcgttctaataagaaaccaccaaaacattccagagataatgggcagggatatttgaatttccactctaatgatgacgaagaactggaggtgcaggttgagtatagaagcaaaggaaagcaattgatgaatgataggaacttagctattacctgtactcctcttcggtcattaggatatgttgatcctggctgggaacattgtgttgcccaagatgagaggaagaaaaaggttaaatgtaattactgtgagaaaatagttagtggaggtatcaatcgatttaagcaacatttagcaagaattcctggtgaagtagcaccttgtaaacatgctccagatgatgtgtatataaaaatgaaagacaacatgaaatggcatcgtactgggagaaaacaaagacgagctgatgttaaggaaatttcatcattttatgcagaatcagattctgatgatgaagaggatgagtctgaggaagttgatttgcatcatagaagcaaagaaaaactgattgacaatgatggaaaagttggcaaagatcggagaaaatctattaaggacatgtctctaactagtggttctgaacccatattaaaaagatcaagacttgattctgtttttatgaatacctttatggatcagacaccagaatgttataggcaagtaaaagtgaaaacagtgtctaataaacaatcacggaaggaagttctctctgcaatttgcaggttcttctaccatgcaggcgttcctttacaagcatcagattctgtttacttctataagatgttggaattggttggtcaacatggacagggtttagtagggccttctagccaactgacatcaagccgatttcttcaggaggaagttgccaaccagaaaaactacctaattgagtacaaagcttcttgggcaatcactggctgttctatattggctgatagttggagagacacacagggtaggacattgattaactttttgtcttcaggaccaaatggtgtttattttgtttcttcaattgatgccactgaagtaatggaagattcttttagtttgtttaagctgcttgataaagtagtggaagagatcggtgaggaaaatgtagtgcaggtaattttcttttgttctctactaacctgataggcacacactcacacaaacactgaagaacaaaacaagaatagatgattgagattaagactattcacaagggtcgataggttcttagagatacaagttattcctaaaacacaactaaccccataggacttcgacggcctgtgaccattgtttttcttgcaggttgtaactcgaaatactcccgcctataaaaatgctggaaagatgcttgaggagaagagaaataacctattctggaccccatgtgcaactgactgtattgaccaaatgcttgaagattttctcaagataaaatgtgtaggggagtgcatggaaaaagggcaacagattacgaagttcatttacagccagatttggttgataaatctcatgaagaatgaattcactcagggaaaggaacttttaaggtcagctggtacccggtgtgcttctagttttgctaccttgcagagtttgttggaccataggacagagctcaaaagaatgtttcaatcaagcaaatgggtttcatccgggtactccaaagcaagtgatggaaaagaggtagaaaaaattgtactaaatactggattttggaagaaggtacattttgttgtcaaatcagtggacccaataatgcaagtacttcaaacggttgaaagtggtgacagcttctctatgccatctatatattatgaaatgtacagggcaaagcttgctattaaatcctttcatggtgatgatggaagtaagtatggacccttcttggctgttgtagagaatcactggaattcgttgttctaccatcgtctatatatggctgcttatttcttaaatccagcataccgatatcaacctgattttgtggcggtaggagaaacaatgacttctggtgattctcgtttctgtggttttcttttcaaatcttaacgtgatttttccaaaatgcagcatgctgaggttgttcgtggactgaatgattgcattactcggctggagccagacaatgctaaaagggtcactgcctccatgcaggttgatttttgaactttacttttaatgatctagtgttcttaagaagctttctcattcttttctatgtatcagctttctgactatacctctgcaaaagctgattttggaactgaattagccattagtacaagaacagatcttgatccaggtaatagcataatgctactgtgtactagtttgaaactacagcctttcatgcataagtgattcctatactgatcagagtttctatttgcccaccttattagccgcatggtggcaacaacacgggataagttgcgtagagctgcaacggatagctgtacgtattctaagccagacctgctcatcttttgggtgtgagcataattggagcgtatttgatcaaatttacagacacagacagaatcgtctagctcaggaaagattgaatgacctcatttatgttcactacaaccttcgattaagagaacgccaacaaagaaaaaggtccaatagctcaacctcacttgacattgtattgctagaacatttgctggatgactggattggtgaagaagataaaaaactagtgctaaaagacgaggtaactgagttttaacttctaattttttttcaatactctatataaacattctctgcaatgaggcgtcttcatggtggtttagattcttgacttaacttgaaatgacaaaagaatgtataacaatatttagcccatgtgaaaattttaatatttcacccaaaaaaataggttgtcaagtgtattgcacacaagtaaaactatacggacaagaatgtcatgtcttaagacttttcgatatttagaaatggttttggcagagtaactgagatttcttgtttctcttttaaaggaaatcctctgtacggaaatggaactgactaatgcatacgaagacgagacgatcgattatgaagatggaactgtagagaagggatgtgtcgaactagtcactttgtcggatgtcaatccttctaatgctggtgctgtttcagacgatgatgatgaaaatgatgacgaagatgatgacggtgaagtaaattactttgatgatgatctgagtgaatagccggaatcaaaaatgtaaatgttaacctgatgatgcattcatgcgttgactatcaaaagttttatactgtttcatgggtttaattaatccttacaaatagttcgaccagtgtatagtaatgtaaaaatagtacggaagaaatagaaagtgaggaatttattgaggtgattgagaacatagatattacacattattaaaaacaaaagaatgaaacttgtctttctaattttcctattgagtacagtttttggagacgtgcc

SEQ ID NO: 378602 - DNA, 1575 bp, Cannabis indica
aaaaaaaaaaaagaaaaatgtgtaagcttttctttttgaaaaaataagcctttatagataaataaaattagacttcacccaaaaaaattataaagtcttttactatgactagtatagtaatcaattctccatctaaaaagttagttcattttaaagccttgacgactatgtcagagtccaaaatgtactaatttgcaacaacaatttcaacagctagcaagtaacaattgcttctccattaagagaatctgagaattgatatcgccttgtagtagcccaaactattttccccatatgtttttttgctaccgccgcaacacacatggcatcccttcctacatttacaccacaatttatccatttcaagggaggtagggatcgaccatccacaacaacatattcagaggaggaggaagagataagtcataatttgcataacaaagagtaatagaattaaattaatgtttcaagctatataatttattattgtgtactctcatcattttgagctctccatattgtgtcaacaacaatagaagcatattagaagacctcattaatgttgactccttgctttttaagtccttacaagaacttcacccggtctcaaattcgtgtccacgaatcattaatgagtatgagggtcaaaggggatgatctccacaggtgataaaccaagttataatgatagaaaatgtacttcgctgattctttatcacatccacaaataaggcaaggggtatcttcaaattcaataggcatacactgatcaattaaggttcaaataggaagcgcattagagagaatgctccactaaagaactttatgaatcttactattccacaatctactccaagtgaatgaatgacaacacaattgggagctctatcaagagcttagatcagttagcacattttcaagaaaattggtcatttgtttctttagttcacacccaatggttcttttctttggctggtgggttttcccccttttaatatagcgcacattgtctcgtgataaaaaatgtagttaaattttcgaaagtttcattcaccattgtccaatataaggtcaaccaccctattgtatctgatggtaggcactccgtttattttcaagcaaaactcgtttctatttgtcatccacgagtcctcccaagtattcatatccttcccatcaaccaccaccatgcatgctccctttctaaggatctcttttgttttgacagcattcttctaaaaccaataatcagaactcttgtattaagatacttggcattaagaactttgcagcacaaggattaacttccattaatcaagtgtcattgtcatttagccaaaaaaaaaaccaagtcatttattttgtctttcagaaacccgattaccgatgagactttggaagaaagatcttgtcccaagccttagatacccttatttcctttctaattctagtagccaacttatgagagaccttggaaaatctctcatttaggctaagaaaacagaatatatgttttgtaaatttatacttatatatattaaaaaaaaaagagatttttcgatattatacctaaaa

SEQ ID NO: 378603 - DNA, 2257 bp, Cannabis indica
ggatactttcatgacagagaccatcaagagatttaataagatagaacgaggttggataacatagagactcattttgcctaatataactgctttcatgaagaatatggaggtgcaagtgggacagttgaccaatgctgtgagtgttagtcaaaagaacggtaattttcctagtgttacagttgtcaacccgaaagaacaatgtaatgtcaactcactaaggagtgaaaaataattgatggaggtgaagacacattagaaactaaagaagagattaaatgtagtttttttttttttttttttataaaaaaaaattgggtactattttgtaatcacgttttagaatgtgtagatacttaactttgaagcgtgttattatttatttatgtcgcaaaatttattctgttttgaaaattaatacactctaaatttaaaatctcaaaaaagagaagaagaagaaaaacgttataataatcatctcaaattgatatcgcgcacaaatcatcacaaatgcatcgttaaaactcatttgacattttcttatttgaaaatcaacttttcatgaaaactatcaaccatcgcaaattcattattattttgcaatattttttgtcgccttaaaatatatatttttttatggcacaattaattgcaattgcatcgttaagtatcgtaaatgcatcaattttgtcaaaatgtatcgttacaacatcaattttccagttattcaaattcattattagcttcaaaatgtaatggtttattaactttttattttaattgaacattgatatactaaaaatacattcaagtttgcgtggtggtcgggaacaacgcaaagaggaagggttatatagggtctgagattcaatataagatatatatatatatatatatgtatatacatatttttaaaatagctaaaaagggtgtcatattgaataaataataagagataccaagatgcacaaagcatcaaaatttccaatacgtacgtttgtatgactgggtacatatagctaggcaaataattgtattttacatctgcaaaatatgtggtacatttgaaataatgaaattaaaaattaaaagttaaaatactaaggtgtaataattagataaacaaagtgaattacaaaattctattaaattaattagcaaaaggaaaccaatgatttaagtgtggggaaatcatccatgtgaatttcatatagccaatttacttagtctaaaaataacaacttcaactttggcattacttacaactcctaaggatattcataataagttacaagaagaagaaaaaattatattataaaactcaacgacacatgcaccaaataatacagatagatcataaaattattttatgatctacttgtaatttcttttatggggagtacagatctactaacgtcgataagtagtcgcattggccccatgagaaattggagacttagtatgacgataattaaatgttgaagtagaagaagagtggtcttggcgattaggtttcttgttgtcttttatgatgagtttaatgtcattgattttctccaacttctccaggacatgatccatagaaggcctagttttagggtctgattcaaggcactctagtataagctcagcagcttggaatgcagcttttattggatactcatctccaagccctttatccattatctttttcaactttttcttgtccgaaagcgaaggtctcgcccaatccactaaaacgtgttctcccgacggcctactcgtgtcaagggcgcgaaatcccgtcatcaactccagcaacaccaccccaaacccaaacacatcacttctcaagtataaatgacctaaatattcatcatatattggttaattaataagtattactattgagcaccagttagctagcactttctagacttgtcactttacatttagttaaagattctccctaaaagttattacattaaattataaagtttttgatagttaaattctcccaactatcatttcacttgcatttaaccatccaaactcaaattttggcggtaaaatcttccaaactactaaattgttaacaagttcaaggtgtcatttggttaactgctactatggactactttgtacacgtgacacatttatatatatattcgtataccttaccattattatttcaagattcattttaaaattaaataaaattataaaattaaaatagaatattacaaaaataaaaaaaatatattataaattttgaaatatt

SEQ ID NO: 378604 - DNA, 5261 bp, Cannabis indica
atagtagttagaatcaagccaattgcggtaaacatgatataacttgaggcaaattttctttagccaattaatccatgtgtgactgtacaacttgagtacaatttggtccaatgtggcacttgcaaggacgggcaatatgaatgttgattacatagttttgtaggcttataacttatatatttaattgtttggtggtgtgtggtagttcatgttagagtcttaatgggttttttttttcctttttcttttcagaaggtacaattaatcttaatgctgttttttgttttttgttttttttaccacaagattaatttgtcacagaaaaaaaatagacaatgtgaaataattgttttattcgtattatttcatgctactttacttaaattctcagcaagacataatagagcttttcaccattatgattctctctagtagtagtagttatcttatgttttttagttgttgcgagctaaatttctagtgaaggtgaattgtagaggatattatgattttttttttggttgaataatggaaaatattattaggatatttacggtatgtataattcgttaagttctctttgttaaaactgtatttagagtatttcccaccagaacgaagtactcacctaaaatgttttttttcttcactgacttgtgtaaaattaattgtgtattatatatatatttatgtaacataggaagagctttctattctgatttatcttttcttgtgttgtttctatataatgtggttttttttcttgatgttgtttcagcctccaaaaatcagatctttcattaatagtgtcactgctgtgccacttgagaatatagaagaaacccttaagggttttgtttgggagttcgataaggtgcattttttaacctttaactatcacattttcatggttacttttatgctgtttggctcattcgttacctacttgatgcagggagatttccatcattgggttgatcttttcaatcactttgattccttttttgagaagcatattaagtcaaggaaagatttacagattcaggatgattttattgattcagatcctccattccctaaagaagctgtccttcaaattcttcgtgtaataagaatagttttggagaactgcacaaataagcacttctatagtacttatgaggtatattttcattgttttcacttgtattttggaaagtctctgtttctctcctgtgcttatgtttatgttttctctgttattgcagcagcatctttcatctcttcttgcttgcactgatgctgatgttgttgaggcttgcttgcaaactttggctgcgtttctgaagaaaaccattggaaagtactcgatcagagatgccaccctcaattcaaagttgtttgcccttgcacaaggttggggagggaaagatgagggtcttggattaattgcttgtgctgtacaaaaggattgtgattcggttactcaggagttaggttgcactcttcattttgagttttatgcactgaatgatgcttcaagtgaaaattcttcatcacaacatcctggtctacagataatccatatgcctaatgtcaatgatcggccggagactgatcttgaacttctcaacaagttggtagcagaatacaaggtgcctgctagtttgagattttctttattgacaaggttgcgttatgcgagggcctttggctctttggcttctcgccagcagtatgcatgcattcgtttgtatgctttcatagttcttgttcaagcagcaggtgatgctgaggacctggtttccttctttaatacggagcctgagtttgttaatgaattggtttctttattgagctacgaagatgcagtacctgaaaaaattcgaattttatgtcttctctctttggttgccctttgtcaagatcgaaccagacagcctactgtgttatctgctgtgacatctgggggtcaccgtggtatactatcaagcctaatgcagaaggcaattgattctgtcactagtgatacttcgaagtggtctattgtttttgctgaagctctattgtctcttgttactgttctggtttcatcatcatctggttgttcagccatgcgtgaagcaggatttattcctactcttttgcctttgcttaaagatacaaacccgcaacacttgcatttggtcagtactgctgtgcatattttggaagcttttatggattacagtaaccctgctgctgcattgttccgagatttgggaggtttagatgatactatttctcgcttgaatgtggaagtttcttacgtggagaatggcccaaagcagcaagttgaagattctggtagtagtgggaggagtgtgcagttaatccctggtgcttccactgagctagatgatatgcaacctctttattctgaagcattagtttcttatcacagacgattactaatgaaagctttactgcgtgctatatctcttggaacttatgcccctggaaatactacacgtgtttatggttctgaggagagcttgttgcctcaatgcttatgcataatatttaagagggctaaagattttggtggtggggttttttcgcttgcagctactgttatgagtgatttaattcacaaagatcctacttgttttcctgtactggatgcagcaggtcttccttcagcttttttagatgctataatggatggtgttctctgttctacagaagccataacctgcataccccagtgtttagatgccctttgcctaaataataatggtctccaggctgtgaaagatcggaatgctttaaggtgctttgtgaaaatatttacttctaggacctttctgcgggccctcaccagtgataccccaggttctttgtccagtggattggatgaactaatgcgccacgctgcttcattgcgtgggcctggggtggagatgttgattgagatcttaactgccatttcaaaaattggaaatgggcttgatgtttccagcgtgtcaagtgatccatccagctcggctcctgttcctatggaaactgatggagatgaaagaactgttgctgcttcagatgataaggaatcacccaagatggatagttcagagcagactactgaagcatcttctgattcttcacaagtgaacgtggaatcattccttcctgattgtgtaaataatgctgcacgccttcttgaaacaatacttcagaatgctgacacatgtcgtatattcattgagaagaaagggatagaagctgtattgcagttatttactttgcctttgatgcctctgtcagtgtcagttgggcagagcatttctgttgcatttaagaacttttcaccacagcattcggcttctctagctcgagccgtatgttcttttttgagagagtatctgaagtcgacaaatgaactcttagtttctgttgggggggctcgactttcctcagttgaatccacaaagcaaacacaaatcttaagatgtctttctagtcttgaaagtatcttgtctctgtctaactttttgttgaaggggactactactgtggtctctgaattgggcactgctgatgctgatgtattgaaagagctagggagcacatatagggaggttgtttggcaagtttctatgtgtaatgatatcaaggctgatgaaaagagcactgttgatcaagagcctgaaaatgcagaggcagctccgtctaatgctgctgctgctgctggtagggagagtgatgatgatgctaatattcctgtggtgagatatatgaacttagtttctatgaggaatggctctcagtctttgtggggtggtgaacgtgaatttctttcagtttttcggtctggtgaaaatctgcatcgtcgtactcggcatgggttgactcgtattcggggtggaagggctgcccgtcatctagaggcattaaacatcgattctgaagcttcttctaatgtttcagaaaccccttcacaggatttgaaaaagaaaagtcctgatgttttattgcttgaaattcttaacaagctggcttccactgtgcgttctttcttcactgctcttgtcaagggtttcacatctccaaatcgtcgtagaactgactcaggttctatgagttcagcatcaaagactcttggaactgcacttgcaaaagttttccttgaggctcttaatttttctggtcattctactccagctgggcctgatacttcactctccgtgaagtgccgatatcttggaaaggttgtggatgacatggctgccctcacatttgacagtagacggcgcacttgttatactacaatggtcaataatttttatgtccatgggacctttaaggagctgcttacaacatttgaagctactagccagcttttatggaatttacccttgtctatgccaacatcagcaacgaccagcaaagaaaagactggtgaaggaagtcaattatcccacagtacatggctgcttgacactttacaaaactattgcagattgcttgagtattttgtaaattcttctttactgttatctccaactgctgcatctcaagcgctgcttcttgttcagccagtcgctgttggactgtcaattggactttttcctgtaccaagggaccctgaagttttgttcgaatgctgcaatctcaggttctggatgctatacttcctgtatggaacaaccccatgttccctagttgtactcctgggtttattgcttctattgtttcacttgttacacatgtatattctggtgttggagatgtgaagcggaatcgcaatggggctggtggaaatgcaaatgtacgcctcatgcccccaccacttgatgaaactacaattgccactattgttgaaatgggcttttcaagggcaagggcagaggaagcactcaggcgggtggaaacaaatagtgttgaaatggccatggaatggcttttcagtcaccctgaggatcctgtactagaggatgatgatctggctcgagcactcgctctttcactggggagttcatctgaaacatccaaagttgatagtgttgacaagtctgttgatgtgatagcggaagagggtagtgtgaaagcacctccagttgacgacattcttactgcatcagttaggctgtttcaaagtagtgacacaatggcattcccattgacagatttgcttgtgactctctgcaatcgtaacaaaggtgaggaccgcccaaaagtcgcagcttatttggttcagcaactaaagctttgcccgctggatttttccaaagatacaaatgcat

SEQ ID NO: 378605 - DNA, 2160 bp, Cannabis indica
gttttagttacgtaaataagacaactctagtaccggcgagtgatgagccacaaggccagaaaatggtattgttatctccaaaatcttaatccactagtctctatgttgtacgtaaaagattgtatgatcaaaattctctctgttaactatttgtatggcaactcttaacaccatcatcagtcatggtggtcatggagttccttccttcaccattaaatccaaaaaggactccagctttactcgagttctcctaccgaccaaactttataccaagttagacgcagaaaccagaagaggggtcttctctactcgtaaaaggagaaactgggtcctccgtgctatcgttgaggaacaagaactggctccggggaagcctaacgagtcaaaggaggaagataacgccttattgagtgatgggtctgaaaaagttgagccattttcgtctttgttacccgtttcagtcgatggtgaagaagattgggatagattgaccagcagggctataaacgctgctattgttctcggatttgggacccttgctataactaagttgttcaccattgaccacgagtactggcatgtgagttaattcgatgatcctatttatgaaatttgaggtactttattgggtgttttttccttgctttttcccaagtaatcatatggatattggggattcgaaaattggtttactttgattccaaaacaaggggtatacttatgattcatatgtgctgaaaatattgtcaaaatctctttctttaagctttatcccaaaagtgagacttttatgatatctttataattgattctataacttttgtggtgggtttttgttaaataatttgcttaaagtggcatttttctttgctgggtttttcaatttagtgtaaattgtccagcaattattagttatatggatacttatcatcaagaatgattgaaattttaaaacaaaaatgactctggcagaatcacatttgtctaagtacttgataagttggcatccttttgcacattttagctcttttttattgattttttttattactcaggggtggacaatttatgaggttctaagatatgcaccccaacacaattggattgcctatgaacaagctctcaaagcaaatcctgttctgtccaaaatggtaattagcggtgttgtctatgccattggagattggattgcacaagtaagactttattgtaaattgtcatgaaatcataacttcttttacatttggtgatatcttaattctctttccttcaatatacagtgttatgaaggaaaaccaatttttgaaattgaaagaacacgcgttttcagatcaggccttgttggttttaccctccacggctccctttcccattactactaccaattttgtgaggtgacaattgttatcagatttagatattcttggtttgctgtgaataagctgaaaatcctgactttggtttgtactttgcaggctctctttccgttcgaggattggtgggtggttccagccaaagttgcctttgaccaaactgtatgggctgcaatttggaacagcatctattttttcgttttgggactcttacgttttgaatccccggtcagtcttttgaatgaactgaagtcaacattttggcccttactgactgtaagaatctcttatacttatcttcataaactagtttagataatcatgaagtgtttatgcaaaaaggtttataatgttgaccagatctttgttaaacaaatctatcagtcacttaatcaaatgcatttaggttcacttggtggatacatcattatttattgcacattgctctgatgctataaaaacatgcctcaagcaataaaaagagaaaaggggaaactcagtttgaaaattgaccccacactaatgacttactaattgatgcagcagctaaatagtactgtcatttcttgattggcacaatttcatgatgaatttagcagcctggtgatttatgtctatgttttctaaagggatgatatagctttctaaaggaatgatatagtattgtttagacagtggttgcatttcatctatgtcttcaaaacggtgtgagatgtaaatctgtatatctccttccaaagaaatttattttaaaactgactagaacattttggaatgtaactgttaa

SEQ ID NO: 378606 - DNA, 3542 bp, Cannabis indica
cctagctccaaaaggggggaaaaatgtacaagcattttctgaagcattttttctcatcacggacactcatatattgctgcaagaaccattatgagtgtgatttccgcaatgaggcgaccctctctgcttattccagaagcaatgggcacaacttcattaggcaaaaggggattatcgatgccattcacgccaagtacctaaacatgttagggttatctttatctctttccagataatctcgggtgatgagatcttcgatcctcttcttaattgccttgaagtcaggctgcaaaagaaatttcaatcaatgccggaagaaatattcatgcacaaactcaagaaaaatagacaaaaagagggtgttgttagtgtgttaataatggtgggagaaaggggcacaaataaaggaccttgaacatgcgacccaactgctcgacacactccatcaccagttgctgatgacccaatactttacgactcttcatgatgcgcacaattgaggcatcgatggcatatcttctgtccttgtcaacatcctcgattactttctttttctcatccacaggtgggagagggatctgtgtgttatatcataaggatcggaagaatgaaataagagatgaaggaaagaaaaaagatatccaccaaccttgatcctcctcattttgtcagtaaacttggagttgaactcaaagtaatcagtaggagatatagtttttgtactcggctccttgttgagaatcttatacttagcgcatgacaaggaatggagcagtctaacaacatcatcatcattcaagtttaactgagtcatgatttcagagtaactcaatctatctgaggaattgaatagcagcaacgcagaagcctgaaagaagaaaattaaaattaccaactggacaacataacaaagaaatataccggatttatgaattattaagcttacctgataagtcgtaacaatcagctccatggtttttggttcaaatttcccaataatattacaaattcctagggagtatatccatgtaagttttctgtgcttcgtttttgtctgataaaattccttgaaaacctcaacacacttaacctaaaaacaaaacagataaaaccttagcaattcacatagaaaaataagcttacaaggttgagagtgagggagaagttgttagcatttgcaatataccatctcagctggaagattgaggtcaaaagatttgtaacttggccagaagcccgtggtcaaaacagtaacagtcaaatcaatccctggatttgcttgagtattagtctttaaatactcctcaaaatttgtctggttttcttttgccaaagtcaagtccgtcacctacaagagaaaagtagcactttagaggctccaatcttaagatacttcaatgagcatctaatgcaacctaccattccttccatctttgaagtgaactgtccgccacattgctgcttcagtttagtcaaaatacatctctcatgatcatcatttgcactcttgtcaaaaagaagacgtcgagcaagctttttcctgtaaaacatgataaaggattagtcatctaacatctattctaaggaaaatcatcaaatattatcattatataagtgcaatccagcccttcctcccctctcgtaaaagaacaaacttaaaataaaacgacaaagtttgacagcaattaatacctataaaactcggcaaacaagtctttgtcactaatatatgctagcagcttcacaacctgcagatttggttttcaaaaaataaatcaatggcaaaattctacaagtccagacaagttgataaataatatagcaaaggaacagtgcagcacaccttttccagtgtctcctcaatggcttcgtcacttagtttctcacttccacctttctttagaatgttatcacaaaatgtcgcaagaagttctgcacttgagcttccagcaacacccttgttgcagaatatctcaaaagcttccttaagggcctgtagaacaaaaataaaaaataaaacaattagataatatgaacaggagtcagaaaaagtgtccagatagccttcaagcaggttaatacacaaaccttgtgaaaaagtgtatggttttggaaacagtcgttcacatatgctagatatttgtcatgtagctcaatgacttttctgacaaaaacctgaataacagaaggcacattagttttagcttgaaaaagtgtgtacagtctaaccctataaggtgtctgttggtacactgtattacattgtatagtattatagtgtgtgtatcatgtttttatacagtactatatttggtattaacttgtattgtatgtgtaataaaaacatgtcatataacgctatactatatgatgcgatgtaatactggataccaaacaaaccctaaataatatactacgtacttgttcttgcagaccaactacatccttcttctctgcctgtagagatacaaaataattggaattcatcagtaatgaattggttgggaccatggaaaatacagctaatcagtacaaactaaagtaaggaataaaatcactgataaacaaaattacagaagaaagaaagaggtatctagctagcatgaaaagaaaaggctagctaactcaaaagtaaagactaaaccccaaatcaattagctaacgcataaagcaatattcataaagttttcacagcttttggcagatttgtcaaagtactgagaattctttcaatccgccatgatatgctagagggaaaaaagtatgtaacaactttaggcatcatcttgtgtgatatagttatcgagaagagaattaagagacaaaccttcttgttacttgcagcatcttccgcctgtttgactagagccattccttcagcagtaacatgctaaaattgcatcatagataaagaaaaaatcatatacatctcacaacaaattacaactatcaatatatttgacgacccaagaatacaaaattaaaaatgtcatgagtgcagcatgaaaacctgtttaaaaatatttgaaaccggatccaagcctcggggtatcttagaaaagagccggaacattctagacagatcctccaccttaaacagacaaaaatcatttatttaactgatttctccaactaagtaacaggaacaagtggttcagccaaagaagtaccttatcatctctaagtaaagcatggcatccagagtgctctttctcaagcaattgagtcgcatatacagacagcagctcatgttgaactttctaaacaaaagttcataacaattaaaaattagacagactattaagacattcttcacttgaagaagaaatataattatataactaaagtataaaatcacaaacctccaatagctttggctcactactagagtgcaggtaatgagaaaccctatccttttcccgtcttaaacattcttcagcctggagtttccagcaaagtgcttcagaaactatttacatgaacataaaaaatttaaaatttgcacagatttaatgcaaatgaatggagcttactttaagcat

SEQ ID NO: 378607 - DNA, 1977 bp, Cannabis indica
tttgcatcttctgcattggcataccagattcctaaaaggaagaagattcttgattttcaattatctgttcttaaatttgttttatgctaaggactgaagcatcatatgacatattgtacgggaacacaacaaaccatcaaaagcatggataaaagtaggcacatttcgtgcttttaaaagaaaaagagagtagttattcacaaaccgttgagaactctgagatggagcccagagacagcagattacagagagtaatgcaaatgcaagaacgtcccagaaagcggtgatgatccaagcactctgccacctttcgttaaatggatctgttgctttgaagtatacctgcatgagcaagctcaccatatttatgacaatttaaagaatcaacccaagaacagcataaacaatttttttttttctatttaaaaaataattaaattcagaagagtatagcctttcacagaaaagccaaaattcacaacaaataggagtgtactttaaccgaaaaggttcaactgtgatgataaacctctcaagtgatgatgaataatgatacatcagattaaaagtctcaaggaaatactggaacactcttaaatgttctacaagagacactacctcgaaaggaacaataaattaatatcttttaattactgaaatcgggacctaaaatttgcaaaattgggaatgttaagaaagctattgctgaagtcaaagcattgtaaatgcagattacaaagttgcagaaataatacaggcccatgtaacaaaaagtcaaaaatttctaaaacttctgatctcatacaaatatacagaaagtattggcataagaagtttatacttgattaggattattattactatatgatttaatcaagatcacatctactgagtgttgggcactaacatcatagataacagaaataatctagaacatttagtgactaatttgtcaatgaacatgaattactacacaattttcctggaagtaatccttatttacaatgttgtttttgaagtaagtagaagacaaagttggatgagtagtataataaccttgaagtttttaaagacgatcaaatcaaaatgtggtgccaccgaaagatactccatgggaaatgctcatacatgaacaagaattttatacctaaggtctatgacaatcagagaaatatgaacattgttttcaatagtttggctatatgctttccaaccctaaatgtaggtctgaatatgatctctatgcagtacttcctagttactgataaaatattggtaaatggtcagaatataacacaggtagaatggttcaaaaaatcagggggactggtgggactgctgagcaaagaaagattcatacgaagaatatataaattgagaaaacaacccatgtaacatgatctgaggttagaagcataactgcagttaaatcaaccagaatttcaactaactgaaacttgctaaagacaaatttcacttttataatgtaattttaaatatctacatatataaaataagaaaaaacgaaaaagagctttgttaatatatttgtcttagagagttgctatatggtccaggtatttgacagatttcgagtggactcggttactcctaggtgcgtttatgcctcaagattttgatggatataataataagaagataaatataatttggaactgtggagtgtcagcggcgatgtacatggtttggctcaaaagaaatgatagaattattcaagacaagaactctctagattatctttgggttgcagtttggcatacttttattttttctgtctgttgagagattaaaaggtattgttgtaacttatttctgtgttgaagtttgttgttgctgtggtttcagtttaaattctggttgagtatgtgatggtgtgctgttcaagtgttcatgaaaaattcctttcttcagcggtataattatcctcaaaatacatatatgtataataataataat

SEQ ID NO: 378608 - DNA, 4608 bp, Cannabis indica
ctcagcatcattctttgagctgagtttttcacaaatatacagctgcacttttgcagctttctcttcttggtatcagagctactgtgctcacgcaaaatgtccaatgggtccagccatcactccactgctcagcaggctacaggagcagtacaacaagaagaaggtgctgtcggtgttaagggaacaacacaacaccagaatcaagcacaaaccagctccccatcaggttttggcattggatctggtggattctcgagttctccctttggtaatactctgtcttcaccctttgccttaaaacttgatagaaacaattatgtactgtggaaaactatggtatctactataatacgtggtcatagactagatggttttataaatggtgtgagacaagctccaccagagttaatccctgcaggtgttgcaactggtgatggcttgcctggttttggtctgaaaatgaacccagaatatgagcattgggttgtctgtgaccaattgctcatggggtggctctatggatctatgacagaagccatagccactgaggttatgggttgtactactgctagatctctttgggtttctcttgaaaacctatatggtgctcattctagagcaaagatggatgatctgaggacattccttcaaacaactcgaaaaggatctacaccaatgtctgaatatctcagacagaaacgatcctggtctgatcaacttgcattagctggagatccgtatcctgagccacatcttgtttccaatgtgctcagtggtctggatgtggagtacatcactattgttgctcttcttgaagcaaagaacaacatatcaccaatcacctggcaagaacttcaagagactcttctgagttttgacagcaaactcgaaagacttggtggtctaattcctggcaacaaaacaggtcaaaactcaggaaacaactcaatgccatctgctaatgttgctcacaaacaaaaccagaatcacaacaacaacaatggaggtagaggcagaggcaactactcatctaattctggtggcagaggtttcaattcaagaggaggcaacaatggtagaggaggcagaggcagaggaggaagaaatagcaaaccaacatgtcaagtctgtgggcgatatgggcattctgcagcatattgctataacagatatgatgagaatttcatgggaacaacccctggatctgctacagggtcaggaacaaatcaagaaaagaaggatccatctgcctttgttgctacaccagagactgttgatcacgaaggttggtatgctgatagtggagcaagtagccacataactacagactctgacaatctaagcaacaaatccagctatggaggtaaggaaaaacttgttgttggtgatggaacacagcttgttatttcacatattggtacaggaagcttgaaatctcataatgggagtactttaattctcaaagatctgttgcatgtccctgagattacaaaaaacttgattagtgtttcgaaacttacctctgataataaagtctttgttgaattcttctctgactcttgttttgtgaaggatatggaaacaaaacaggtggtgctgcaggggaaacttaaagatggactgtatcaacttcaattaccaaacacttctgtcattcctagagcctacagtgtctcagccacttcatctcagtctagttctaagagtgttaatttagtgtctagtgtcaatactactactgttgaacctatctcttctgatctatgtatttctgaaaaggatctatggcataggagactaggccatttctaaggttttaaatcaagtgttgaacaatgcacatgtaaaaatttcaatgaatgaacatcagaatttttgtgaagcatgccagtttggcaaatctcattccttaccctttaaattatctgattctagagctaaatctccacttgaattgattcatactgacatatggggtcctgcccctattatgtcaaatacaaatctgagattctacattcattttattgatgatttcagcagatacacttggatttatccactgaaatccaaagctgatgctcttaatgctttcactcaatttaaaaccttagttgaaaatcaatttgacactaaaatcaaaggtcttaggactgactggggtggagagtatcaagccttttccacacttgtcaaagaatgtggaatagcctttgatcatccctgtcctcacacctcagcacagaatggtcgtgctgagagaaagcacagacacattgtggagatgggattgactctcttagctcaagcctcaatgcccctcaagtattgggttgatgcttttcagacagctgtttatcttataaacagactgcctacacctgtcttagagggaaaaacaccatgtgaagtcctgtactctagaaaaccagactataccttcctaaagacctttggcacaacctgttacccttgcctgagaccctaccagaaccacaagttccaatttcactcaactagatgtgtaaatctaggatacagtgaatcccacaaaggctataaatgcctgagttccactggaagattatacatatccagaaatgttgtatttaatgagaaagagtttccattcaagtctggttttctcaacacacaccaacttgaacaaactgtcagtgtgtctacacccaactcctggtttcctttaccaacttatcaagaacaaaacactcccagtgtgccccaaagagagtcaaacagcacccagtcagttgatacagaaccaaatgaagtttcacctgcaacatcaccatcagatcagtctcatggtcaattctcacaacctcagatggatctgactggtcatttatttgtggacctgaactttgactcaaatgattcacctaccactgagtcactaggttgttctttacagcaacaacaacctacaccagaagacaacagaccaacaattgaaccaacatcaactcatcctatggttactcgttcaaaggctggagtttacaagcctaaggtgtatcttagcaaaacagaatgggaagaaaatgatgatgaaccaagctctgttgctgaggctttgaaacataaaggctggaacaaagcaatgtccactgaacacctggccttactcagaaataaaacttatgttctggttccaccttcaccagattataatgttgttggaaacaagtgggtgtacaaaaagaagtataatgcagatgggagccttcaaagactcaaagcaagattagtagccaagggctttcaccaaagaccaggtttggactttggagaaacctttagtccagttataaaggctccaacagtcagggttgtgctaacaattgcagtatctaaaggttgggaagttagacaacttgacattaataatgctttcctaaatggaaagcttgaagaggcagtgtacatgacacaaccagagggttttgttgacaaggtcagaccagaccacgtgtgaaagttggaaaaatcattatacggcctgaagcaagctcctcgagcttggtttaatcgattcaaacaaactttgacaagctggggtttcatgcaatccaaggcagacagttctctgtttatgttacaaaatcccaactttgttatcatgacactcatttacgttgatgatataatcatcactggaaataatgccactgaaattcagtcctttgttacgaaactcaacaaagtgttctctcttaaggatctggggcaactgaactacttcctgggaattgaagttcatagagactcaacagggatgtacttgacacaagggaaatacattgctgaactccttgacaaactgaaaatgaagaacatcaagccatgtcctacacctatgactgcagggaaaccaatgtccatacatgatggaattcctcttgagaatccttcacactacagaagtattattggagctctccaatatctggttcatactcgtcctgacatagcctaccacagttcactacagtggtgccaagagtcctaccacagttcactacagtggtgccaagagaatactgagatacttgaaagggacacaacatcatggtattcatattcagcatagtgacaacttaagcttgacaggattctctgatgctgattgggcttgctgccctgatgacagaaaatcaattggaggttattgtgtctactttggggaaacactggtgtcttggtcatcaaagaaacagtctgtagtatctcgttcgagtactgaatcagaatacagagccttagctcatgtcacagctgagataacttggcttgagtccctactcaaagaaatgaaatttcctctgaattctgtctcagttgtgtggtgtgacaacatgagtgcgagtgccttggctgcaaatcccgtttatcatgcaaggacaaaacatattgagttagacattcactatgttagagacaaggtgcttcaaaagcacctcgacatcagatatgtgccttcttcagaccaaatcgctgactgccttaccaaaggactctctcattcaaggttccaatttcttgttgacaagctcggagtgacacaatcaccctctcgcttgaggg

SEQ ID NO: 378609 - DNA, 2103 bp, Cannabis indica
tggagaactagacacgtgcattggacgtgttagcttcacctagtaatgttaaagatgttgaatatatctctttaatatccgtgtcataattttctttcatgttattttaagtatttatttagttatttttaaatttattttatattgttataatatatccttgcttaattttttattttatttataaaatagtattttcttcttttttattttatttgttcaaatgtgccgcaatttttgttttttttttttttggacaagcagaataaattttattcataacaaaaccaaatacatacaaaactagcacactgccacaaacaagacacatctacaaacaccatcacatagacaaaaagaaatctattacatgcctatctcccctcttaattctatcaagaatcaagtttgacaatctagctttgatagctagcttaacatcaagactcaacggctttgccattttacatgataaattaaatataaagttgttttggttacaccaaatagcatatatgatagccgagaatacaacattcagagaagtctctttcagattagtgatagttttagagcagagattacaccagtcctcaaggcttcgaggccaatgaaccgacccctgccaagaagagacctcggccaacactttcttgccaaagctacattcaaagaaagcatgttggtgagtctccaaatcactttcacaaacagggcagtcaagagacaataactttagaaatctcccaatgtgatctcgggtgaacaattagttattcaaagcttgccacgcaataaaatggtgcttcagaacacacaacttgtgccaaatagcattagcatacgacacattatcagcatcagttagagacaagtagaataatttggccttgaattttccaaattgacttgctcagttcagcttcaatccatcaaatgtacttctaagtttcaaaagtttcttgtgataccatctcacttcaccctttacctgaacaacccaaaaatctttacctttagggtaaatggagttaaccaatttaatctatatattatcttgcttgcttgaaatttcccaaatgaatggccattaaggcatgattctatttttttccatctcgaaagctaattccatcatacttcttaggaagacaaaaaaatttccaagaaacaaggtggatcttactccgatttccattagtaccccaaagaaagtccctgcatttttttttctatggtcgcaataatttttttaggtaaaataaaaatgttcatacaaaaattccttacccctagaagaaccgaattaataagttgagctctaccagcaaaggacaaattcctactagctcagatatttagctttttgtggatgttgtcaaggatgattccacaatctgaggctctccatttggttgggtgaagatgaacaccaagatactttagtgggaaaataccctcctccatctataaaatactcaatagattctctttacaattgccattgattcctccaaagtaagcatgagacttatgtttgttggccgataaatttgtagcctcacagaacttgttgaaagtatcatggattaatctaaccgatctatcattgcccttgcaaaaagttacaagatcatcagcaaagtagaagtgaacaagctttgaagacttacaaagcggatgaaactcgaagcctttacaactcgaaacttgttgaagtaatctcgttaaataatccatgataatgacaaacaagagagaggatataggatctcctcgacgaagaccctttttccctttgaatgtaccatgaagtctattcatagtaacacataggtagtacccttcaggtaggccattatccattcaataaaccgagaaggaaagcagagtccctttagtaaatcatagacaaaataccagttcatcgtatcgtatgctttgtagagattaatcttcattatgcatctagtagatatatttttccttgtgtagcctttgaggaggtcttggaagattagaatgttatgagccaacaatctattctttataaaagcaccttggttagggtgaattatgttggaatttattttaccaggatct

SEQ ID NO: 378610 - DNA, 3396 bp, Cannabis indica
tttttttttttttgtaatgttttcctttaatcaatttaccatattatatttatttctcactttgtaaattgggtggagctacttctacaactatgttgtcacttatgtggcataaaaagagtgcacactggtagccataaagggtcaggattatgcccaggaaggtagccacactggtagctctcccccatttttcataagaaaaagaagtaaaacaacaaaagcaagtgaagaaaaagagcaaatttgacataaagcaaaaagcttatcctaaggtctgcagcacctcacacaatagaggttttaaatatttgtaatgggcaatagttggaccagcaaacatctatgaggatatcaaaacccaccaaatcatatgtcccccccttcgtacattctttcaatttgtgttctattgggttcacttacaccaaggcttaaatgcattcaacttaatctgcatccatttcttccaaagccgctttagccgctgatttcgcctcttctaaaagatcttctggaacctgaaacaacataaaattcaatgttgattacccgagttacaaataaataaatatcaaccaatgttgaatcgcacatatttatgtttgattcccgaccgagaaaaacagatcagaataagatgttttagagcctcaaatacatgaagatcacacatttggtttaacaagacagaatgtgactagactattaatggatgaattgcttatatcttcattgtaaaccttgatttctttgttcaaatgagacatattacataatttgactgagagtatcaaatgcaagatgaattattaagtaaaataatctattgaatataaaatacatcaactcttagaagtaataaaattccttgattgataaattttatataaattaatgatatgaaatgggaaaaacaaaaactaaatgtagatgaagaaataagtcagcaaaaaataacaatgatgtaataagataaaataaaaaatgagttaccttctgatgttgtcggtttgattcttcacagacccagctcatttctagttcaaagcccttgtctttggcctcgtcatgtattccataaatactgctcagcatgaaaaagatgtcatcactaccgatagtcgaaataaaacaccttattctatattcacttcatgtcgcataactaggacataacatatccaaatatcatacaacacaaacaaactaaccttagaggacacaaaatgaaaatagaagcacaaagtatgcaaagttaaaagtttagatatgaatctgctcttctaattcaacagctttattattgcagcttttctaattttcaaaagcattcacgaatctccaataattgaagcaaggagaactatggtagaaccgttcaaatgtcaaagctgaagatgctaaatatcccaacaaaaatatatttacttaatcggaacttaaagtattcattcttgcaaatgtactacttccttatctatcaccatttcacatgaatcaaatttctacacaaacatcagtgtttcacagcatttacaacgccaataacgattctatagtacacatttgacacacaaaaacacgaactgcagtaaagagtattcaaccttaagaaaacatttcaaatgcataaagattggcactcacattttcgctacttcaacaatcccttgtcgacaagtcatttcagaaagattcaacttttcaatctctctgccacatgaaaaaagagaaaaataataaccaacataagtttacattgatgaaaacattcaacataagaaatatgtttcttataaaataagaacatcaagaatatgtccacaccaaatgtattaacagatggtacaatacatcaacaaaaacaatttactaaacaatgatcctatatagcagggcatataaagagcaattatgttgtcaaatgctcatcattcaaatatttttttgaacttagaatgacaatcactcaaaaaaaaaaaactaaggaaaataaccaatgaataaatagataatttataaacaaatatgctccgttttgcagtaaacaaagggaaattattaatctttgacaagaaaaacagtagcattatgtattaagacgcacgtgtttctttttctgcctcttatgcaaaaatggaacacagaagaaaatagccttgtatagcatttgatttacatttgcttttggcaacagaggaagttcagaaaaatggatttgaattctgaccaagtatgaaatattgtagctgctaattagtgttatacacatttgagatttgtaaaagtaagaaaaaaatatatggactgccacacacatcacatgaaagaaagacaaagttgtattgtttatatcattcttaagaagtctattacatctaacattgaaaaactttcaaaacagcatatgtcagtttaagaacaatccccatgttgccatatgcaatgatagacctataacagaaaagagcactacaaagatacatctgcagaaatttgcatttctgaacgaagttgcatcttagaatttccatgagttgaagtatggagagcataagaattaagaactttatgactagggactagatgatcaaattttgcaacctaatgctgtgggctaaatagaagagtctgcaagcaaaaatcttacgttttagcagcctgcctcgcccttcccaatcgcagctccaaagtacctctgaaaaagattccaaaaccaaattatttgagaacacacaacaaaacataaaaataatagaaaaagagtataccactagacctcaataacagaaaaacataaaaaataaactcacataagaaactccagatggttcaatcatgtataattgaggtccatctctgtcatagccaccaaggattattccacacccaaaggtctgtagcaaaataaaaacactcagaatacaaaggtgggctgagttgacaacactatttaatgagtcattatcaacttataatctaacctgagccaccaatatagtgtacaaagatgcacatagctggcaacacgttcagccagttccttaacagggatgcctcaccatacaaactgcaaaagtagccaatcaacggtcatggcaaaggaaaaatcataaacagcaatagctaaacatctacttcaattccgttaactttcttcacattcaaagccaagctaatgaactgtttccattcattcagtttgcttcagacaccaattgaatcaaattataaatggcccctttagaagaaaagcaccaaccgaacacaaatctaatgatatttaaatcagaataacttacctttcttaacctagcccaaaactgattaaccaaaaaaaggaaaaagctttgaaaaaaaaaataacacatatatatcattttgatctttaac

SEQ ID NO: 378611 - DNA, 1036 bp, Cannabis indica
aggcttgaagcggggacgttaaacatttggctgaagcttggagatagaaactccaaatttttccacgcttcagttgcagtaatgaaaagaagggattatatttggggactgagagataagcaaggcaatctgtgggattcaaaaggtaaagtggaaggtattataaacacttattttaatgatctatattcctccattgatccggaattctcagagaactttgacattcaaaaacaaattagcagagaagtaaatcaagatctagttgctattccttctgcagagaaaatacgaggtatagtttttgagcttcatccactcaaggcccagggaccggatggcttcttggggtgcttctttcggaaatactgggagattgttagaccgttggtactagaggcaacccaggagtttttctgtactggagtgctaaaccctctggtgaaccatacttttatctgccttattcccaaggtagatcatcctgagttaattgagcaattcaaaccaataagtctatgcgattttcagtacaaggtgatagcaaagattttatccaataggcttcgaccggttatggaggatttagtgtctccagtccagtctgctttcattccagggagatggatagctgaaacttcaattccaattcaggaattagtgcataaaatttgccgaatgaaagggaaaggtggtcttatggccattaaattagatatgcacaaggcctatgataagatggagtggagtttcctagataaagttctcgagaggaatggattcagcgagaaggctagaagtctccttatggcctgtgtagcgggagtttcttattcggtattactcaatggaaatcccttgaagaagtttgttccatatagaggacttcgccaaggagatccgttatctccttttctatttctattgtggcaagaagttttatcaaaactaatcttgaatgccgaaggacgaggtaggattcatgggattaatattgttagagatgcccctgttggaatttattttaccaggatct

SEQ ID NO: 378612 - DNA, 3377 bp, Cannabis indica
tgaggattgtttccaattttttgcactttattggaaacacttattcttttagtatctgatgataaaattgaagatttttgcttgttttgggggctttatgttatgaattttgttgggttttgaatgcaagtgtagcaacatatctttacatgtctcttttcatcttgcaggttttcggaaacatagaagagaaaattggttttggcaaaggaatttccaagctctatgctactattgacttggagaaggctagggttggaaggaccaggcttttggagaacgaagaaactaatcctaggtggtatgagtcttttcacatttactgtgctcatacggcttcaaatgttatattcactgtcaaggatgataatcctattggagcaactttaattggaagagcatatgtacctgttcaagagattttggatggggaagaagttgatagatgggttgaaatattggatgaagacaaaaaccccattcatggaggttctaagattcatgtcaaactccaatactttgatgttaccaaggaccccaattggggacgtggtattagaagtatcaaatttcctggagttccttatacttactacacacagagatcaggatgcaaagtttctctgtaccaggatgctcatgtcccagataattttgttcccaaaatccctcttgcttctggaaagaattatgagccccacagatgttgggaagacatctttgatgcaatcaccaatgctaagcatttgatctacatcactggctggtctgtttacactaattttgctctgataagagacacaaggaggccaaagcctggtggagacatcatcttgggagaactgctaaagaagaaggcaagtgaaggtgttagagttctaatgcttgtttgggatgatagaacctccattgatgtactgaaaaaggatggactgatggccacccacgatgaggaaactgaaaacttcttccagaatagtgatgtgcactgtgtattgtgcccccgtaatcctgatgatggtggaagtattatccaggactttcaagtttctgctatgttcactcatcaccagaagattgtggtggttgacagtgagttgcctggtgttggaggatcagagaagaggagaattgtaagttttgttggagggattgatttgtgtgatggacgatacgatacccccttccattcactgtttaggacattagacactgtgcaccatgatgatttccaccagcctaacttcgagggagcagcaatcactaaaggtggtcccagagagccttggcatgatatccactctaggctagaagggcccattgcttgggatgtcttgtataactttgaacagagatggagaaagcaaggagggaaagatttactccttggactcagagagcttgaagatgtttttattcccccatctcctgtcatgttcccagatgaccgtgagacttggaatgttcagctatttagatccattgatggaggtgctgcttttggcttccctgaaacccctgaagaagcagccaaagctggactagtcagtggtaaggataacatcattgaccgaagcattcaggatgcttatatcaatgctatccgacgtgcaaagaacttcatttatattgaaaatcagtatttccttggaagttcttatgcatgggctcctgagggcattaagccagaggatattggtgctttacatgttattccaagggagctttcaatgaaaatcgtcaacaagattgaagcaggggagaagtttaaagtttatgttgttgtccctatgtggccagagggtctcccagagagtggatcagttcaggcaatattagactggcagaggaggacaatggagatgatgtacaaggatattatccaagcactaaaagctcaggggctcgaggaggatcctaggaactacttgacattcttttgccttggaaatagggaggtaaagaagccaggagaatatgaacccgcagaaagaccagatgaaggttcagattatgcaagagctcaggcagcccgacgcttcatgatatatgttcataccaagatgatgattggtaagtggaaacaacttaaactctacatttaatcaatctttgatcttaatacatgttttaaaatgaattcccattccattgaaccttttcatttggataattcacagaatgtccatgtcttaaacaatttagtaaaaccaggattcaactcttttagcttgtagtattaagacaagagcaagtttgttgaaatttctatcattgtttttagtaaatcatttctgttaccaaaagttcaaattttagtttatggggataatgtgtcactccttgttgcttgcagttgatgatgaatacattatcattggatcggccaacatcaaccagaggtcaatggacggtgccagggactctgagatcgctatgggaggcttccaacctcaccatttgtcaaaccgcgttccagctcgtggtcagatccatggtttccgtatgagcctatggtatgagcaccttgggatgctagatgagtcattcctccagccagaatcagaggagtgtgtagagaaggttaaccagattgctgacaaatactgggacttgtattcaagtgagacactggaacatgatctgcccggacatctgctccgatatcccattgctgtttccagtgaaggactaatcacagagttgccaggctttgaacatttccctgacaccaaggctcgtgtactaggaaccaaatctgactacctgcctccaattctcactacttaagtgtgtgtggttgtttttgctgctgcttgagttttgagtttatgagagaataatattaataataatagctttgttagcttgtgagtttgtttggtcttagcatggagaataatagtcatttaatcagctgcgactggggtacttgtgtttatgtgtttaatgcttaattgagtcatatcagctttatcattatgtggaatattgctgtggtgtatttctaactggcttgcatggattttaatataatgctatgggcgccaatttacaacttctattaccaaacaatgacagacatggtgattgagtgaagacttgttagattgattatatttgttcttttgaaaatatatatatatggatttcaaaatatatagggaaatttacaaaaatactggaatttgagttaacttttacaaaaatactgtcacacggaaattttttcaaaaatactgtgtttttataaaacaccagtaaaacacaaagcagaacaacttaaaacaacaatagaaaactagtaaaacaccaatagaatactagtgaaaacttaacacagtatactgcagtatgaaacttataaaaaaatacag

SEQ ID NO: 378613 - DNA, 3401 bp, Cannabis indica
atatctccatctccaaattttgttcaatgaaaatggaataagacaatccaagttttgttttgcttaaaatggcctacaaccccataacaattaattcttataataaatatatatatataaatattgttatacataacattaggtgaacaaactatatagatatatattgaatattaatttttttttaagtattgttattttgtactatatagatagtgtctcattctcataattattagtttgtattttctttatattaattggttaaattaaaaatatatgagattcaatattaaaatatacactaataattatatatcattttctatgatacttaatattttaaggtaccacttaatatattattttaaaaaatattaactactaagtgacacattacggtgtcaaagcattatcggtgaaccacgatggaatcattctaatatcgagtactaccacttttgatttaataaaaaattaatattattttagaccttatattttaaaaatttaaagatcaaaccttttttattttattaaatgataaattgaattccatatttttttaaaataatattataaactcaatttttaataatttttcttttaatataactaactttcaaaataagttttagcatgaacaaaaatataaaaaaatataactaattttattgtaatattgaattattactaaattttattttaataaaaattaatttaaaattatattttatactattttaaaaaatacaaaatttaaatccaatcaataatttttataaaatataaaatctaaagcaatattacaaaaactccataaccaattatatgtaccacattggtataataatatagggacacgtattttgtcccgtagataggtctaagggtacattaaatgagtgtcagagtacgttactattttttaaacctaattacccctagattaatctcagccctcagatcaaataactctctcatttaacagctgctgtccatcacggaatacattaccgtaaaagtaacaatacagataacaaaataatagttccatataatatatattcaactatttatgataacatataacattattattattattattattattattattattattattattattgattccatgcaatgtacctaatatatattaataaatttaaagtgcaacagttgagacctaattatttaatcctgtaataggctctgggggaggactcatcttccaagttaaagaatatcagttaaatttactaaaacagtcttcctcgtataggaatcatggtcggtagttataagggtgtttttgtaatttcataaacactttagaaacgcgtgatgaatatcagtctcgtgaagaagagactcagagatattttgttcatgtattcactgacacctgtcaattgggtcccacaactgcaatcgctgtcaacttatttgcagatctatttttacaaaatacaaattgtgaagataataaaatgccactctaaatcgcttggatacacatcaatctatctgtttctaacatgacatttatctgtttctaacatgactctatcctcacgaatgagctgcaatctaagtcaatgcttctttaatgcctattatctcaacaatttcggattgaacacattcaatctttctcttcttgaatgcttctaccataacaccatgataattcttaacttagaagaatattaagtactcattttaaaatttatcaatcaaaaccttagaagaattaaatattgaatatataatttaatttaattattattataaaatattattatttatttacaaaaattactttattataatgataaatattattaatacttaataacaataattgctattataatactcttacaacaacaattaaaaaaaaaaagtctaccaccttgtagtattgttattatcataatattaaatctaatagcgatactcttatattaaattaattatttttaataaaaattatttaaaaattataattacaatgatattgtaatataatgaaaatgatgatattaacaaggaataaaaatattagaaaattatatagtagatactttaaaggatcgttttgataaattttatctatttcagtatttaaaaaaaaattactcaaatttttttataacctcgtactttgtagttatttaggaccatttgtaaattttaaataaattctgaatattctaaagtgccgaaaattatatttaacagttactgtgttaataagaaaaaataatcacatgtgcaataaaaaatatataaattttattttcagcattgtaaattacttaaaattacaagtggttataaattagtattgaaacaattaagagttctaccaaaatagctcatgtagacttatcctataatatattgatcactatgaggtcttcatatttttaaaataaaaataacaataaaaaccaaacataacttaaatacaacgatgaacaaaacataacaaaaatataacatatatttttcttgaatggaggttgaaaaaaaaaaaattaaaatatattagtatgaaacaatttcataaagaactatcactataatcaagtgccacttatacaagaaaccaataacattacctgaaattgagtacattgatttcgattcaaaccccaattttagatacaagatcatctcataattttatggtttattattttctcatttaaaaaaaaatgaagaattaaggcatagattaaaagtagtaatcatctaaaaataacattcaacagttcactcacgttttttattcttctaaacactcttatatctcctttgaataaaatgaatggttcaaaaatacaaagaaatttccacttttcttcttaaaatattgactataaatatatatatatatttttaattaatgtcacattaattcttcaaattatagtgccgacgaaattgacctattaattagagaaaattgaaaaaaaaaataaataaataaaaagacatatgaaaacctaaactttactttttttgtgtgtgttatatataattattagtcctaattacactttaattatataattaaatattattccttaacgtaatttaaacgtacatatcaaatttatgtataccacacaattgtaagatactcaatcaacactcactagtcaaaaaaacataaaatattttaatttataatatttcaaatggtttaactaaaatttctcatttacaataaaaaaaaatttttacattatcaaaataattataataacaataatttgtcatgtaaggctgacataacggatatgcatggcgtgtttgttggttaaaatagaataatattagaaagttactaaactaaatatagaattttattttattttatt

SEQ ID NO: 378614 - DNA, 1071 bp, Cannabis indica
aaagtaaaaaaatttgtagtgaagacctactcctcgaccctccggcaagatctgggctacgattacacctgcgaaccctattcctcaattacatctgcaaagccttgctctttagttaaactagcaagcctctgctcagtcacattgtgttgctcctcgaccaagtcctcataaacatggtacgtgcatcaactcagcgtacacgcttggatctgtcttcaactaatactctatgagaaatataggaagaatatttcgctcaatagtcaattattttaatcttttattattgtttaaatttgagcatttattattcattaataatcttttacactccaaagtgatctataactgttaatgccttgatcttatttcttctttcaagtttctttctaacatctatctctgtttcaggattatatttggacaaactcgatttatttttatattcaattcaagtgtcatcaatatgataaagctatagcagaataggttattgccgaacctaaagactgaaccattatatataaaaattggccgtattatttactctatattctttattaatacctgtcgtattgacgtcttactcgtagttttgaacatttaaagtgatcaatatcttatatgtaatcactacataaaagctaaagcaaaattaatgtgtcaataatgatgatcttgatatagctgacctgacctttgtgcacatatgtaactataaaacaaggttgactaaatttacttaatatttaattttaaaaatgttttgtcttaaaggattgaaactgcctcttgggtattagacacgtaagtacgttaccattacaaaaagaattattattataaaacattaacaaataagagtaattatactcagttacctttgtattagtggctgctttaaacgccgccgataaaattgttaatttgtttttagaccttatctggattagccaatttttgtatttataattagtggtctgtgccggcttaagctacattccacttatatttgtcttctaatgcagtcccataaattaataatagttttctttttttttttaaaaa

SEQ ID NO: 378615 - DNA, 6578 bp, Cannabis indica
taaactaaaaaaaaaaaaaaaaaaaaaaataaaaaaaaaaaaaaaaaaaaaaccctaatgttattcatttgtgttaattttcatttattaagataaccaaatttgttaagataaccagccatgaagaggtaaaatcctctaaatcttaattttgtttttagtcttctcatttattttaatttgttaagtatcgaggtaagattgccaatatgtaataagtgtacacacggcaagttttcactgtgtaattattgttgatagtttgatctatgaattttcatttattttgttagatttgttttgtgattgttttttggatttttttgattttggtttttaggtgttgacttttagattttagaaatgcaatggttctggtggcaatgttagggttgcgagggtggtggcggcggcggtggcgtggttgcggtagtgattttggttcatgtggtattggttaagaaaaataagaaaaagaatagtttttattttattttgaagttattttatcatttatttttctaattttaatttaattttttgtaatatttaaatcattaatattaagtaaattaataaaaatttgctatgcatatatttatgtatactttgaaagttcaaaatagatgaaaaagtgaagacaaaaacagatctgaaattaagagagattcaccctcaaaattaaactaaaatttaatcaacaaaattttaacaactactctcaatattatgtaatttcaaacataatcttaataccttatgtttacaataatagtacttatatttttataaaaataaagacttagtattctaaactcaaataatttttttttttttaaatgtgacagaactgcttaaatttcaaatttaagcacttaatcaagtataagtaaaaacagatttaacatattgttaaaatttgcttactaaatttagaatatttatagaataattgggtttggagattggaagagaagaactgcaatgaaaatttttattaaagaaaaaaaataccaccctgtccaattatcaagactttttcccattaacccaatttaagaatttgacttatttacatgaacccataattgcattgggacaaaactacttaaacccaaaacctatatatgactttgctcaattgtttgttgcaaaatcatgaattttgagaaatcaagtttgtgcctttgcagaccttgatctgatgatgatatgatatgatatgcccataatcccacatacttagtctgctaattacctcaagattactgccccagtcaacaactaatctgtatttaacaatcctgcataaacatatcattataaaatcatcaactgttaacaacagacaattacacataataaagcaatggaagtaagaaagatggctacttacaattttaagcaatattcgaacatgttatgcgccaaagtactgtatcaaatcatcgtcaagcaaaaggtcgtcgagcacacttgtcccgtcgattccaaaattgagagggctgttgaatcctccgaaatcaagtgacaaactgtcgagtggagaaccgaagtgagtatcgacaggtctgtcttgttcattatttacgtagtatggcaagtctcctccactaatctcgctactgtttctatgtactgttgggagatgaactccatctgctggcctaacataactttcattcattgcaattggagcccgctgtcgttcatgtttaggttcataatcaactgatggattatagaaattatatgtatcgctatgatgcattccagtgttcggaattccatggaaatgcattgctgctacactgccttcatgcctgctctgagttgaaacttcattattaggtaatgcatataagctgttgaaatcagaaactggtaattgagattcgacatcaatatccttgtctagtgaccgtaaacctgttactgtctcgtcttcctgttgattttgatcattttggtatccaattaagtgtacctcttcagtgtaatttatgtcaggtatgttgtttattggttcaataggcataacctcattttgagatggctgaggcaattcatcggtaggttttgatcttaaccgaggtctttttctctttggtggcttatccggtttctctttatcttggccaggttgagaagtattgttctgttggctacctgaaggttctacatccatagattgacttctcctctcatccctagacgaaacagaacctaaaccatcatcagcaccgtcgacatcatagttactgtcactattagcagtgacttgtttttcaccacggcctggtggaatctcggttactccagacatcccattatcgctactaggttgccgaatgagagcttcctctcggctcaaaactcctaaccagattgcactctccttcgctgtcatcttatcctgtaaacactttgactggcgaacgtgtctccttatctttgcaatatccggagacatgtgcttaatcacagctgttaaaactccaactttccacatcttcttcaagtcgtgtggcttcttatacgggggagtttgagcatggggtagcccgagcttcacccaccaatcttccttcccagttggccaccaaggaggtggaactttcttttctaatggaaacttcctttgaggaggttcacagtgttgcatcaaagaagacaaaagtgatccaagagttgcatcttgcaagtcctggagaatgctctgtgaatttccatttcgattattgtctgcctcacacatggcaagacactccgcttcatacttagctatggcagccggtccattcttatcaaacttcactttttctttccaccaagctctaatattatccgaagcaccactcaccggctttcccttctcaggaatgataccataaacgaaaccacgagctttgcacacttccataagcttcaacatatacttgagaattccatcctgtgctctagacattttctttctccgtgcctgatcagaagtctgcttcggcttttgcttctctgcagcttgctgagctgcaagcttctgtctttccttaagtcttttgagcttgatacgatccttccacattcgcctttccaattcctccggctcaatctcttcatcactgacatccttgtctgctatatcatcgcaccttaagtcatcaacttctatgtccgaactatcaccatcataagccattggaagtctcaattccaattcacaataacactctaattgacccttgagttgctaactccaaatcacacaacagtcaccttaaacaaaccaaatactcttattaggctctcagtcaaaaaaggaagtaacattctcctagtctctacaataaccatccatcataccaattctcagaacaacaacattaatgggagtcaacaaattcaaaacagtcattatctatacagacatgaataatgttacaacaaatgactaaaatataatcaaacacacactcaactacaagagacatgaaattaaatactgaattcatgaatcaaaagcacttaagaagagccctcttatgaaagttgaataaaaatcaaataaattacaacataaaaggattgtgtattctattctaaataattccccagaaaaaggagcttaaatcaattaaatataagatatatatttatatatatatatatatatatatatataacttacccagtatcagcagcagcagcagcttgttcaaatccacccattaattgaagaaggaccctcaatttgaaaaacctaaaagttcaaactttcttgctggggtttgttatgataggtggcaacacacgaaaagaaccctaaaaattaaaattttatttctgggggtttgttttctttctcaaaatattggcctgaaaaaagtagcaacacgattgggataggcgaatccaatccaatccaatcccaatcaaaattgaaatccaaaaaaggggttatttgtaaagcctagaaatttcacagacaaaaaacaaaagagttgtaagaagcaggcgagagattatgatgatgatgatgaagaagaaaggtcgtagaaatgtacgaaatcaactcgaacttcgctaatgccgagatttgatcctctgcaacgcacttttcaactcttttatttgctttatagtccttctccactctctttctgatattgcagaaaagtcctcaagttattgaatatcaaaaaaattaccccaaatgcaaaatattaaattgtatttttggaagggtctttctaaaattattaacattttgatccctttattaaagaccattgaatatttcattcattaatattttcaattttcatctccaacctggcctaaacctaatgctatatatcataattttgaaaaggtttaattgcatctaataatagtattgttattacttttgtttaccttaattagaatatttgcattaatttttatataaaattaatgttttggaaaatatttaaatttttaaagaattgaagaatagaagatctttttatataaatgtgtgattatattttacagaaattgtttcttattttggtgatgaaataagtagaacattttgcattcctaattcattttattctatatttggaaataactataaatattcttaaatggaaaaataaaaaacatatatagtgggaaaataaaaaataatatgtatatatttgttaattatagaaatgtctaagttcatagaatctcttggcatttattgcaatgctttagaatagagacaacttttcttttttgtcaatttgctatttttatttattttttaattattattataaaaaatgttgaaacattaataatagattctgtggttttttttttggtgtgtggtaagaattggtactcggaattaataagttcaatatgcaacatgcttctctaataactttctttttaggtcctcctaaaattgaaaactttcatttcttatgcaaaatatacttatacctttgcatttaaatcttaatatatgtttattattattattaagggatcacttagtgcatattcttttctcactttttcagtagttttgacaagtttaaggattacgtgttaattataagggtcttataatttattctatcttaattaggtcaacgatacactttgtgagagttttcatcacattaaggataataccagcacaataagctagctttctaaaaggttaagtataatctctcacaatcagtgattgtagtgaaattagaatctatgactcaagcaaggaagaatgctagtaaaaactttattatcactacaccacataatgtggtaaatcttgatataatatatattttttgtttgcgattattacacttttatattagcttaataatattttttcatatagtcatacttttgcacaaccttttattttattggttaattaagatttttgtttctaaactttgagatgtatcaaattatactttttaaattttttggtcgttaaaaatttgctttgaactattgaaattgttagattttaaggatttttgtataattttattcaattttactaattcgatgattgtccagttattaaatcatgctccacaaacttcaatatctataaatcatgcctatcgaactttgacgtgtaccaaatcatattttctgaactttcatccatgttagactttccttattaaaattggacaaaattccttaaatttaagaatctcaacaattcaaagagatttttaacgaccttaaaagttcaagggtataatttgatacatgtcaaagttcggctaataaaaaatctaattagtctaatatttttttcaccaaaattgttataattagaagttaattaattctctaattaatattgacaattaattgaggagtgctaccgttaaccttttattacaatctaaggtcaattcctgtgcccgaaaacatatgtcagaatattttttatgccgatgtttgttgtgcttacaatattgtccctgtaaattcttaatttttttaatagtttacagtgccgaaaatacatttaaagttttttgaacattcatgacaaactgaaatattagatattgtaaactattcagaattttataaaaatttatagaggtaatactgtaactataacgaataccactataaaaaaaatattttgacatgtgatttcgaacttaaaaaattaattaaaaaattataattgaagattattataattgtaatgtgtaaattgtatcatcacttagttatgttgacctttttcttattttatttatatatgaataaaaaaaaaagaataatggctcgaaacttacacaattttagcttttcctttccaatattatcttcataaacaaaaatgaaagaaatttgttgtaatcttactttttccaatgagtttttaagattacaataattgtaccaattcttttttaataggcaataagctttattcattttttttttctgacttttataagttacttgactaaaaaataaattaagggtaaataccattttggaccctgtattttataaaagttaccaattggaccctctgttttgtt

SEQ ID NO: 378616 - DNA, 1907 bp, Cannabis indica
tttattttagggttctaaacctacaacaaggtacctttccaattgatttttgttttatctatgtacattgcactatgttcgatttagttttttttttcttctggctcttgtggaaactatcaactaattttatgaagaactatattgaaaaatcattcagttgacagcatatttttacaaaaaatcttacttttaatcataataaaatttgtgactaaaaataaaaaaattgtcactagctttaaatctcgactgaaaaattcatggacaaaggtattagtcacaaaaattacagtttgttataactaaatgtgtttttagtgacaatacttgttacgactaaaattaaattagtgacaacttgtatctacatactatgttttaatcacaaataattttttgctatgattaaaaatcacatttagtcagaaaaaaattatataatcactaaaaggaacttattttttttttgtagcaataatataccttttaatttctaagttttagaactggtgtaaaaccctgatatctttcttagtcgtggtcatagtcctgttgtttaagtttcttagtctttattgattaattaactaattaaattattatctttgtatgggtagttggtgaaaattattacttcaggagtaatgtgtgtcaagatgttgttagaaaatgaagaatttacataaaaagccaatttctgtctataagcttgttaagaatttcaataattaagttttcttttaaaatttattcattttttcttcatttattattggtattattggaaactttcgatattaaacaatataaattatgaaggaattagcttaatcatgtgccttgtttggtgacaaataattgtagtctttgattctagtccatttcaaatcatgaagtggttccatccagcccagggaattgtaggatcaaccttagtaggagtttttgcctatagtgtcttaattaatctatatctagctagtaacttagcaattgtggttgaatggatcagttcaattttacatatttattattcatttatataatagcatcaaaaaatattaatctcaaattttggtaaatatataattagtttaataatatggttgaagagaagttatttctttgcataatgggcttgaaatgtttgctgaatttaaatgtttgttgtaagtgtcgggaatgatgacaagtcaaatgctaagcacgcaaaggcctttgataaggggaaaaatatagttacggctgaggtaaatttaacatgtatatgcaaatgtgtgctcttacatcatcattattatcgtattgtattgctaccttttacacacttccattccatcattcagctggggaggaatctcgaccgtcaaagctctccttgcttctaatgcgaatcaaaagactgaaaaatgattccactccagcaagaaaatgtatgttgacactttttagttgaaggagccaacaaccgagattgaatttaaactggcaatgtgtattgagtgagtgatttgcattgttttacattattttcattacatttataggggagccacatatatatacatatatatagggcatggctgttgtcacgcatgagttttttggagtgactagtgccgcacacgtttattgccgttagattgtcttaattttcatctaaaggttgataatagatacccaatatatcattttcatataatatttaatttgataaatagaggggtatttaacttgaaaattggaagtgtaattggttgcaaactttttgatttacgcgcctatttagtaaagtgaaggaaattttttcagctctaaagaacttcactttcacaaacaaaaactcactttcagctaaaaaaataaaaaagaagctccaaaaatctcaaacttcagttctcttt

SEQ ID NO: 378617 - DNA, 4982 bp, Cannabis indica
ttctctttctctcggtacgtacctcttctcttgtctgaaactctctccctctctcgcctgaacaacccacatgtgacagcaagtacaggcaacatcctccaagaatccgtcgagtacaggcagatttctttctcagcgaaggcccgacgtcgacggctccacccacccaagaagacccaacgtcgatggctccgctgtgactgtttggtatgtgtatgtatttatatatattattagttttattgtttggtaagtggtgggtgattgtttgattagagtagaactccttcacctaccgtctaaacaagtaaagttgttggctcccagcaaattatgttctaatttataatctttaaccataggttgaactccattttgcaagtgatcatgtagtcggctaaacatgggacaaccccaaaaaaattacatttattattattatttcattatctgaactagcttcttttgtttattgtatgtatttgttcacactttgatttgaacttttgggttgaattgttacactgaacttgctgatcgatattattatgatggtgaaaaacaagtttgatttgcttgtttataattgaagtaatttgtgttatatttgtaatatactactttggtagagacacttgtctaaacatttgataaggtttatggggttaatgtgcattggatggtatttgtgtctgtttacgccagagtttgagtcacaatataacaaaagtttatttttagattatgcaaattggatttaagattctaaagtaaatagattaacaggaaggatcaatcaaataaatctaaaatttgtttctatttaggtgattttagattcaattaataaactatttactttaccctttatttctcctttagtgagagaatgtaactctgtacttatgttttatcataataatgatgtctctttgtgctcttcagaatgtatcgtctaaaaatgttaaaatcttcaaatctgttatgatttctatcatcctttaacaggtacacaacaaacgatgaaaaatttcttgcaacaagatggaaatcaactttatgcaaattgtggtactccagatccaaaataggtataagtttcttgttatttgatcctttttggcgctctcattttgagtttacatgttgctttgagtatgtagatgacttacaaaggaaataatatgcatttgcgagtgactgtagaaataatatattccatttgtaataaaaagtggtagctaatattttcttacagaattggattaaacacggttagcgacttactctttttcgttttacccttgtgagtgatgagatattcttatagtatgatacgtggaaagtagaaagggacgaatgagaattaatatatatctcaaacttgtacctttacattaggattaatctcttttttgcacagtgcttctgtttcattccctagctctttatatattaactttgatattgttcatacctcacctaaaatcagactacaatccaatctattatcaattatcaattatcttgagacttttttttagaaaagtgaaaagattgtatgacaaacttatttggtgaaaaaatcaaaataattaagttggtcatttccaatttagagagaatagtgcactaaagagatgcacacataattgcctactcaatttagggtattaaacttttattttatacaaaataagtgattagtatttcttataagaaactgttaaatatcataacctttttttattaaaaaaacaacatataacattaaataaattaattacctgaagtttcattaattaagtgacttttttctaactatttatttgagatgttatgttacatatcatcattgacatttaaattctttggtagttttgttggaagggatggtattgaatatttgtaaaattgtaatagaaacttgtactaaaatatatcttggagtaatatagccaatgataccaaaaaattgatttggtagctattccttgcatatttactacagattcttaagctcttactttgattgattgtgcaccagatccttaaattttggagtactcatttgtatcaagtgctttggagtacatcgaagccttggtgttcatataacaaaggtatagctctgatcatgcttgatttaattttttgaaaataaattatattagtgaaagatgaaacttctatttttttatgcatagtataatcttcagttaaatgaaacctcaagagtgaccaattgtactactcttagattagtttagaactaatattcgaaatttttgagtgataattattagttacctataatattctgtatcaccttggttacattttagatttgttaaatatcaatttctttgagtattttcttagaaataaaatggtttaagttttcaacttagattttgagggttgagtagatcattttaatttattattactctatattttttttgttaatttgaaatcaatggtggtaacatgttttttaggttgaatagaggggtcatgtttagtatcatcatactagttattcaagtgaaactctcgggcagagtctacgggcagttttgattaatatgcgagatgggtcttggaggttcaaggttcagttggcagcggcagagtctgctctggaagctgaaaccaaagcaatttagatggctatatcttggattaaactcaggacagatgcttcaatagggatagcctcagattgtttaattgctatccaggccttgtcaaatgggaagtgtgtgccggattggaagtttttcaatatttctctagctattttacatttagttaaaagttttaaagcttgtaattttagttttgttaagcgttcgaacttgtcttttgttgatggtttggccaaaagtgttaagagtttcgacactggctgctggtgattatgtaggggaaggcatcccctgtagtgcccaacttgttttgccagtaatgaacttattgttaccttacaaaaaaaaaaaaaaaagtagaaactctcgggcataaaaaatatcattggctgatatttggaaggatctcatctcactctttctttaataaataaataaaataagcattttagcaaattagtagatacagaaaaaaaaatacataaaaaattgtattgccattatgaatttaaagtcaaaatgctcttattattgaagattaagtttaagaggctactaatgaaaaactgaacagagaaacttattatatgatatggtttgatttttatatataaaaagtttctattgaaaacaattgttctcaatgtccaaaataatctaatattgtacaaattagaaattctaaaactttttccatatgctaattgcagagaagaattttaaaaacttacctttgaacaaaatttgtcattagactttttaatttaatgttgtatttcaaggtattgaatgtgttgattgtttattggattgatcaaaatatttttgtaaatgaatacaagaataattaactaccaatcagttgtcttatttgattttttagtttcaaaacagtttttttattgatatgcgtctagctaggtcaagtcaatatacatgtataactacgtttcaagtcatgagttcagaaatatagtttctagtatgaatgctaaggatttcaataaaaaaaaaaaaaagcataaatgaagacttgtgattcttatatgtattctttgaattggctttcaagtaattaggtgtatagagacttttttttaatctgatgttggcttctttcttcttcttctttttttttcagggctggggtggaatgtatggtggtagtggtgcggtggtactttttgtatagaataataatgtataaatttagatttgtgtatatttttgaataaatataatcttttgtctgatttttaaattttggtataaatatggtggtagtgtggtcgttcagtattttttatttttatttttattttttttgtttcagttcataaccgaagcaataaatcaatttgcgttggtgcattactatttgtttcaattatgaactgaagcaaaaaccttgtatcgatgcattactattttcttcggttatgaaccaaagcaaaaatcttttggcatcagttaataagtgaagtaaaaaatatcaacatttgcgtataacgttggttactccaactgacgaaaattcttaatatgtcacttacaaactgaagcaaaaagtcatttttgtagtagtaaatatatatatatatatttacatatctattctatataaaatgtggttatataactgaattcttggtttaacgatactttttgagtttctacgttaactttaacagaatatcctattaattaacagaatattctttattaattttataatattattatatatgtttaaaaataaaaattaaactcgtgaaaccctaatcatccacatagcccgacaagaccttcgtcgaagatcgattctcaggcttagcactgaacttcgagatcgacgaagcttttgtagaagaatatcggttggattctatcatgataattgccactcaaagccctcgagaatgattagattaaagccccaatcgtctctctcatgctccccgctaatcccaagatctatatttgaaacttaagtcattgatttcaaatccattctgtgtcaaaatgtgttgggttttgtgccttaaataaaacccatttcaatataatcagatttactaattaataaagatcagaaatcacattctatgttgcatggttcacatgatttgtttcatgattatatttaatgtataaattctattaagaacagaacatatgtatttgttcatgattatagtgttgtcaacacattggaatataatcatgattatatgttcaaaagtttaattccctggtcagttcactggacttagactggcatgataatcagctataggtatacttacaccttggataagtgttatatccttt

SEQ ID NO: 378618 - DNA, 6771 bp, Cannabis indica
gggtgtgcagatccataatgaactatagaaattattatatccatcaaataacaccaaaagtgttggtttcaaaagatggaatgtctaatgttttttactcggaaaacttattggaatgttgggagcgtgtcatagtgaaaagagttaagtgcaagatggcaggtcaaggagtggcatttttttttctcattgtgcacctttaggctacctctggtggctgaggctgttactgtttttgttttaaggagcttgataattcgtccttttagacaacacttgcactttttagagtagaccatttttgaaaatatcatatttatagtgttttcttacatctgaggaatactatgatcctaagaggaaaataaacaaatcaaccattttttccttaacgacaaatcaactattttaaaagcaagcaattgggccattatttattcagaagttcaagtaatagggattgaagcatgccatttttgttctaaacttttgttttgaggaatgagatggttaggctcagttacatatgagtggtggattggatgtacttctcttatttacagctaatggactggttttacttgcatttgtgtatacgctgtgaaatttgttttcttgtggtggacaaagctacttattgatgtttcattttgatattatatttattcatgaaaggatattttccttgcataattttttctgagttgttttgtttggagttcacttagttgaggttaccaaattaaatagtgatacaattttgacagtcactcatattggctactatattcaatatctgctgtcattaccctttatgcatgcattaagcttgggctgatgtttacctttttcgatgatgactgtcatacttatattggtttgtgattttctattggtccttttgtccttggacttaatttatctacttgataatatgtagttcaggagacatattctctactcacaaaggctcatagcaaagaaattatttggtctgtctgaagattgtttcgacctgattaggaaagatttggcatgattagataaaccatgatccattataaggcttctagcatactgttctaagttagaaagaccttaattttaggagttatgcttgtaactacttgccatatctgtaacatttttctacttgtgatcattagggccttcctatactatctcaaaccatgtttcttagtgtttttatttgataagggacctcttacaacatatttttgctattagttattcattatatgacaaatactttatctgacatggttgttctagtttcattatatattatggcaacacatattttaagcttttttaatgtaatataatggaatttgttgtatgtttcttatctttgttttttctgtcctcagaaattccttcttagtggaagattgatctttgggcctgatgcaaggtcattacttgtcactttattgctgattctagctccagttatcatcttttgcgcatttgttgggaggcatcttcgacatgaattttcaccacgtaattcaggatatgcaattctcgtggtggcaattatctttacaatccatgttagtcttcttaaccccttatttattctcatcaataattgagttcttgaaagcatgatgaagtatcatgtacagtgcagggtatgtccacatacagattgtttatattttatggcccgtatgttacaagaaagtctgcaatgcctttttcagttagcagattgcccttcattatgattataattcttacttgtgctgtgatattatttttatttatagcttttgaagaatttttaccatttgccgactagaattctcggtgtagtaattgcacacaagttatgtcatttgattgtagttttcccttttttcagtttaataaacattctccatttttcctatctttctatcaactttttccacccttctatatgatatacattctccataagcctactcaataaaatctctgtttggttcaaatttttataatttgcaacctgaatttctacatactggtctagttaataaattgtctttgatgagttgagtgcacgaaagattttagtccaatggtactttagtgtttcaaatttgttatgcctgaatgttgagggtgttccattgcttttgcaattcttgggcttccattgcactttgcttatttcaaactagagagtcatccaagatgttacttgtacaattccaagtaattataattattaattggtcaccttaggaatgtcaattttcgatgcttctcccattgagttaatcttttctcttacatattttgactgacatttctgtactattatggtagatctaccagtatttaattcattagttaatgttgataggtgttggtgcttctttttcttacttcagcccgggacccgggaatcatcccacgtaatttacaccctccagaggaagattttcgctatgacaattctgtgtcaaatgagatcgggggtagacaaactcctagccttcagttccctcggacgaaagatgtaatggtcaatggccttcctgtgagggtgaaatattgtgagacatgtatgctatatcgtcctcctcgttgctcccattgttccatttgcaacaattgtgtggagcgatttgatcatcattgcccttgggtaggacaatgcattggattggtatgctgttaacattcaatttttaccttactatcttcattatttcgagttttgtttgctggctttcaaaagttattattagatttctaattgcatgtttaaatgtgcagcgaaactaccggtacttcttcctgtttgtttcttcttcaactcttctttgcatctttgtgttttccttatcagctttgtacatcaaggttctgatggatgatcataggactacagtttggaaggcaatgaaagattctcctgcttctgtgatattaatggcttattgtttcatctcactttggtttgttggtggattaactggcttccacttgtaccttataggtacaaaccaggttagttaattatttttcttcccctctctacatttttggagtagctttattataactgtataatctaaatttatcgggttttgtcaaatgatggttcacaatcttttgtttgtggtctttgatttgacttaagcatatcctttggttagacaatcagttatcctgaatggaggaggtttacatctcgtgaatttattagtgattctaatcactttgtccaaaaaaaaaaaaaacaaagttatggctggagggtggtagaaattgaaaatcgatagtcgactgttttttatttttttttgtaaagaagggtttattgtgtaaccttattttttctgttttacagactacgtatgaaaatttccgatacagagcggacaacagaatcaatgtctacaatcggggctgtctgaacaattttcttgaagtatttttcacgaaagtaaaaccctcgaggaacaacttccgtgcatttgttcaagaggaggtacaaaagccgatgactttgccctctccacgagcaggacaagatgatatggctggggatccacgctcgaaggtggaagatgatttagagataggcgaagatctgttgaagatctcacaacgccgtaatttcgaagagatggatgaggacattcgtagtagaggaattgatgaggacatgcgtagtagaggaggatttgatgaggacatacgtagtagaggattcgatgatgatgtacgtagcagaggacacgatgatgacatgcgaagtagactcgatgaggatatgcgtattagaattgatgaagacattcatagtagaggagttgatgacgacatacgcagtagaggtagcaacggacctcccctaaacaactccgaggcaggctcagttatgagttctgaccatcgtgctaccactatacgatcagaaactcgacactcgagttggggaaggagaagtggaagctgggaaattgcaccagatgatgttgctaattccaatgtcaccgagagcagaagttatgtcactccgaaggatgcacgactatgatatgattggttagtggactgtacatttgatctttcttagcatgacaatgacaaatcatgtgggtaatctgtgattatttggtagcccataacctggttttgggaaaagtaaaaaaatttgccattgacaggaaaaaaagaagaaaaagaaaaccttacaattgcaccaggtggggttctgatgtattttcctcttaggtatgaaaattgaaaacaaacttaaatgttccttctttttgtgggaaaatggtttgctcttatattttttcttctgctgatgaatagaatgtgtgtttgtaattttttggaaggtaagtgggatggtatcttttgccaaaattgtcctcttttttgggttattgtgtaacagtttgcttctgtgaaattggtaatattgtgatgatggctttattttttttagtgtgtaattagtactccaaaatatatcactatattctaccaaaaagacatttcatttcttctattgaccaatttatatatgggtattgattagtagttcttagcactgtctagacgtgtcactttagaattaattagtgatactctctctaaaaaataatacattaaattaagtgagatccgatatttaattgtaccaataacaatattaatacgtaagagagtgttagacaactggtaccttttaacatttctctttatgtataggtgtttactataattgttacttctcaagaaagtgacaacataaatttacatagtaaaaatttacatagtaaattattcttatttttgttgtgcttttatttttataaattgaaggataaaacgacatcaaataaggcttttataagaggagaaagtgccatcaatgatcaaattgtttggtaaaaaaaatggaaaaaatgaagagaatagaagttgccttttgttaagataacgacactgaattgttgtcgtttttgtggtaaacaacaaaaatgaaaagattgtttatatagaagcaagcacaaaatacgaagaaagttctgcacacgccctttgagaagatgttaaatattataggttgattaaaatatttggatcatgacatttgcttcttttttttttggtttagttttttaatataatcatattataatttctttgatttgtttattaattaagttactacttgttagttgttactgacttcttcttgtttcattattaggagtataatctgacaagggctattctaatagcattgtatttaatctaatgagaatcttgaggctagactagatttgattaaaataatacaatgtaataagaaattatggaattcaagaactaatctctcctaataggttcgtgtttagaaaatataattggcaattaaattcttaaatgttttttcattattgtctaacacttatacttagattgtggattttgtaaaacttgagaggacagattttgttaataatataatttttttttgagaacaataaatttttttaattaataaataaattaggcaatagtcatagcatcaataagataaccaaataataccgtttacaaaaataaaaataaaaaacttaataatatgtttaactaaaatatcaataagccgacgcgtcaaaaaaaaaaaaaatcaataagccaagaatattaagcttgaatcacaaacttttgcatgtaataataaattttattgttacaaaaaatacaaaatcattgaattacaaaagttatatttttcagagttataattattttagtgacaacataaaatataataatatttttgagtcaaaaattgtgttaccacttaaatgtcattttttagtgcattgtaaaaagtaacaagggcaattataagtcatctatcctattaagttttcctaatttttctaagttattttgttttttttttttcatcttctttaaaatccaaaacaatcaaaatatatttatataaaaatacaccttacctaaccttctatctcactatatatatagtccaacctctatttgttaaagatatcaaaaatcacacaatacacaatactaacttctactcccatacactactaaacaccatatatccataatccattatgaattttccaaacctaaaaatctcatcacaactttccattttcttgttcttcttattagtatcaacaacaacaacaacaacaaaagcaatatcatcaccatcatatttggttaacagaatatgcaaaaataccctaaactacaataagtgttgggcaattcttggatccgattctcaagcgaaaaccacaacagattatagagttcttgccaaaacagctcttcaattatcgattttgagcacgaaagatagccttaacttcctcattcgaaaaatagagtctgaacaagaagtggtaaaagcacttaaggagtgtgctatttggtatgataatgcaattaaagctttcaagaatgcaatgaatgaaatcaacatgggtaaattggctgattatcacacctttatgaaccaagctcattattgtcaaattgctttgaaaaatagataccttccttctgtgtcccaaataaactctcaattggaattgtatagtgatattaattttgtaatcactaagattcttaaacaataatatggtatgtattgttatgttattaccatcaaataaataaatttacacaaaataaatttatatatgtaataatctctctctctctctctct

SEQ ID NO: 378619 - DNA, 7316 bp, Cannabis indica
aaaataataatttcacaaattagtatcttgcccttaaaaatttatttgacatagaaattaattttcacttgtaattcatttattaaataaaactttccacagtacagtgttgtataaaggtgactcggggaccatggacctatatttcgaagctccaataatccttgattattatcaatctcattaataaaataatccggtttattcattctataatttactctactataaatatagaaatacactcctggacaatatagaattatatttacataattcttaattgtagtctattgatataatcagtataagcaatttgccctccaatcattagttcattattaaagttgaccaaaaaactattttacccttctaattatctcttcctttcttatgtaccattagttcaatttgaacagttaatctataacttattatagatttagatccaactgttagtacttccagaattaacactataagaaaactaatattcgatccgttaggaaagcttggattccactattgtataacatgttcacagccactcatgttattaagttcccaaaatagatgttgaaagaatcatcttctctgagcaactttaacaagtgaatcaaagaactcaatgagcataaataaaagctcatgtatactcagaattcaggctgatctactaatgatcatcactgtgatatgaataactctttcatgttaaacgacatgttaatgaaagatgtttattacacattggtctagtcacgcataatcaaattatacacagtacctttactacatgtccatctacatatgtgatccgagtcatgatcacacacactagaagtatagtgtatagaaaactgtacttagcaattccatattaaatattcccattactttaatacactaccaacttattctattcatatcgtataattttaattctcttgtatatccttacaagattataccttccccatatgaataaggaattttttgatattttataattatactcttataattgtatgccatatattctctaaaatattttcaattaattacttgcttttagggcataaatcccaacagtttccacgtatgcaagaaagacacactgggggtcaaatacctcagagaggtataccttaagctcttagagctcaaatacccttgccagcacaaaaccccggtgcaactaggcgtaccacccagacatcccccttgacctaatgggagagtggcaaaaatatccagaggaccccacgtcgaaggaacggcccgtaatgagttgacatggcttgcacaagagttggataattgtgaagaagtatggaaagttacccaactacttgcccaaaggccaaggctcatggatcaacccatcacctttacctaagaagacgccaaatgagtgcacttcccatcacgatcctctggtcattgaagtgcccacgacaaacaaaatagtggcccacatcttgataaataatgggagtttaacaaacctactattcaaagatgcattcctagccatagacctcacaaattaggacatgtcccccagtggttcacgacttacgggattcaacaaagattccttgatcctaatggggaaaattcgattactcatcacgttgtgtccagacaccctacaaagcaccttcaagtattgtactttcatcgttattgattgcccaactcatataatgccatcttgggacgattgaacttggtgaaatttgggtcgtgacctcgatctgacccttatgtctcaagtttccaacccagtccgaaggagtgagaactgtctgtggaaaccaagccgatgccaaaaagtgctacattgtagctacaaatctatcagttttggtattcgattatggaaaggatggtgaccaacaatatgaagaggataagatggatccgcctgtggggacaaagaaggtatcggagcccatggaagaaacagaagaaattaaaatttccaatcagtatccaaccaaagtcattcacataggaagaaaccttgacaccaaagttagggaggagatcggaggcactctcagggaatctctggacatctttacctggtttcacgaggatatgataggcattgacccaaatgaaaattttcatgtattgcatatgaatccagaaatgccaaccgtgcaacagaaaagacgttccttaggccccttaaaggtagaagcttcaaagaaaggagtggtgaagatgttagcaaacattttcatctaggatgtatattactcgacatggttagaaaacccagtccttgtcctaaagcccaataggacctggagaattttcatagacttcactggtttgaacaaagcgtgtcctaagaattgcatccctctacctagaattaaccagatggttgatgcgacatctaaccacaagttgttatctgtcatggatgcctattctgggtacaaccagatcaaaatgcatatcgtagaggaatacataagtttttacattgacaaaagggtatattgctacttggtcatgccatttgatctaaagaatgctggagcaacataccaacgagtagtaaactaaatgtttcgaaactttctgggtcacaacatggaggtctatgtagacgacatgttggttgaatccaagaccgccaagaatcatgaaactaacctcaaagagtgttttacagtagtgcaaaaatacgggatgaagctgaacccgaaaagtgtacttttagggtgaaatctaaaaagtttttgggattcattgtcagtcagcgagggatagaggccaattctaaaaagatacaagctttgctgggtatgccatctccaaggaagcacaaagatgtacaaagcctcacggggaaagtgacaaccctgagtcacttcatatccaagtcagccaaacagtgcgtcccgtttttcaacaatctaagaaagtgtcaaaaatttgaatggacagatgaatgtgaaactacatttataagccttaaagagcacatgtctaaagctctaaatttatctaagttagtcgagggtgaagatttatatttgtacttgacagtttcaaaacacacaataaacgcagccttggttcgggaggaagaaaaattctaacaccatgtttactacatcaacaaaaggatggtgggagccgagatatgatacccacaaattgataaattggattactgcctactcattgcctctcaaaagttgggaccatactcccaagcttatggcatcaaagtgtacactaaccacccactctggtaagtacttcagaaccctgaatcctctgattgactcctcaaatgggccatggagttaactcagtttaacattcattatgttcctcacgtctcaatcaaaggacaagccatagcaatctttattatggaatgcaacgagactaatgaggattctatcgctgtaaaagtaaccttgcctgtttggaaagtatacgtggatggtgctgccaatgagaacgggtcagccggagtcatactgatatccccaaaaggcttaaggctctaaagtgcattacagttcatgctcaacgcgtctaacaatgaagtagagtatgaagccttactagctaggttgagactttccgaggtgctgggcgccacacacattgaaatattcagcaactccaagccgatagtcaatcaagtaaaaggtgaatatcaggctcgcggagaacgtatggcttcctatgtctcaactgtttgggaactattccaagaattcaaggggtgtaaaattgaacagatactaagggaaacgaatgcccaagttggctgcttggccaagctggcatccgacaaagaaatgaaagaactaggggtagtccccttcgactatctcttggagcctagtatcacggccaagccagacgtccagacgatcaatcaaggaccaaattggatggatcccttggtcaagtatttaacattcggagagctaccacatgatatagctgcttccaaaaagttgtagtatcaagtcttgcgatatgttatgattaacgacaggttatatcatagaggattatccatgtcttacctctggtgtgtggctgaagctgaagcccaagcaataatgcaaggtattcatgaaggattttgtggagaccacactgggggtaacaacttatctaaaaagatactaagacacggatatttttggcccactatggaaatggaatgcccagattatgtctagaagtgcgatgcctgccagagatttataaatatccctagatctccaccaaatgaaaatcactttgatgactagtctgtggcaatttgtagtgtgggggattgaccttatcggatcccttccaactgggaaaggtggggtcaagtatgccatagtagctgtagactatttcacttagtggaaagaggctgagccaatgaactcaatcactgcaaataaggccttagactttgtgattaagaatatcatttgccggtacacattgccccacaaaatagtctcgaataacgagaaatagttcgatactgattactttacggagttttgcaaaaagcatgggatttcttagtttttctgctgtggcaagacctcgggcctatggacaagtagaggttgtaataaaaatcctcaagactactctcaagaagaaattacatgtttgcaagaacagttggcaagaggaatttccatgagtattgtgggcccattgaactacgacatggacatctacaggacattcacccttctcaatggtttacggatgcgaggtcatgctcccagtggaacacattatgcaactcacagaaggaccacttatgatctgaccaccaactaatcctttcttcaagagtctcttgactttatcgaagaacttagggaagagtctcaaatgcgcctaacatcgtaccaaattgaggaaggtggccaattaaatacttcaactcaaaggtgattgacagaaagttcatggttggagactcggtactaagacgagtcttccccgcatcacaagatcccagagtgggggtgttgggccccaactaggagggaccttacgaaatttaagatgaagtatgcgtcagaacttattgcctcaatcaaatggatggatcccagattccaaatcccaagagcttggaatgttgatcacctctgaaaatactatcaatagttaggagttcagcatttaatttcatctttagtattttggaaaagacttgtaggtcatttgaccaaggtaatattttttgacaaggtaataagctgataacattacatgcatataaggtgttaacttagcttgagaaaacacaacaagtgactcaagacctacacccttcagtcacttgggggtagttggggacatctccaaaaaatgtaaccatatgcattagggaggcatgctacgacctacctctgaaacactgcttctatctctacactctacaactctggctcagaacgattcaattttcttggaaaaagtttggaacccccttttataaactttggcttgagctgatgagcttaggggtaagtgacaacttagctttagtttgttttaatttctcttgtatgagaattgagaatcgatttattgcaagttttaggcgaggaatcccgttagggcctgagtggttttatttttaattttttgttgtgattactaagtggatttattcgaatttctgttgtatcaattcttttgtttaaggagctctcctaggagattttcgaaaaggttagtatggtgctttggtggttatggttttataggaactttgtcttgttcggtggtgtacaatcaagacttgatattatttcaaagctagctgaaaaccatctaaaagagttgttggagcatagaagggtggtattgaagtgcggtgggcacaatggggatttgggacagacgggtaggtggacgctatcggtggtgggtgggttttccatgttgactaacgcatcagtggtggcgggaaggagatttgtgggacttggggaagggttatttgtaatggtgaaggagtggtttgtatctcttgggctgtgggagttatgggtgagtttaatgtcaatgtgacagaacttttgactatgaggatatagagttgacctatgctcaaatatttggttcatctccaatatctaaagtgactctaaagtggttgtgggttttggatttataattctagttcaaacgcaaatttttaattcttttattttcaatgttaatttaataataatagatgttagtagtagttcttacaatactattttacgtttaaaagatagtgttgtccattaattgagtagttctattactaaatatacgcatatatatcatatctgtgtggttcgaaagtagctccatcttttgttaatgtcatctcaatattaatagtggtcctttacaaagctatataaatatagagaaatgctaaaaggtatcagtgatgtatagtaccctcttacgtgtcaatatcgctattggtccaactaagtatcgagtcttatataatttaatataatagcttttaaacagtactgctagccaatcgtaacataacatatcgagaaaatgttaggtaccactagtgcctaatagtaatgctcataaatatatattgtgcatctgcgtgatatatttatatataaggatcaaacttaattgattaaccagttagaattaacattcgtgcaacctagctaggtagctatatatctactaatatttcaagtgtccttaccactacaaacaacgcaactgtattaattaaataattacattattacgaatagactaactgatcacgacaccaataataatcacaaatttgagttataacaaatattatataattaatgtgctaaattagtataaattaagttattaacataataaattttaatgtcgactgatccatatattattgttttgttaggcgcagctagagctacagcatgcaactcacaatcgatctataaataatagtattatttatatatatttatttgtgttttttatttttttctttaaataagaaaaatcacttggtacaaatttcttccttattctttccgtccttttgatgatctccggaccattgatatggagctactttagccatggtgaggcaactgcctcacgtcaactattctccttccccactcatatatatatatttatacaacatatataaatattcataacttatatacaataatttatattatacattaattttatatttattgtttactataactgttttaattatagaaaaattattttatatacta

SEQ ID NO: 378620 - DNA, 1293 bp, Cannabis indica
ttttttttaataaacattacatagggacatgtaaagcaactaagaagttccgagctcttcagcaacaagtccatttagtattgcaaaatagtcccccctgtggaccagctgtgtttgtagttcagtgtctttatgtcttgcctacttttgggttatacagtgaaggattcagccatttaataatatctgctcttcgtcgtttcttgaaagtagcagctacctctgaggacttggcagaagcaaaaatgctagcagcccaattatttctcgatattgttgggagctctgtcaatcatgatgaaggggtagttgtaaagatactggaaactttcgatgttcaattgccgaacattgagaaagtaatgtgtccattgaaagaaaaagatgattatagttttgactcagcaaaaagatttgtcgagcaatacatatatgatttgatagattgtcagtcatatatgaatgcagttacacttttagaacacttttccatccgccagtctggtgagtcttttcttgatactatgatgcgaaagaatgaattcaaagcagcagagaagtgggcaacattcatggggaagccattattatgtgttcttgtcaaagcatacattgacaggaacatgctaaacaatgcttaccagactataaagcaaaacaatcttcgacaggaatttcctgatgtttatcataagtgtaaagagaggtaattccaatacttcataataatatttggttcttagatttccttgtctaataagatatatgagagtgtacagatatttggtggcttcgttcagaattttatgaaatgacatttttccatctacttgcagctcactgaagaaactggcagaaaaaggatgttgggatgttgcagaagctagaacaacaacaacagacaacttctttgaatatttggtttgtagctttgagcatatgttttatgttttgtgcttgtgttctttgcacacagacacgtgcatttattcatatgtgcttttatctgataagacatatactaatcaaagtacagttaaaataaattttaatttatagtttttcttaatgttttcaaggtctatttggctatggaagctggttatatagagaaggttgatgaactctgtgagcggtactcgcttgaagggtttttaagtgccaaaggtacacgtggtgctctgccttatgtctcaatcatatcctatttgccattttaagtgatacacaagcaaaaaaacatacaagctgcagattaactttatatctaaatctcatggcaccaaatgtttt

SEQ ID NO: 378621 - DNA, 5154 bp, Cannabis indica
ttttggtttcacgtcgtcatcgaatttggttgtcggtttcggttacggttttttgaaaaaagaaaattggctaaaccaccaaaaactgaaaaacatacagtcagtttcgaacggttataatttctcaacggtcagttacagttttcataaaataacaaccgcaactgaccagtcgattataaaattggtaaaaacctaccgaatatcactcctacttaatactttatgtcatgtagtgtgataatataagtaactaaaagacattgtttaggttgaagataacaacccaaggataaggaatagtttcttttacttgtaggtgggaaaaaaatcatggggttttctcaattttaatagataatgttaagctattgatccaattcagttcttgaaagaagtagagaataggtattttattgacatcaaagaaagaattacaaagtttcaaacttttcgagacagtttagtatttccctagagtaatcttttcctcaataatcacacaaaattccacaccactctattcttagcgcaatgccataatttccacttgcatgaaaatcaaaatcaaagtttacttattttgtttgttcatatactctttctgtaggctataacacacaaggagatcgaattccaagttgtcgaagttccatctgttgtcatcttggaaagaccctttttggtaaattttcttttactcgatgaaactcgaagttagtctatggagaaatataatgttcgaactgagctaaaaattacttgttgcagctacatttgcatctgactaaccaaacagataaagaacttgggccatttgaagtttggctatcacaagatggtttggacgccgatcgagtcattgtgtttaacggtcttcaaaaagtggtaagcttttatctttgtagaaagttttcatcataaggaattttccatatcgagttttattgatctcaatcctatacaacaggttttaccgagacttaaaccgcttgcttcttcaactttttctctggtatgaaaccatgatcaacttcattattttgatttttgttttccaatacatttatcaaaacttttcagtttctgttttgtttttcagaacctcattgctactaaactcggagttcagaaaattactgggattacattattcgacgcaatagaaaagaaatcttatgaccctttacaagacttagaggtcacttttctgtgttcaatgaccattcattccattacactgaaatttcatcttataacaaatctgattacctttcttgattcattgcagatttttgtcgatttggactaattttcgagtagattcatctgcctcggcctgcatagttggcgctcgggactgagctatcaatggagccaaatattttcttgctttgctgcttgcttatgagctttgatgagtataaatctattccctacactcaactcaaattctgtgtttttttcaatcattttcaattagaagggtaatttggtcattttttcatgtccattactttagagctaatacatagttttataataactgattaaattaaacaagcttgtaaattattatttttcttttacaatcttgtaaacatttatttactttattagtattatttctcctatttaaaatgctttatttcaacataacttaatcaatctttcttaactttatattgcttcaaataaggaaaatgtatctattatttcttatgctttgcttaaacttttatttatttattatataaacataaatcaatctatcttaaccttttttttaatggaaaatctatcttaactttataatgcttcaaataaggaaaatgtatctattgtttcttatgctttgcttaaagttcaatgaaaaagttaaaacttttttttattttaccaatttgaatttttatattagcaaaatagtccttgaatttataacttgtagataactaaaactaaaagatttaaattgtgtatatattattcaacttagataaatgttaaaaaataacaatagtgcttagtacttatttcggtgttatactaattaattgaatattggatcttatatcatttaaaaaaataatttttaaaaaacatcactaactaatcgtaaaactttaattataaatggtgttgaatgcttttcaatttaatattttgccaagtggccaactttccaaaatttcaaaggggaatttgatctattgatttattttaaaaaaaaaagaaataagacaaagccattctttcattcatgatggataatggaatttatacaacaagttaaaagaaacaaaagaagaagaaataaaattaaaagaaaaaaaaaataacatagaagggattgaagctttttttgttgtttataataaaaaaataagctcaaaaccttctatgcattaacaaaaacagataaagaaagtgaaaaaacaaatcaatgaggttatttatatttttttccttcttgattagtagtagtaagagtatctaagcttgtgaacccccaagtagcccaattggcttcactgccgacacgtggcatagcctgaacccttgattgagaatcaaccttgaaattggccccacacatgactccttcactatcaattctaggcaatgctttcatcttctttgttgggtgctcaaagcttgtcaaaccatgtttactgtgaaacatacaccctgcaataatcaccaccaccaacaacaacaacaaccattaatcctatttattatgactcaaaatgattatgaaaatgacaccccaccaatctatatttacacattacacacactattattggctttttatgaaagaaaatttgtttgagcttgagaggtatcttatcattacatggaactattattggtatcttttgatttaataaaaaatatgagaaactgctaattaattatagagtgccaaattggtatggggttgaataccttaaaatatcaaataacaatattgttacattatacaacttattcatgtaccaaaattggcattgattgtcaaatctgtatggtgttgagcaccttaaaatgtcaaatatcaatgttgttacattatacaacgagcaattctattaggcacttatagtgctcaataagcgattttaattacactaataccaatacgagcaactattagtagtattaaatcttttgatttagtaaatatgatgagaaaccgctaatcaattattgggtgtcaaagtaggtaaggagttagcttgtggtgctcaataactaatacttaattacaccaatatcaatacaagcaaatattaacatttctctttatctataaatattgttgaaaaagaggcatacctctagggaatggagcatatgatttagcacaactagctttaataagctccaaattttcagaaatcacaactgatccatctgctgcaataccccaatatagattcactccttcattagtaccctgcattatttagatacaattacaatcaaggatatagatatatcaccatttataactaaaaattaacacaatgtagttttctagtatgaaaacttaccaatgctgcaaacacagatccaaccttgctatcatatacaacaaaagcaaagcttccttcaaggtcattaagaacttgatgagctggatatggtgacctgtctcttagggttctataagcctcaatcactagcattgcctcattactaccctttgagagaccatattgcttaatgagactgcataagttgtgtaagcttcccatgaaagtgcaatatatgtcatccaaaccacagaacaacctgcattagtattattgatttcattagatttgattctaaaaaaatggaaaattaagttataacaaggattacaagatttgaacccattatatttagtaccatttaactaaagaaaagatgtatagagacaaattgtgtaaggtaaaagtgggatttgtagaaaaagatgttgaaaattgatttgatagatctaataaaattgtgagtaaggttaaacttcaccaagtttgaattttttgtattaatggatttcctttgtttttcaattatatataatgtatgatataacttcataacatcaaatattatgtgtaacttcatcaagtttagatttttagtattggatcttgtaaaactcaagatttagcttaatgggttttgtctttttttttttttttttattttttttcacttatatataatgtattaaacttcaaaacatctatgtgtaacttctccaagtttagatttttaatattagatcttgtaaaactctagatttagctcaatagggtttgctttgttttcacttaataaatatatatataaatataaatatgatgtataatataacttcaaaacatcaaatactatgtgtaacttcaccaagtttagatgtttaatattagatcttgtaaaacactagatttagcttaatgggttttctttgttttcacttaaaacaacctaaaccaaacaaaaaacaacagaaatcaaacatatgcatatatatatatttatatttatatttatatttatatatacctttgatgaagagagaaagacatttcttgtggaacaaaagccataagagcagagtttccaaacccaacagagaaagctttgtcattatcagaagaagatgagaaatggttaagaatttcttgaggaaactttgcctttcttgaatccacattagggctatttagctcttgtggtggatgaaccaattccttatcaaatattgccaacattttcaaaaacacttaaaaacaaaaaactaatctttttctgtgctaaatgaaaataatctaatcaaaaacacaaaatgggagagtgatgatgatgatgatgatgaatatagatatgaaagaatggtaagctcatatgggtatatatatatacatttacacattgaaaagtgtaggagagagaaagtgaaaaagataattaaggtacgtggcaacattatccaaatccgaggattaagcctagtaatactaatactattatattacaatttcaaacaacgccgaatctaacttaaaactaatactttctttatgagtttttagctattagttgtcttttttaattatttagtaatattctttaaaaattattaaaaaa

SEQ ID NO: 378622 - DNA, 3786 bp, Cannabis indica
ttttttttttttctttttttgttctttaatggctcactattaaatcgctgatagtggttgaaaataataagttttttgtgactttagaggttgttggtaatgcagttacatactttacacaatagttgagtgctcaagttacgagattgaatctgctgttgtgttttctgatgagtagataaaacaaaatacatatatttttaaaattaactgtaatgcttcaatcttttttattcaattttattttaattattttcgtcaaccgatctagaaattaagcgacaatcacttagagtgttttgtcagaggaaaccagttattttgcacaagctcaaccgtggaaaagttcgtgaattaaataggaatgataaattgaagaaattactattctaagtaatttgtttctatgcaatttttaagcatcaacaactaaatttaatataatacgtactactttgtattaagttttcactcttatactaattttgtattgaagatattatacatctatatttttaaattaagctttaattaataaagtaatgttacatcttttagtataatactcatgcaatacaagcttgaagatacatgaatataatagaccactattggttgctctctatgtgtgatgcttttcttttctataacaaacataattataaagatacaaaatgtgatgcaatacaatcaagataattgcacactattattagaaacaaatgaacacaaaggtaataaataacaaacaaaattcaaattgaagaactcattctctcttttttgaaataaaaagaatgaagctttcctgtctataaggattctcacgtataattactgtcttaagactctgtttgagctgtaaacaaagttatcttctccagcaacggtggagttcagtcttccggctgcccaaccattattgactgcacgtggaccgccagccacacggcttccatcaatcttgtcttcaaattcaggaagacctctttcctttctttccttccttatcttcctctcttcgtcttgttcttttctcagccaactttcaactgttctctgcgattcaatggtacaatttacattcaattctgccagatgtaacgaataaatattaactgaacaaagaatgtctgaacaaggagtgcaacactaaccattaaagacaatttgctaatctccttaactttatccataggcattgctagttgcaatgttcccttggctacatatacctgaacacatcaaaatagtcttcacaaatctggggttgggttgaaaatacagaatagtaagtgagaaaacaatattgaaacttacaatatgtgatggccaatcctctagaccgtcaaatatatgtgttgcatatataattgtggcacctttctcttcacattcttttctcagaaactttaacagatcagctcttgctagcacatcaaggtcaactgttatctcatcaagaagcagaacctacacataacaaaagatacaaaatttatgaattattagaaagaggattatttatttctcaagaaaaagaaacaaaattattgtgactgtatttggtattagtcaaaatgatgcagataccttaaatggtttcaggagacccatgcatatttggacccgccttctctggccatcggatactttatgcattctccatgaaagatcaatgtctagaacctatgcttccaagaaacaagttgaataaacatgaagaaagtgcagatttggcttaactattactagatcttcaaatgtctaatacagatctccctaagtttttgtatgatcatgtatctatatccttaacaatcattctaacaaagtttgagttttctctgatcatgtatacatattctatcctcatcaagcctataaatatgatcttttttttacacaataatcataagcattgcattggaaagaacccacttcaaggaaaagagagcagtgcgttctcaccttcaatagttcagctcttctttggggatcaattcctgcaaccccaaatatcaatttctcagcagaaatatccatttgaattgcaacttcaaaccctgcaaaagcaacatctcgcctccactgcataaataagcaatttcctttgaatactcagtcaacaattacaaatgatttacgatacattaccaaaagaagaaacaaacctctcctccaagatagcagagatcaccagatgaggtaagagcagtgtcatgaaatgccgaccttccgagcactcgaaccatatgaggctccaccatgtgcttccctcccaatatcttcaaaattgtcgttttccctaaattcaaattcaaattcaatgtcaaattcaatccagccaaatatgccaattttaaaaccaaatgttgaaagagaagattgacgaaccagctccattagatccgacaagaaggcagcggtcgccggagttgagagtgagggagaagttatcgatcagaggcttggagcccgggggaggatggccgtcgattccagggtaggtgaacctgagtccgttgatctcgatcagtgcctctgggttctgtttggaagccattgattcgattttgagtttcgaacatggttggaaaatcgtgattaagagctcgcgattgcgagagctttggggtttgaaacgctgagttggtgactcagtgagttgggaaggaccgagtcgagtaggcgtggcgcgctctgtgtcacgtatcggaaagaaattacatggtgcaaaccactccacagtttcattaatctcaccaataaaggaggggcacgtggcatcatcttccacctttgacaactaactacccaatatatagttaaggctttttttttttttttttcccaatcttcctcaatgtagcgacttcattgtcaaaattgtttccctatggcttggcaaccatgtacgaaatttgtagtttgtatatgtaaacaatgattagtttatgattcgttagcgatattttttaaaaattattttttttaagttatatgagactcgttaaacgatatgatattaaagagagtactaagcaccaataatatcttttagcaattctctaaaaaaatacacatggaggcaattagtgagagaaattaaaaataatctaattaattagaataataaaataaaagatataattatttgaaactttataactatgtttggatatgcatataattatttagttaaattattattaattgaattatattatttggttgaatgtgaaaagttatataaattatcaaatatctattaaattcagtgtaataagattgtaggtaatgtttgatactctatgagattccgagagagaaagaggaaaatctctaattaaattgtcttgaattagttccaaaatgagaatacaagaaaatataccgtgtgaatactgttagggtcgttggactaacaaatccaagaaaacggtcataactaacttgactaaagctactaaagctaattctaacagctcccttcgaaatggagtgtattgattaatgacattcatcttggatacaagatttgtgaaagaagaagatggtaaagctttagtgaagatgttagccaggttgttggaagaaacatggactaatttgagagctccttgagagattttttctcggataaagtgacaatcaatcttcacgtgcttagtgcgatcataataaaccgaattttcactaatgtgtattgtcgaattttctcggataaagctaattctaacatatatgggcctaagacgaattaaattttagggccctcaaaaa

SEQ ID NO: 378623 - DNA, 1741 bp, Cannabis indica
cttaaaaaatgtgatattatactgatgggatatacagaattaactaaattagattccaatgtatgaatgggattggggtatcgaacaaaccaatgaaccaagcaaaccccagatgagaaaatgagatcaaaggtgtaaatatcaaattacctgagccatattgatgattgactgacgaaaccttggatgcagaccagcttgctgcttgattttgctagcgatgggtttactcacagtcttcaagatcaaagttccgagcttcacaagcgggagtaccatgcctcttgtaataaaaaaaaatggatctgggaatgggaatttgtgattttggaggaaagagaaccaaaaagtttcttcaaaatcgaaaggtcaaaatggtacttgtcgttgttaattttgactagaatatcaatatatatgagagggagaatgagtttgttttcttgaagaagaaggcagtagcgcaccgaaacgaaagagaagagtagagagctggtcagagggcgtgtttggatttgggaaaataataagaagaaaaaagcgtggggaaggcgcaggtttgttgcccagacagactcctggacttgctaggctgctgccctttgttgacttttgtttttggagaacaacaccagagctcaattaggtttttgtttaatctgaaccgtccatcactagacaagtataagactttgtttggtagaaaggaagtataagcttttgtttattaggaaggagaagagtaggatggagagcttgaaagggatgtggcgaacgagagtaggatggaaagagaccttagaggggatggagaggattgtgttttgatttagtattaggtgtaaagttggaaggataaagagagaatgaataatacacttatgaaatctgattagcaaccctaattagtttaattatttattaataagaaattatattattatgtaatttaatatgtgaaactatactgataaattgcattttaagaccctgttggtgtcgtagaggtattttcgtaattttgacatgagatgggtacaatcgtaatttttatgatatatcgtgcttataggctatattattatatagtatgttttattctgtctatctgtaggtattttttgacaagtcagggcggtataatcacaaccgggtattttgggtcgaaccggattcggggcctaaaatatattttcgggatttatttatagcattatattgataaattagaaatctgaatttattgtattatatatgaatgtttagaatgataactttgcccttgactatatatggtggttataattggccctggcggtattttggtcatttaaccacctaagttaatttccaacagaagcaatttttgaaaaagagaaaaatcattttctggtttctctagttctagtcgaccccctctctctcccttaatcccttcattttgatttccatgattttgaaagaaaagcctttgattggagtggaattttgggtgatttctagcttgaagcttgtggagattgtggtaaattcttatctcttttaattgtattatttctgatttgaaataaagatctttgaatctgttcttatgttcttatgagttattgatgtatgttgaagattttaagtgatatattgatgagttttgtgtgtttgaatcattggaagtatgtttattacatttagtatgttttgggggattttagtgcaaaaaattgaggtttgaattctgggtttt

SEQ ID NO: 378624 - DNA, 2196 bp, Cannabis indica
atattatgatattttcatgtctgttctgtgtgcacattttatgtatggcctagacatgaacagtcctgttatcctacaaactttaatacataagttgaacatttttaataacattattttaattaggatacaattgaaagaacagaatatatatatatacacttatgtaaatgatcaaagcgacgacgacgacgaatattctaaataatatgcatgcatgcatgcatgtacatctaaatttctacgtgatattgaaaaatacattattaattaaagtcatctagatatattgattaaggttttgataataatgtttattatggccaaattaaaaattaaggaccactttcttggtttatccgagtttgttgcatttgcatatatatatcaaacctaaactcgtagcaaagcatcacatcaatatatgtttatatatatatatatataatatttatagctacgtacagtcaaaactaaaaacgacaaggagttgtgtccctatttttctctctctcacctcattttctcatgtcggtatgtatgcataattaagcttttttaacctcaaggaaaaagattctcaaatttagttagagaaaggaaagaaaaaattcacaacgttaacccatcttaaacgaaattaattatattaagatttatatatcatgatatattttttactggctcagatcgatataaagaaaactgtatataataattaactaataataagattgcttcttagactaactttccttactagggggtaggatcaacatatcacatcagaagagatggtttgataaataaaatattatatatatatataataaaactgtagggatcaaatgatgtcacgtatataatctcaaaacatggtgattagttcaaaatattattttaatgaaaaaattagtaaaaaatatgaatcgtatgtttgtaagtagtatagctaaacaactaatagtgatccagatcatgatctcaaataaaaatataaacttttagcaacaacgtcaagagttgcttgatacgctagacataaattatctataagttgcattatttcatatactaaatatatgctacttcatttataatgcatcttttagaattattaaccttttggcaactaaatttaagtttggaagtgaataattgtggaacaataaaaaaattttgaatgagtaaataaataagtaattaaatataaaatctagctataagcttctgccttctgggggctaacttttttaatttttaaaatatatttggggttgttgggcagtggagatgggatggtgaaaaaggtgttaacctagttaggatgtctttttgtgttcatgtatacatatatataaatatatatatatactaatatatatatatacataaacctctttcctgttgagtagttcatctaaaaaatcacaataataccaaacagtggttctacaatatatccatatatgatcatttcgatcctctatatagaattgttgtgcgttgttataatagacttgcccttgtgagagcatggtcaataggcctttctcaatacatgaaatataataggacggttaaggtataaaataattttatattatttttacgaaatttttaataattttaggtataaaaatataacccaaaacaaaatattgtgaatgtgtgtgtgtgatttgtaagatttatcatttttctatatctttattgggattaaggcttagtataactatgagtgaaatatcccgctcacccatgaaaaatgggacaaaataggaacattgttatttggtattttggtatcttaaggtgctcaacactatatattgacgtattagtacgtactatataattgattagtaattttctatattatttattaactcgaaatgtgtgaaacctaatattaaaataaaataataataatatgttatttcttgtggcaccttaaaatgcccttaacattttccgaaaaagcacattcacaattttcttatttgataaattttaatcacacaagtaatatgggacatatgtaaaaatgcataataaagtacagcattaatgtacactatatatgaacgttcccaaatacaaataacacaaaaaatcttaaactcactaaatcacttttacttttattttgtgaatgttttctatgtattaaaaataattaataatttaattttt

SEQ ID NO: 378625 - DNA, 1043 bp, Cannabis indica
atatatatatatatatagattcactctctcttgttcttcttcacattcttccctttccctttgtgtggtttcacttttcgactgcacaatgagtttacctaaaacccacgcgtacctttaaaactattttggagccttttttaacagagagatgaattgattgatcgatgaagagtatatagacaagtggaaagtgtcctgggaagccttttgtgctatttacttcatccactcacatccctccaccaataatgtaattcttttattattattattattattattattattattattattattattattattattattagtattagtatttggttttagttgaaatcactgatattaatattatctatttcagttacgagttgtgaactaaaatgaggttgatgtaataattaattaccattgaaagttttgaccaatgtgactatactagctagtgaaatacaacacgtacgtttaatttaaaatttgatatattttatagtttggtcatcgtggtttaactcattcacattacttgatgaagatagacaattttataatgttgtttttgaaactggctttctttcaaaatatatttatttgtaaaatgacatcagttaaaaattcaaacagggtgaccgaatttttgacagcgtgttttaaattctatagaatgccaagagttttcaatagggtctagtgtatgagaagactttctcaatatggtcgccattttttcattggtttatttggattgtaaatcatttgtttagttttcatttgttggatcgatttgactttagatcgggttctgctcgttagaattctttgaatttaactcatgatactgtgatataatatgatttaaacaatagatatggtaattaatgaggcaaactctaatgttaaagaacaccatattttaatacgatactctaacacttatctttgatattgattaaggactaatttttttttctttctttttttttttttttttgacgtggtgaacaaacaatacagcacaccacaatcggctgtgg

SEQ ID NO: 378626 - DNA, 8383 bp, Cannabis indica
attgttttaagaactgagaggatacatttgccaatgtgaatatccaagaaaagaaagacaaaataatctacgcaaaaggaagacttagtgatccatcacagagaacatcctggatggttgaagagtttctatcaatttatagtgtgtttggtaggagaaaaatatgaaaggaaggaaaggagtggggtttattagatgaacttggtgtatattgggtaggaaatagggagaagaatgaaccaattttcaactcctccaaattagagagattttatgaagaaatgaccataattgttcaaatgaaccttctcatcccccaattccacctctccttcctaccaaacaaatggagaatgtttgatctttccttcttctacccatacaaaacacaagaatgtatgattttctccttcatgctctatttctttcccttcgcaccatacctcttcttcctttctatcttttctcccccaaatatatccttatggactaggaaaaataatcaagccccacatacaatttagcatataataagcatgttattagactatcacagagctgaaagtatttaggatcggatacttactcatctatacagttctggattgcatctacatcagacgataatgcctccctctctcttgttaatggaattctcctatacgtaatattataaccatcttccttcaaagaagcatatacctctgcaggagtcttcacatcatctgcaaagatgttttcccaatatcctatgacactggattgattcaatgttgggttatattcttcacgatgtaaaagtatccgaccacctgacagtctaacttcagacaatatgtcttcttttaatcgttcttccatgtgttccacctgcattagattgcaaaaaattggaactatatttgcaatatgactactagacaaaatgagaaaagttttgatgacgtaccacagagccagttattccaacatgcttgagtgtatcaacgggcttattaagctccctgagtacaaaaggtgttccattaatgtaaacaactgcctcttctctcaaatcagttaatatcactttttctgcagcagaccctttcaatttgggcttggcacctagatatgttagcatttctttggcaccagcaattgttggagttgccatactgtacacagggtatccatccacctgtagaaaatggaagttacgactttacagcacaaaagtcccgttatctatgaaatctaatcttacaatgatcacatgataagctgttcgtaaaaaaacttcatgtatataatgttctagagttctctggtccaattggcagctagtaaatcgctctttaatgaaatatttaactctgcctccataacattaaatttactgtcctgtacttgtccaatccggcaacacaatgactaaagatatttcactgtaatgactcaagagatggaactatggaattaccatatgactttgacagcataataatcataagatgtttgaaacacatccatgtaaacttaccttgtaaacatgtggtgcaccatggatctgtatgttgctagaagttctctgaccaggaaagaaatacattttaagtatagagcctttccctaaaaccgaaccatttcgcgtctttacaattgcctccataactgcatcaccattttgggactcgtaaggtgctctcagttcctcctaaatgaaaaaaaaaatgagggtacatatccatgcccgtaaaaggaaatattgtaagaaaaaaggaaatgttgcaagctaagaaaaatagtaagtctcaagtttgctagtccaagaaagaaggaattacaggaactgtgaagaatcttccaggccttaatcttatgctccatttcattgcttgaacctctgatctttgatgcaaccactccttaaatgtcatcctggattctccttgtccacaaaatccatcaaatgcttcactacccaagtatgctgcaaaagtaattaaacggaagtaccgttccaagtactcggcaccgcggtttagtgctaccctccttacccttggttcaacatgctgttgattgaaaacttttcggtactgaagaacagcttggcgtatgttctgcaaagccgaacatctatctataatagcatccaaggcttcacggcattccactccattatcaaataatcttgttattttccacaataataagatatcatttatgccaaaacttctaccttggtccttttcaattcttacttttgcaacactagaagttgatggaacaacattttctccagtctcttcaccactggaggttccaccatcctcctcttcatgggtcatactatcaagcaaaattttaataggcctaccatgatcaattcgaagtttcaaaaggcaagctattacggtgccagtggttgtccttcctctgcccatctgtaaattttaataatgttcagaaaaaaacaaagtacagtacatagaattgcgaattcatttaacatttaaaatgcacaattcatcacagtaagaatgaaaaatgttaacctggcaattgaaaacaaaagcagtatccttggaagacgaagcaatattcattgccaaagtgtcaaagtctgaactttttggagctttaccatcagtaataggtacacgcgcatatttaataggaaaaccatcagcctctaagcatttaaaaacctcaagtggagtctgaatagcatcgatatttacatgttcccaagcatcaaatatttgtccatcatttgtttcatgaataaccattatggcaccaccataacgttcagcttctctgaggatatcttctttcagtcgagcttccattctttccactctctcacgatcaatgccctgaaagaagacatcctaattttactttccccaaaaatggacatagacagttagggaaaacatctccctacattctagactagcagcaataatgtagattacacatttgaatatgtatacatattatatatgccacaaataaaaattaccgagtattcaagcatgtttttgtatggtctttcaacctcacggagcacaaatggttttccatttatgtaaataaccggttcctctctcatattgtgccaaagaactggacaaccacttttcgagccaccaattctttgtatcacagatcgtattccatcgatagttggatttgctactccataaactggaaagccaggaacttcccggaaattaggggcaccctcaactctttcaggtaagtgttggttttgacaacctgggcaatgatcacttttcagaacagtttggctgcctaaaacctcaccatttcgtgatgcagcaactatacccatctcagaaggacgaccatcagtagattcagcaatcttcatgagggatggcttcaaacttgaatacccaagtgcacccattggatctctcctaagcagtctgaaagagcaccagattgcagaaatattattaatgaccaaaaattccaacaataataatgcctaagatatgacctagttcgtttgtttgtcaaaaaaaaaatgaagaagagggtattaactagttcatcatgaattgggagaggaaaaaagaggcaacatcacatatggaaatccgctagataatcttcatatattttttatccttactgtttcgctttcttgaaataagatatattctactttccaatatgaaagattgcaatgcctaaaagttgttctagaaacacaaatatataccattattttgaccctcaattagcatcaaattcctgaagaaataatcaccttaaatcctaagaaccctggctaatctaaccttctacaggtgcactttcatccgaatgtagtcatatacctcaacattattggaggtttttaataaaatatacacaatgctcagaatttctctatggtgatgagtctgatgactcgaaacagtcagttgggatcaatgataaaagtaaaagaaaaagcaataagcgacgaaaccagttgggatcacattcaatgtttgccatattgtcaactttattaaattagatatgataagaacttttaatacctgcgaagaatgctatagagttctggtctcgctctcatccagtcagcaaaattgctattaccaacagatttagattgaagggctgatttctctgaatgaatgtagacggcaaagcatataagaaagtagtatctctcaagatactccacaaaaaatgaaagcaacgcctctcttttcatttcatctggttgacgtaaaatgctattgcgataagtggcaattgcctcacgcaagttctgtaaaatttcaacaaatggtttcatgagttcaacagacttttaattttaaaagagcttatatataaatgtatatgtatacctatataaatattttctggcaagaaatggatgaaagagatttcttggaaaaatcagataatttgagataatctcccattaaatagatgtttataaagcaaagtgaagtcaaagggtgcagcatgggattgaagagttatacctgcatggaggcacacttgtctatgactttatctacttgccttttcccttcaaggccaccctaaaacatgaattaataatgaaatttttcaaaaagtattaatttttcagcttttttaattaaaaaaaaattaagaaaagattttaagtacctctaataccctaaccaggcttcttatgacaccatattcccctctacgaagtgcttcttctgtgtttggaaagttgtcagtggcactagcagcagcatctgaaactctaccaattgaattggatcttggaatacctatttatgcaaaaagactaagaatgagaagctaacatcatcaaagcaactgactagagtgtcgtgccgttgccaaatgccaataacaacagaagaaagtgggaaaaatatacaatatgttaaaactacaatatgagtgatccagcaaaaacttattaataatatcagtaagacatctgttgttgattgaatgtaaacatgtttgaaaatttgctttccaagccatcacattactattactgatccaaaagaaaaagtctcatttagagcttgaaaatcaatccttacctttgtcctagtttgttcagaaataattatttattgtggatacatgtacactcaaaggcagggaagactaccacttaactgctcaatcccaaattatacatcagaggtagaagagattattaggcaaaatattggtagaatggtctggtattttagatatttctccctccacaactatgatctaagaaacatacagacatgaaatttcaatatgccacatcaaatgctaattgtggcatgttaaaaaccttacaaaaggaatagaattcttcacggctacgtagcttagatactgatccaatactaaattacttgtgatgcgaccaaagaactatttggcattgttccaatctaatttgacgtctaatgtcatctcagtgtttgaaaaaatgttgaagatacatagaaacaacactcgctatttccaatctaatttgacttcctcaaggcatgcagcactcgctagtttttatattcagataaccaatctttcactgatcttatatattacacgattctccctcttgttgttatacttatacttcaaataaagggccctcaaccccctgatcattatgattcatttcacaattatgactggacaagtaacaaacaagctattgtgagtgctcttagtatcagtattctgcaatgcaccaacaataggctttctcctgctttaatgttacattttgtggaattaatattattcgcaagcataaagtgaaaattaacagattattgaaagtaacaatgagaataaccaggttaacaagacaagtttttctaaagatatttgtaacatgatgtcaaataatgtaaatacacaacattaaaagtcatatgcacattcattgttcattgtattgatgaataatgattattccaaatattgaaagtaaaaaagagtatagaaagcaggaatgctaccagaagatcctattctgttgagataaactaaagttgcaatcaccatcccagttgtagtccgcccacgtcccatttgacaattaaatataatctttgtatttatatcagcttgagaaattttatgaacctaggaataaaaagtgaaaattagagacaaatgtaaatgtattaccacagaaagacttgaaagaagtgtttgtcatgacaaattacagtctgctcatataaactcgttcttattatctggttgttattatttgagtagaaactaagagttgtgaacacttttaagtgacatgtaggtcttaagtattgtctacgacagaacacttaggcaagctaaaaggaggattcttcccatttcaactcaccaaaatatcaaaatccaactccttgggagatttttcatcagttataggaacacgctcatagtcaactaggtatctgtctacttgtaattccttgtacacctaaaggaaagaaaacaagttgagttatcaaaacaaaatatatttttctttcttgaccccttcttatgaataacatacagtagagatacctctagtggtgtcttcacaaaatcacgagatactggttcccattggtccaccatctggccatctggcaattcatcggtgacaaggatcttgtttccatatctgggatgtcagatgtgcaaacaaatctatctctcattcaaatgaaaaggtaaagaactgtacaaacaatcaccatatttttgggaggggctggttataacacaatatgcagcaaaggaaaatttacctcgcagcttccatgaggatgtcttctttcagtcgagcctccatttgttcaaccctttccctattgattcccttattcaatataaaaggccataagcaagtttaaaacagacagatgttattagcacaaatacgtgaattcttgcagtatagtataaaatttatgaatctatttttagaaaaattaaacatccaaataatcctcctaactaaaccaaatgtgatgggccctggttcaggaacaagtttcaaaactgaactacattttgagagcagaagtattagcttattctgaggtggggaactactataataccgacattactactgagttaaggatgatattcatatggaggtatgcatcttcctttcaaaaatagaagtatttgcaaaatgcccagaagatatggggttgtttagcttaacattaaagaagaaagtgatatagccttaaagatgttgtattggagttcatgaatgaagaggcaaaaacttttggagtttagaaacatgggagtaaaacataatgttcaaattgcaagtataaaaaataaaactagactttatcaacataccgtatattccaggtttgagaaaggcctttccacatcacgcaatacaaaagggcgtccgttaatgtacactacctgtttgaagaaaagaaagaacatttctttaacatgaaaatttatttggttgggaacaatcacttgtactagaaggctatctggtctgaaatcttttgcatggtcaaagcatcaaaatgctcgtgagtccaaaatttaggttggttgaacttgaaaacgaagctaaaatgaaatagaccagggaaatcgaaattggctaaagaaattaaagaacctaataagtaatggatctgtgtaagaatttaccggctcctcgcgaaggttaatccaaagaacttgagcttcctttccatgaatgtggttgagaacattccggatcccatccatggtgggaattgcaacaccatgtacatgtaaagattcggcctgacggtagtttggagcgccatcgatttgaggagacaatcgtttgttctggcatccaggaaagtggtcgcttttcagaatcgtcttcttcccaagcactgatcctcccctaagcttcataacttgctccggctctttcgccgcaatggacgacatgtcgttttgcgtatgtacgactagctccgcactactactactacaactgatgcagctgccgtgtctgtatatatatatatatatatgtatatatatatataatgtcgtgttctcaacagcttttctcagagacaaaaagagacgatttttattgggtgggtggtagaaacaagcttcagtggtttgcgtgtgtgtatgtattgtaattggtattattatatatatgtgtgagagtggataagagaggaatttttgtaaggaaaatggaaatgtgtaattaagagaagagtgagggtgaggagggagaagagcttcaatctattccttcctgacatcacaacgtgaaaagcatgcgctgttagcttttgcttttattatttctttagggaaatttgatttt

SEQ ID NO: 378627 - DNA, 1515 bp, Cannabis indica
ttttgttttggttttgtaatgctaataattattaaactagcttaggtgtgtgacatctgggcaagttggatacgtggaaaaatacgtgagcaatgggggagagacagtggcagctctgaaagacattggagatatgtattcactgttcattgtagggaaaggtgggagaggccactcaccattgacaactggcatgagcgattgggaagagtgtcctgagcttggaactgtgggtgatctcttggcttcctctgagtataatgtcaatggctctgttttggtcgttcaacaacataaaagtttccaagaaggttcttatggataattctatatatataaaatataatcaatctcccaccattatactttactctctgtaaattccatattaataattttgtagattgttttattaatttgtttgtcatttcttttgctttctattatacacttgcatgtacacatttgtaactgagttttgaataccaaaatgtatacataacagaaagtttttattattatatataacagtgtgattaaatcttgagatgcaattgattgcaatcttcaccaggtagactaatgaaccaaaccggcccttggagcattattattagacactagtggcaccacttaaaaggagcgttttgtaaatggttagcaaaatttcataacagttgttaaattaaattatgtgtattttaatacttagttataccaatagcgatatgacatttaaagtaatgttaaattttatggtgccatttaacatttttggacaaagtaattagacaagcaacatcaaaggcaagatgggcagcacatattgatggtgctttgtcctatcccaagggccaaggtcactctcacttgttgtagtgataggcatattattaggaacatgttcgttgtccgagcagagtaatttcgtattatactccttgtattgcataacatttcaatccattataccataccttttgtcatctccatcttacttccccccctatatgttttcacacaatacaacccctcgaatgcatggatgtcagattctttattatcacacctcaccaagcacgggtcaagtctgccctcatgccaatgttatggtgcaattttgttttataaggcatgtcatcactcgcacatcaccataacaggagtttgtgatgttaggatggcccgagtgtaaacttaaacctcttgcgagaattgtatttaagcactatgaagtactgttgaggaaaaataggcatgtaattttcataaaaatcattaaggccagttgagctatgcatcgagtcctatgcagacatctcgataggccttaaaatcaagcttttacctatttatcttttagtgaaaaatacatttttgctcaatagtgctcaatgttgagcttgacaagccttaaaattaattatttttgtgaaaaaaaaacacttctttcaatagtgctcgagactactaaaatttattggtgttcgcggtgtgggtggtgcggtttttaac

SEQ ID NO: 378628 - DNA, 2247 bp, Cannabis indica
ttttatttattttttattttgttcacaaatagaaagtgctaataatgtaattttgagtgtaatttaattggagctatatagtacacaacagataaaatatatacatatataagatttgtagttacgcataattttttttatattatggtttgagttctctactaattttataattagtacctgtattctgtcttattttattattttggttggatatgtttttatatttggtagagtttttgttttctcttgctgtcccagattttgttgtgtgaagacaggaagtactaacttgtcatgtttattaggtgagtcgcgagctacgctacaaaatgatcagtaaatgttaacacaaagattaccttagttatatggagcgtagaaaggggcttgttagttgttaccatatttctagttcaaacccccaaaaaagggaaaagagaaaccaactcaaataggtggggttcatatatgcatctgaactactttctatcgagttatatttgttagtagcaatacaaggtatcacttaggaaggaagaacgctccagccataatattggtctatctccctctctctctctatatatatatcggccataattaatcgaacgacagagtgacaggaaggaagaaaaattagaagttacagcagagtaaacaagtctcatcggaagaatgaaagaaaaatatgcaatctagcgctggcatgaagctagctttccaagcgaatcctaaggcttgttctcagagattattattttattttcttgggcttttgttttctttaattgactcattctgtccattaggacacctggggatggggaggcgatccgttgatacattcattattgtgggctccttatgtgtttgagttctaattgcatatgagatgtttgatcgacggtccaattttttttatgcatacatagatgctcaatattagatgtgaatggatgctgatgtagtttgtaataatggtttgatatttcctatgggttcctgttatagcagctgagcattattgagaggagtagaagtggtgttcaaaagtaataaaagtgggcacccattaggccattacctaggtaggtggtgggccggtggcattaactgtagcgtaggtagttagttggtttattacgaagagatgggatctttttgcatttgtttgtaaataaattttggagaaggcacttctattttaatctttttctcaatctctaccctcacaatttataccgaaatattttccattgttaagtgttatttgtatatttttccattcaaattgaacgagtaatagagacaatcaaagaatagctaagcaaatgtattcttcaatgttctcactatgaagagaagagacattttaaagcaagatgttcaaacttctaaactataagaacgaaggtaatacttttatttttgaatcaagtgttttagagaacgacaaatccatttggattattaattccagatctactaaccatgtttgctcttcattgcagatgcttgaagcttgggattacttaaattcaggggagttgaagctcaaggttggtaatggcgaattagtatcggtccaaggtagaggaaaaattcgcctcaagtttcagaatatattttttattttagaaaatattttgtttattccaaattatagtagaaacttgattagtgtttcatgttgacgaacacaacattttcaattgaatttttcgagttctattttaactattttttgtaatggcattcaattatgtgtagctcacctggaacaagagctttatgttttaagcccagatatactaattgcgctgaagaacgaaatttttaatgttgtaaacctaaaaaccataaaaagtgaaagattgataataatgatgaaacatatctatggcatttacgacttggtcacataagctatgatagacttcacaggttaaccaaagatggtccattgaaaaatgtcaccttaagtgaattaccagtttgtgagttctgggtggcaaaggttgttcgtcaagattagccaagttagcgggggcaatcagattagatgtattggctgagtttgttaggcctgttaggttggcaaagattgccaggatttgctgcatcggtcaggctcttggaaacttcaatggtggtgggaacacgcacattcggatcagcttgttgggattttatgccctaaataaaacccatttcaatctaatctaatttgttatcaataaaaga

SEQ ID NO: 378629 - DNA, 2329 bp, Cannabis indica
ataaaaagtaaaacaaaaaatataaacaaatcttgaagatataccaatgcccggcgattacgtttccactgcagtagttgttctttgggcatcatccaagggggtctatcacaggcagcttgtccttcattttcagaattggtttccccattggttaagtcctcattttccaatagcaaagttgaatacttatcatcaagaggtttacacaagccaaaatctgagagtttcaaatgtccatttctgtccagtatcaggttatctggctttatgtccctgtaatattagaagagtgaacatagcatactgtttatagttgggaacaacatatgagctgaaaagacaaacaaaaaatttaacccctcatgctctgaccataatttgagtaataatattagttcttaccttttcttaatgaagaacacgatctaacactcacgagcaaaaaaaattatgctcttaactacctggtctatgaattacggagaatgtgccttgattaaactttcaggctcccgagagcatatagacaagtcaaaatacttggaattaaaacattaataaaaagagcatgtgaaggccgtacctatgaatataattgtgttgatgaatcgaatgaatggctagaacactctctgccatataaaagcgagcaacatcttcggaaagaacatcttctctcatcaataatgtcataatgtctccaccaggtaaatactccataataaggtataagaagtcggaatcttgaaatgaatagaaaagcttaacaatgcaccgactatcaacctcagcaagcaagttcctctcggaccggacatgctcaacctaaattattgaaggaaaataaagttggcaatcagtgaataatgtatcgcacgaaaccatgaataggtagttgattgaaaaggtcccgatacaatgttaattttggatcgccacatttaaataaaagaaaaaaaaggagtaattatgcacatagaaacaagattttccatttatatgaccaaacaagatataaagtacaattactttaactggtaaatgctaatcaagaaattagtacttgaaacttttacgaaacacattaaaatgtcttcccattcatatccaaatgttattttattaacagatttgataatgatttgtcacctggccacggctaagcatatctgacttcttcagtttcttcatggcaaaaatctcccctgtatctttagcacggcacaatctcacctacaaccataaagaacaatgaataaattaaatctgcacaggaatttaatataattctacaccaattaactcaagtcaccagtacaaacttattccgctaccagaacctccaaactaatcattcaaatttaagacaagaaatacttaatggacttcacaaactcaataccatccacatatttttgagtacttgtaaattcttctatacctccccaaatgcacctttgccaattacagtcaactgctcgaagtcatcgattccaattttccggcgttggagtctcatatattcagtctctctacgctccaaattcctcaacatctgttcttgttcctcagtcgatatttgagactcctgcgcttttctctgaagcgttcgacgtctgaaaaagaaaagcccaaaattatcaaaaagtaaagaaaccaatcttgattgaagattacctcactacacatcaacaatctcagccaattaatcatgttctattcccacaaaattagactgagaacaacaatatcccatacctctctttgcgctcctgcaatccctgaagataattcttgtagtgattctctataaactgtttggcggcggcggctttctgcctcgtcacaggagaagaaacagatacatcgggactggaatcaaacccgaccctatccgacctcaaattcaaagcccccaatctcaccgttccatcgccgccgtccattctctatcgatcaagcaccaaaaataaagtaagaatcaaagaagaatttacagagagatccaattgactgaaggagagatccaggagctatagctctgggaacatacacagagccagagcaggagtcaggattgagaaaaggaaaagagtagaaaccataccagagtccagactacaaagtggcagttcaatataaatacatgtgtggatcgtgagtgtgtcttatctatggtacaaattgtcgtttatttagaattgagaaaagatatacggttttctttttgctttctgaggaattgagtgcgatcgacgccatcgttttcctcgcatgaactggaatcttggacgcaaatatttatttattaattaatttttttttt

SEQ ID NO: 378630 - DNA, 2371 bp, Cannabis indica
aaaaaagatcaaacttgatcacgagccatcatatttctctcaaaggcttgcagctctcactcctgggtttgctggagcagacattgcaaatgtttgtaatgaagctgctcttattgctgcaagaaacgagagtggtcaagttactatggatcattttgagtcagctattgataggatcattggtggtttggagaagaagaacaaggtataaaatttttttcctccttccataataatacgatgcatggtgtcctctcaatctcatttgtattggaaacctcttgttacatacaaaatcatggtttttcaggactatgttttcccctgaactgtatcctttctattaagtattaagactaggtgaatgcactaagaggttgggtaggcagaaacttcctgtgttgctctgggttatttgggaatgaaacttttaagtgtggaggaaggattctcgctctagttgagtatgttagattgtgaatcttttatgtggtcctctggctatttatctactagtttgtgaatctttaacattcgtacttcaacatgcaggttataagcaagaatgaacgacgaactgttgcttaccatgaatcaggtcatgctgttgctggttggttcttagaatatgctgagcccttgttgaaagttacaattgttcctcgaggcactgctgcactcgggtttgcccagtatgttcccaatgagaaccttctcatgactaaggagcaacttttcgacatgacttgcatgacccttggtggtagggctgctgaacaggtagctagactaatcgttaatttcttctcatattttaccgaggttcttagtttaaatgatttataccaaaccttcaactcaaatttacacttttcgtcccatcttggccaattaaagtgggaacggaaaagagaatgtattgtgaacaaaaagaagtgtatgtaaattggcaaatgtaaactttctggtgtctttttaaccatttatagcctaataatactgatgatgattttggaacgtaggttatattggggaaaatctctaccggagcacagaatgatttggagaaggtaacaaagatgacctatgcccaagtagcagtctatggttttagtgataaggtcggtctcctatccttccctcagagagaggattcatttgagatgaccaagccttatagcagcaaaacggcagcaattatcgacactgaagtgcgagaatgggttgcaaaggcatatgaaaagacggtccaactaatagaggaacacaaagaacaagtggcacaaattgcagaattgttgctcgaaaaggaagtacttcaccagaatgacctgcttgaagtcctgggtgagcggccatttaaatctagtgaaattacaaactatgatagattcaagcaagggtttgaagaggaagataaaaagtcggtgaagatcccattgattaatggggctgaggaagaagatgggtctacacccctggaacctcaggttgtccctagttgaaatcacttttagggatgtttgaattgtacatgaaataaaaaattttctgcggattttttaattattctgctccttatttttatttttgataaatttcaaatgtttttaacatattcctgtaaggaacaaatttgtatactttgattctgttgtcctagtgtcaccattatattttgaaatagcaaaatgtggtactcgactctattgaaaagttatgaccgactgtgattgttttccatcataggaaatagaaaacatcgaacaagtttgtttggtttttttctttccagtcaccgcgtaattcacgcatgtatgggatgatgggtcacggtcagggacggaaatgtatttttattagtagggttattaagattaaaattatttgaaaatccaaaacacggaaggatatcatttttagggtactgtaaaagcaccctgtactttttatggtggaatttctttcttaaaagtggtaatatctaattgaagatatttcttttggacaaataatgggagatgatattttaaataggcgtcttcataatatctttaattcaattacgattcaatctaataatccatctaatctaattcacatttacatatatatggaaagtatttcttattaatgagtattatacaaatttaaataattatcaattttaaaatattaacccattaaattttggtctgataaatttagctacttaattaaaaaaattatcaaaaacctatttttcttttacactatcaaaaatatgtttatatgaaaaatatttaagtctaactcagcttttttttatcattttttttgccaagatattttttttcgactgatggaataaccctaacctatataatgtaaa

SEQ ID NO: 378631 - DNA, 7078 bp, Cannabis indica
atcatatggtatttataaattctcatataataatgttttacctcaacaattccgctgatttaatagagaactaaataataaaaacaaaacatcactgtcagttctgactggcacaaaaaaccaagggcttcataacaaacacaaactttgtacataggcggctcttgtatcatgtatggtatactacaatattaaatttaaaataaaaaaaaagataaaacaaaaaacacaagctatacaaagtggtgaattttaaattcaatgtaaaccattttttttttggggggacgtcaaatatatgttttattgattttgttattgtaaggaaactataattttatatgtttaattagttttttctaatgataggaacaagtcaactgaacctttttgagcatgcatgaacgtggattctacgaactatagcgtcgtttattgatcatcttttggcccttaatcaaagggttactataaggcagagactttgtccaagtattgcatttagttattttctctcaatttcctacttttaaggttctatcatcttttctttcaccaagctttgcacacaggtttttctcttcaaccaagcacttctccttcattttttttttctcctcaattcataagatttttaaggtagtgtttcaatcctatattagatattttctcattaatacattaataatctttttctgggttgttgtttttaatccttcacaatttaaattctgtctgctaatatttatataaacgtttcctctgttcaaaattgatctctattttgtatataattttcctctgctaatattgacttttcgaacaataatgaatatccaatcatgatgggatatataaagtctttttgtggtgatctgttctgccttagtttattattatatctattggaataatttatctttttaacatgtttgctacagatattttaataaccggctattcattctaattttcccggagtttttctttataattaaacaaaagcttcatattaattaaaccaacccaataatcttaagattttaatttcaagaataatctttggtatttacaggcatggattttgtagattcaaagaggaagaacaatttttctgtgaggatctttttggctgctttcctagttagtctttcaattttctggttcaagtcaccaacttatagctctcccaacttggtatgtttctcattttatatgcaaatctaagacttgtcatcatataattaatatgtgaattctaagaaattccattttaaatgaatttatctctatttctgtcacataatttgcataagtaaaaggttttgttatatttctagttctctcgcccagaaggtggagtaacacatgttctggtaactggtggagctggctatataggttctcatgcttcacttaggctcttaaaggactcataccgtgttaccatagtggtatgccatcccataaactcatcacaaatgttttaaactttgttcaatcttattgtgttttaactttgctcatcacattttgcaggataatttatctagaggaaacttgggtgctgttaaggttcttaaagagttatttccagagccaggaaggcttcagtttatttatgctgacttgggggacaaacaagctgtatcctaactaaatcatgctctaaatgaagtcatataaatatatattcagttatatacaaattcaaaatcatgttcttccttcactggttttgttaggttaataaaattttcagtgaaaatgcatttgatgcagtgatgcactttgcagctgttgcatatgttggagaaagtacacttcagcctcttaggtaattttattttatttcaacttctaaattgtggtttggttattatgtataggactgcaaattcaacttaaatcttatatgcatttttctatacatttcagatattatcacaatatcacatcaaacacccttctggttttggaggccatggcagctcacaaggtcaagactttgatctactctagtacatgtgcaacatatggagaacctgaaaagatgccgattacagaagaaaccgaacaagtgagagattcaatatcttggtttctcttattgaatatggttccctatcttgaaactgcacttcatacttaaccttataaatgtcaataggacataactttggatttgctataaaagaaaacacttggcttttttgtcttgtctcttgagttttattgcagtaagagttatgctcaccaaaacaacatactaatgtcaaccctctacactactactgaattatgtttggtttcctagaaagacaagaaagtaaaaacagagaatctcatgcaccagaaatcatatttatatttatgacctggttttcggtagaagtccagaaatcatatcctttacatcgtctcgtatgccttttgcaggtgccaattaatccatatggaaaagccaagaaaatggctgaagatatcatattggacttctccaaaaactcagatatggctatcatgatcttaaggttggtgatgatgctaagatttattctttttataaaattatttagtttgctaaaatttgaagctgattctcttcagcaccctctgtacagcaaacatagtattctagataacttttcttttgctttgatagaatggacactaacaaatgagttgctacatcaacaggtatttcaatgtgattgggtcagacccagagggaagacttggagaagctcctaggcctgaactacgcgaacaaggtcgaatatctggtgcatgctttgatgcagctagaggaattattccaggactgaaggtactttacccagcttttcatgctctcttatccacttttagatcaggttttatcatccaatcactctagtaaattttgttgatttcaggtgaaaggaacagactataaaaccactgatggtacctgcgtaagggactacatagacgtcaccgatctggttgatgctcatgtgaaagctcttaccaatgcaaaacctgggaaagttggcatctataatgttggaactggaaaaggttggcattctgattctctctttagtttgaacaatgcatgtcctgcttgtttctccttcattgttaatattctttgaattacaggtagatcagtaagggagtttgtggaggcatgtaagaaggcaacaggggtggacataaaggtcgagtaccttgaccgaaggccaggggactatgctgaagtttacagcgatccttccaagatagcacaagagttgaattggactgccaagtatacaaaccttcaagagagcttagggattgcctggaaatggcaaagctcacatctaaatggttatggccctcaaaccctttgaagtttgatatgtttttcacccatgatagcaagtcaggctggagtagaatccccaatatgccattggagacgattacgaatattcattggtgggagtccttcccctttttgttgataaggagcttagaaaagtaggtcatgatactatgctgcagctcccactccaaaaaataaagagaaaaacagaagaaaacacaaatccttgcctagattatatttatagaaacatttgatacttagactacacgtgtatacaaattcctgtttcctaaattaagatttatgttgctatttctgaaaagttctcaaaatcagtgtcatattcatgagtccttagtgtttttttttttttgaaaaaaaaactggtagaaataagaatagagaagcatcaaaccaatacagtattttaaaagagcataagccattcttgaacttacaaaaatgcttacaaaaatgagcaatttgtcaagtttatatagtcatttacttatataatttaattattacaatattttgaacaaacttgacagcaggattaggatgcgttgccctttatattttcttaatctggctgttttggagaagtttccagaaggaaatttgtcttaaggcatatagttccaggttaataacaaaaaaaagcttagctttggaaacagcctactctaccaacatcaaagaatgcataaagcggcctcaacaactctcctcgtacatttgcaacaaagacaatatacattcctcaagtatgaagtagaaaagctgtaaaacataatttagtaatttgaaaaacattgtcaaactataagacatcaagtagaaaatatttcatatcagacacacgatttctacttctcatttcagcagtcaaactttttaatatgttgcgtacaatggctgttctaggttgagcagcatcatcagaaagaaaagaatgtacctggtttccgacttcaatccagctgtatcctggttgcttctccgttcttctctcttccatcaacattcttattctttgaacttctttccatctgccggcctcagcatgaatgtttgacaagagcacataatttgaagctctatgaggctcttgttctaaaagcttctcagcagcatacttaccaatttctagattccgatgtattcttgcagctccaagcaatgccccccatataccaggagttgtcttgactttcatctccaacaccattttgaaagcttcttctaacctaccagctcggccaagcaagtcaaccatgcaagcatagtgttcaggcaacggttctatcttgtatatttcagtcatattcctaaacaattccagaccttgagtaataagcccagcatgactgcatgctgacaacacaccaatgaaggtgacctgatccggagccatcccttctatcagcagtttttcgaaaatcccaactgcctctttaccatatccatttaaagcataaccggcaatcaaagaattccaagaaacaatgtcaatgtttttcgtttctttaaacatcagttcagcattgaaaacctttccacatttcgcgtacatggtgatgagtgcattgcagacaaacaaatcatttccataaccacttttcacgatcaaatggtgaagttgctccccaatttgcaaagcggcaagattggcacatgcacttagtccgcatgacagagttgactgatctggtcttcttccttcctttctcatcatcaaaaaacactttaaagcatcgatgtataacccattttgcaataacccagagatcagagaattccaagatataatgttcttttttcccattacattaaagatctcaaatgctttatccatcatacctgcttgagcataaccagtgatcatggtattccaagagactaaatccttatttctcatttgattaaacaaatattgagcttctgtcattctaccacattgagcatacccagcaatcatggtgttccaacaaacaacatctcgcatgccaatatgattgaagatttcacttgcttcatccattcttttgctttgtacatatccagaaatcattgcagtttgagctgcaatattcttgtaaggcatctggtgaagtagttgtcttgcttcatcaagctttccaacacgaacatacccatttatcattgtggtccatgatatagaatccctctctggcatctctgagaacagtttaacggccttatcaatttggtggtcttgaacataggctgcaagcattgcattccaagaaactacatttctacttggcatctgttcaaaaagattctgtgcttctgcaatcctgccattacgggcgaacccataaagcattgtaacacatgtaacaacgttcggttctggcatcttcttaaagaagttccaagcagaatccagatcgccaacctcaacaaacccatccactatcaaattccacgaaaccacatccctctcacccatttcctcaaaaaactgcaccccaagatgcatatctccattcttggtataccctgccaacatagagttccaagaaactaaatcctttactggcatttcgtcaaacaatcttttagcctcatcatacaaccttttcttagaataacctgctatcatggcattccaacaaactgtatctcgcttatcaggaagtaaactaaacagttgtttagccttttgaagctcgcctttacgtgtatagcaagtgatcattaaagtccaagagaaaagatcccttttaggcattttaacaaacatgtcgtaggcttcctctgccttatcattatgtaggtagccagcaatcatggcattccaagaaactaaatttctacgaggcattttatcaaacaggtggcgtgcatccctaattctaccattcttggcataggcagacatcatagaattgtaggttacagtattcttttgggtcatctgtgagaaaagtttaatggcttcttcaatccgaccagattttcccaactgggtaatcttaagattatgattaaaaacaaaggtgcccattgcaagatagcctgattttccaatttcctccaactaaagaataagataaaatatcaatcaatccaaaaaagttcacaggctaaagttaccaccattaaacaccacaggttaacttaagctatcaagcaccaaaacgacatcgtctacgtccgttcagttgtccaaatcgacttcattaccacctgcgcttcactcacagtcacagacaggcgcatgttctgctgtgtgcctgagattattcagtcgcttaaatctgagaagaatctgggccgtaggatcattctgggtctattgatggctgtcgtatcgctatttgtcaaattctctttcctgagtagccacgtggatgttgatttcacagaccttcaaggatgactcggccatggctgctctacaggccttaaccgagtcctaaactgccatgcctaaacgtgttcttgagagattttctgtaagtaaattaattaaatttcattcccattttaggtaatcatcgtcgccggcaaccatgggcgattcagtggcaatgatttattatgaagttggtcaccataagaatctctgtaatgatttattaagttttcttgatttcattatttttattgtttttgctgttttgtaatgttttaataactgtaccacagtttttttcttttctagcacattcgccacatacagataat

SEQ ID NO: 378632 - DNA, 3091 bp, Cannabis indica
aatagatagaattcataaaattgtctctcggaaaaacatggctcataaataaggtcacaatccacgcattgccaagttatatttaattagttatgaaaatgactaataatcttaataaagagaaatgctaaaagttacaagtggtgtcaagtatcctcctacgtgtcaatattgctattggtctaactaagtatcaggtctcatatagttttaatataatagttttacttaagaagttattgttagtcaatcgacaaatgatactatttaagagtgcgtaggcaccactacgtagtacccaataacaatgctcttaaaggatgcatgtatgggccacaaccaacttttgtgttatcaattcaatagcaaggtggtaggtgtactacaacaacaccactgccactactgctactatagtcactgcacaataaattttttattacattgaataattgtatagtgaattgtttttggtacatttatttttatctcatttgatacctaagagaggttatttttagaattattgtaaattttttaaaagattcaaaataatttattctgtcagtttagctaatttttaacacatgtaactatttttttttatactaatagtatgtatgtaactgtttaaaatttatttttaaaactataaattatttaaaatttttaaaaattaaagtacaagattataaaaaaaattagacttaagcatataaacaaacttaaaaaaataaaaataaaataaaacttgaatcttttttggtggtttagtataaaatttagtaatagccaaactattattagccgtcagatagatctagtgatctacgatagaaatcgcatcacataacaacacattgaatttcaaccaaactgattgcaccattaaattttaatgtagtatacaagtaagtatatcttttggcaaattaattaaacacatcaattgaaataatactccaaactgaaccattttgggaaaacccattttaataaatcaaatctatacaaaatatatttgtttatacctggattgccaataaaggcctatgactgccctccaagttaagtacaccattgtagggaatcaaacccttcaagctagatgtaccttcctccactaagagatcatcaatactaatctcatcagccaaagcctcaacgacctcaacaccttccatttcatcgtcgtattccactctaaacactccttcctcgtctttcccaagcttcccagccaattggtagaaatccaccaaaaccacactaagtccttccttaagtttctccacactaccctcgaagttgtcgtttcccttgtaaagcatcaacttttggttgtagtaaaaagccaagtaagggagatcgaaggtcactagctgacactcttttcttcctatgtctttcttcggcttcacgtgggattttccgaccactttcaccttcggaatctccattgtttaaactctagagagaaatggggtcttggttttttttttgttgttgagaaaaatgtaaagaggttagaacgttacttatagtagtcacaagataaaaaagataaaaaaaagtactctacttgtgtagttgggtagcattaatgagtttctaggggtgtagttgtgatcatttaattcttcttcctctttaattttaatgtgaatttttggtgagctatatatagttttaatttaagttatatgtgctgtgttttttttaagaaaaaattttcattatacgttactaatagagtatatagtgtagcacaataagtatcaatgattccgtattagtttttggctttttttttaacaatttactggagtaacatataaggaaatattacatgtttttccaatgactatctaagaagagtccaacgagcaaaaaagggctatttcaagttaagaaggccataggaaagctaataatttcaaacttattgtgattgatgggaaaacgattattggatagtaggaaagaaagccttaattaattagtagatcatcatttactactatgccaaccccacctgtactgtatgatccccaacaacgtatggtagggattagatgtacaactctttaaggatttgatgtaggggaatgtgcactcactacaaaaacgatgacttttgccggtactcttaggattattcgccgcctaaaatagggtttttcgccgttttacatgattgtactgcaggtaaaactacagcttttatcactctgcaccttttattggcattaaaacgtgtcagtagcacattatcctaaatgtgccagcaaaagtagttttagtggcgcattggattaatggcgcctgcaaaagtgtggaagaaaactccatgcatatgctggaaatttgggcacccaatttaagggtcttactgacacattttagtgtcgacaaaagtttaggcgagatcaattcccctacatcaaatcttaaagagaaataaaatacccattaatgggtaatatccattaaaaagtattccatatatatatatatacacaccctattctaccaccggaatcaccaccacaaccaccaccacttcttttttcgttgaatgtgattaagaaatttggggtgaggagttgattttgagattaaaattttattttaaaatggataattatttaagggtaggaggatgattaagagatgaaagagagttgatttttgggttcagagttgatttttgggttcggagatgatttttggtggttagaggcagagaagggaggtgaaaaatcgttgctaagaaaaaaaaaattaggttgaatgaatggggaagaagaagatttcttattttaaaaactcatgcaaagtgggcacgacactgcaatttcgtgtcaattgaagcaaatggcacgacatgtgtaacactctaaataattaggcacgctacccaagttacttacgaaaccctaatcccctaaacaggattactaatcaaaaggcacagaatttaaacttttgtaataaacagaatgaaaataaaacttgtaaaaatttaaactttacaaaagttgggatcccaaaaatatttataaactttattacaagtctctttctttca

SEQ ID NO: 378633 - DNA, 5116 bp, Cannabis indica
tgcaccgatactatcagtaaacttggtgtggtcaggttcctttctatttttctttaccttcttattaatttccatgtacacctcagcgcaaaataatttgaataaaagaagaatttttcatttcatatttggtctttaaaagttctatcatgttacaagtgatcaaaactcccatctattaatcacttgggggtagcatatatgatattgtcatatataattttacaacttttggtaggaaacaactaagttgaattctcaaatatcagagtaggaagaattacctaaaatcgacacctcaaagaaccggaagtaacttattatatctgaagacaatttaacacttaaacaaatataacagtaggaagtattgcctcaaataggaacctcaaggaaccaaaagtaagcaactgccttattatactcgaaattaagtttcgtacattaaacatcaagtcaacttcaaatagaagttgaggcttcatggttaatacaaccatagtattcaagttacttaaattaattgattcagatcaattaaaaaattaagttcgaaaaatcctaaaaataagtgataaatgctaagaaaaccccgctgcaagggtataatatattgtctccgaacactcaaaaagggggacccttatccctaaaaaagaaaagaaaataaagctaatgttgtaggcaagagtaatcaaggatgagcagagttatttaacgattgcacatcttgagtttgaacatcgaatcaggccttcattatcgcagactcagtcgagataggcacttcaaaatccagaagagcagagtcatccacaatctcaccaaccagaatggtagttttgggattaaaatggtagtttttggattgactgctccaaattcctgatatgcacccttagctttgtctacctcctttagtgaaagaatcttaggcaaaagctcttccttgtctttggcattgaggaggttgattgccaatttattatgttgctaaagggtatatacggaatagacgaaggcttggtctagagccttgccatgttgagtttcctactcctgaagacgtcccttcaaatataagctttcagcctccaatttggtgattattttgtgggattcctcacaagctttcacagatgcaactagtttactctcagcctcctcaaccctcttcatatcctgcacctcagctacctccaccttctgttgcatgtcaagatggtgctttacctttttctctagagtagtctccttgatgtacttgtctttaataatcttagcctacctatcatactcttgagataaaattgtaatcttctgctccttctactggacgcctagcttgacctgctttataccggcttctaattctttcattcatgaaagagccttggaatacatgtttttatacctgtctccatgatctttttctatttttgttgacttcctttcacaggacaaagtcttttccaaagagtcaaataatttttacttaatggtagcttccatcttggcattagcttcagctaaagccctttctacttcttctcttctcagctcagcgttggcatgctctaccctcagcacctacaggtcataacctagttgaatgactagggaacatttcctctctccgatcaagccaatctacaaaagaagaaacataagtgaatcaaaataatggaaagacacagcaggtttattcatgtcaaaaaagcgttcgacttatgacattagcctaggtcctcatagcatcggccacatacatttgatccctacttgccattatggaaaacttgtcagtcttgacctacagcttgtagtaccactctattccaataggtcagcaaaaaatggtgacacatcggtcccaaagcgaggacggagcttctccatgaactcaaccctattcacaagaggagggttggcttcgttcaatctgtcatagtcaacaaactcggcattacctctagagatgatgctggtggacaactttttcatctcctcagattcactaccacgcctcttctagtagaactgatcatggcttctaggcgagcttcatccccttccgtcaacagcaaaggcctaacaggaagagtgaaggatgccaatggtagaggaggtagttcactcgtttccctggaaagctgagtgcaggtggcaggaataactttaggcagtgggggtggtagaggaggatttttattgtcctttgctgtattggttcttcgcctaggtggccttcttccattaggtgcattagctcctttctgggatttagtatctgaggcctacctccttgggctaccaactgcaataacttctcttaggtctccaccctcaccttttgttggcgccataattagattaaccatcttgcttcttcttgatcacctaatacaaaggctccactccaagaacacagcaagctcggttagatctttaatggtactgaactcaacttttgtccttagagcctttagaatagcttctagatttgaggccagaggctagatcttgagactcactcctggaagccttgtttttctttttctcgtctcaacccgcttgggagatttcccaaatcttgttagatcgagttttaacgttgctcaattatctatttagtagcccaatttgcatagtggctagtcgatctacacaaagcaaacaaatatccatcaaacaaattgtaacaaaagatatggtttttacaacacatcatcattcaagacattgagacggtccaaaccattaattctagtataattgacttttcccctagaaaaaagagcgatgtattctcgatttaaattagtcacgtattggaagaagcataggaagtaaattttaataacagcatcaactatgacatgatggtgcacaagttgaatgaaatggttgggactcttgacaataccatctactctagactaactatccaaagacgagaactcccagaaggtacacactccagataggaagtcatgaacaacgcaagaagagagatgacaaaaattaatatcaaatccaaaactagtagggttttgggagaaaggaagaattagccagcacttttgttgtaaattgatctacttcaaaaattttaaacgaaaaaattcaaaagattatggggttcgtggtgccttaatctacttaagatggcattcgcacaattgaaaaaccataatctcaacccataatagagcatgtaaccgatcactaacctgagttgttagtgcatttagtgagttgatttctgcatcaaaatccaagctcgtgatttcttctgctataacagtcttagtcattagagagggaaggtgtgggaattctcatgccctagttcttaggagaagacgaaggcaaaactccatagcattttccaggttgaagaagaagtattcactttgaagtcaatttgaagttcgaggaatcgcaaggagactcatacaccttgaagggatgaaaattttaaaaagaaggaaaagtggtaactagaagtttctaagggtatctacacccaaaaatacgatctaagtgaggaggagatagacatccacgatcctttttccaaaaacacaatttccttctaacgaatgggagtccaacaatccatgcaaatcctagcattaaatgcactctagaatgaagatgtgaagcaataatgaaaatgctcctttttggttttcgcgcaaaaaattgaacatctgccaaaatatagctgtttttggatggtaactccccgatggttgtgccttaacacacttgctactgacacgtggataaaccatcatcacagacggaaggcagcttccacggtcgagtggtaattgaaatatcactatttcatacatcaatttccacatgtccaaattaagagaatggtgctagcttccaccacacacaacattctagaaacttcgggggtaaatgttatacgtgtttctgccattggacatgtggactctagatcaacatttaagatccatcagtgggaccctcattaaagacaaaatgggccaagcccatccagatgttacctttcagaaacatgtcgtggttctgcactcacaaagtctcccatcttcaacaaaatgaacccagaagaaatatcgagcctaacaagactagaaagacaagacaccaaattctcaaaagacccttctgaattccctttatattcctgctcaataataaggaaattcctattagcagatcacaacactgcatcaaaccatgattaaaggataaactccctacaacaaatattaagcaatagaggaaattcctattagcagatcataatactgcctagtcagcagattgtcttctccacgagctagacttcatgagaaagcccacaaaaagtctttgatgtaagctccccattagagggaacggggaaacctaatgtaattcttaaactactatagatatcccattaatctcatgtactaagcgttgaactctcttgtatactttgcttaggcaaacttgagatgatacattctgtgtatttcataaggcatatgcaagcaaatgcttattgattaatactgactcgtggagtaaggttagataatgctgcaaccacattaaaaactatttatgttattttatactttctctatctattatttactcttcagttcttattacttttatctatttctaaaaatcttgataaacaagaaaaaatatgtgttatcttattttttgcaccacgacgtggcaatgcgtactagtgacacgtgtctgctattctcaacatttggttggagagatattttgaacagacctcagccatacatctgtacggatcatgtctacctaaccgaatagggcaagggaagatgatccagacagtaaatgaagtcatttcttcgagcagtgtttcaagacctaagtacttcaagattgatatcatgaagctcaaaaacacaagcaatccttacaatcatggaatcgaattaaagggatatggcaagttgccggaatctctcattttatgtattctaaatatgtaatgtatgttcttaccaattatagatattgtaagtaaaaaggaaaccttccctcaagcctttagccctataaatagtgatcc

SEQ ID NO: 378634 - DNA, 5064 bp, Cannabis indica
ataatgataagactcatgagcgacaaacacagacacttggggaaaggaaaaaaataaaggtccgaaccccttcatcccaaacaacaaaggagcaggaaaagaaaaagaaaaaagaaagtaacaaatctctctttaaaaaccctcctaaaaaaatccggattccagagacccacttaatagtagttgtaaaacctggaagatcaccaaataaaattggctttacatatatgatgatgaagtctgacatgccaccaaaccatccatttgataccctttaccgttgttagcctcaccataacaaagtgtctcaggcagataggagaaagtgttccttatacatggaaaacgattttctttgcagcataaaaatcaagaaaatggcggagacactaatctacagaactatgcagaagttgggggagcttcggtctccattggctcagctggggccgcaggtgcttccccggactcggctgctgcctcggcattattggaactagcattcgcatcaccaccctgaggttgctcactgccctggggaggtggggtttgtggtgcctctggggtagctggcttggcaggtgcgggtttaggcttcatcattattggcctacagaatctgctcagcacagaacaaggaatattaataactaattaaattaaatgattggaaaatattgcaatacaagacttccgagaatggggatagcaagttacctgtcaagtgcttcagccttcttcctaacatcagctgacaataggactggagacgcatattttggaagcgaatcctgctgctgctttttctctcttaaccaggcctcggcttcgacacactctttcaagacctatagcacaacaagtagaattagagttcaacagattaatactcggattcaagacaacgtgcaaaagtgtcaagttgagggttgccaggtttgctggcaaatgctaaggattaccttctctttctcggatatatcaatatgatcaaatttgggatcggttgaaacagctgcttctctgtaactattaatacagtacgcaagttgatcaatcacagttcccctctctgtgtgctccttgtatcgttcttcaatggggtcaccttgctgtagaatttacaagtcaccatcagcattcagacttgcagttaagtctaaaaagtaacttaaaataatattaaaagagagaatcgttttgcaatgtaccttcttgagctcctcaagctttgcaatgtaaacacctttagtttcatcttcaccgtcttcgtataaccagtcctctacaacctgaagcttgttaataagctcttccttctctggagggtgacaaatgcctcatacttgtcattaagctggaggagcaaaagatatttgttagctcaaataagaccaatagaatgcacaaacaataagatgaagcacatatgcccttccataccttgtttctcatatcataaacataagcctcgacggcatttttcttgtcttttgtctcttccattacacgatcttgtaaagccatttcaaattccttctctactgctttttcaaggtcagcttgggccattcctccataaacatgctccacaacaggaatagttgttttcttcaccttcctctttggagcatcaacctgcacaaacaagcaatagttataaagaaacccaagcacaaacagaaggtatggtaaacacagataacaacgaggtaaaaagaattccccgtatatttaataaacactcaaaaaaagtaagcaagtagagacaaccattctcttttccgtcaccaacctaacctttctcacagtattcatagttaatgttgctaacgaggattcgacataagttacttgtgatgtatagcataatttaaataaaggaaaacagtgaaatgggacattcatgaagattgaataacaatgtaccttggtatctgtttccatctggacaggcttgtctcctgattcaggaacaccattttcagcaccagatgcatcagtagttcccttggcatcctgcatgttaacatcagcttcagtggagctaggtgggacagcatcactggaaggttcgtcagtctccatcttgttagcttctttaggtgcttcctttgagacaggaacttcaacctcttcctcctccaaaagctaatacaagtcaaagtaaatatacaaagtccaaaaaaattattgagtacgattaaagccagaagatcaattttagacttactgttgctgactctacagagacaattccatgcaggttcaagcgagccttgaccttcagttttgagcgctcaccccttgcacattggaaaggaccaatctacgtgcacaaacataaccaatgttatatagagtcagccaaacaaaaaagcagataattcacaaaataaattttaatgttaagagtttgaagacttacagtgtaagtactgatcttagcaggcgcctgcaggtcactggtatcagcatactgcacatcaactgagaaagtacctgatcggtaaaaggtcagagccttgatacttggcagttggtttcctttgggaaacacaattgtactttgttgattttcagcccctccattctgggcatctggagcagagcccttccaggacagcgcaattgagaagggaaagctctcattcaccttcagattaaaaaggggacatatttaacaacacaagacaattgaatgaagaaaaaggagtaattctcgaatgattcgggcaaagcaaaaactaaatagcacaccacatcatttgttacaaagtctggggaagaaatatacctgaaactcgcgcactttaaaggttggactaagaatagcacattccaaggcacagcccctagcaacacactcacttgcattcattgttcgccgaggctccttcttgaagaactcagtcaaaattttgactatagcaggaacacgagagcctgaaccaaccacctcaactgtattaatgttatccactgtaagaccagcatcggcaagagccttttccagtggttttttcacacgctccaaaattggaatactgatttgttcaaattcatcacgcttgatgtaacccctcacatccttctcatccattaagcactcaatattcaaaggtgcctcaggattagcactaagcattttcttcaacttctcacaaccagccctcagccttaggcaagccctggcattctgataaacatcgatcttgtactgttccttaaattgctcagcaaaatgatggaacagtgcttcatcaaagtccctacctcccaacgaccgatcaaaggaatgagccaaaattttcagctggcccttcttaaagccagcaatgcacacttgcatgctcgcatgtccaatatcaacaaaggcaacattcacttgatcattttccggcaaatccgtcttataaattccataagccagggcagttgctgtagtttcatgaaccaaacgtagtgggtgcaagcctgcaattgtggctgcatccaacatagctcttctctgaaggtcagtaaagtatacgggaataccaatacagcaatcaacaacagctgcattcagattcttttcagctatactttttagatttgacaataccattcccataacttgggttggtgtaaacgtccttacttctcccaaataacgagcatgtatcaagggaaagccatcaggcccttcagtaacggtaaaaggcaaagacttgagatccttttgcaactcgggatcagaaaattgacggccaattagcctcttaatctgagctattgagttctttgggttcatcatagttgaagcagctcctgctgtcccaataaacctctgcttgtctccaaagcatacaatagcaggagtttcacgcttggactcgtcattgaggactacatcaatacccctctgcctagcaacggccacaatgcagctttcattgccgaaatcaaaaccaactacgctcatcctcgctaaactttatccaatacaatctgaaaattcataaatttaattccaaaatccatcaactaagctcaaaacaaaaccaaatacttgttagtgttacaattatatttaaatgtttagggttttccaacttgaattgcataacatttccaataaacacaacacaaaacgcagtcaaacacagtcaaatcacatcagcataacacgcatgataacacaagagaaatgaaaacaaataaacaaccctaaaatcaaatacccattttcgcaaacaacctgagctaaacttaaaaaaaaaaaaaaaaaaacgaatcctgcaatcaacaattaaatcacgctattttcaaaagaaccaccaaccagttcaaaagaacacaaatgaatctaaaaaccaagggaaaacgaattatcaacagtcccggctgaacatttcaacccaatggcaaaaggattcagatctaacagcaatatgcaaatagagatctgagtcatctgaatctgaaatgtaaactagggtttggaagcgtaccttgagagcgatccaacgcaggtggtaaagtaaggagcagagagagagaggttttggaggtttctggatgtgtgtatatagagaaaatggcaaagaatgaaacgaagaggtttggtgtgacgaaggtgtctttttatttagggccctaagatatagaacaacacccagggatttgtgtggaattttctagtttattattttttattattattttcaattttaatttaatttaataaatttatatattcaatgtaagaagaagtggagagtggtcaaaactcaaaagtttcttagaggcgtctaccatctcttttcttctagaaagatctactaaaaagcacaataaataaataaatattacttcttttaaattctattgggctttaggtatggcccaagttctctatttcttcttgtttttttctttatttcattgtgaattttcttttcgagcattgctactatatactataataatggtatagtattcaaaatcataatattgtaatagagaaatgtaatagaataaataaaaaataattgaaattaatatttgtaatatgttgtt

SEQ ID NO: 378635 - DNA, 2595 bp, Cannabis indica
ttctgcgcctcagtggaaatttggaactgtcagaaaaatgttttcaagagttgcttctcaaagatcaaaaccatcctgcatccttaatcaattatgctgcccttcttttgtgcaaacatggttcagttgttgcaggtatgctatgatgtgttacctcaatcagtgcaaactctgttagcttctttgcctctataaatttgtgcaatcaaggttgattaaaaattaaagtggttgaagaagcatgcttcatagtatttctacccctctaaatttgcaggcgcaggagcagatgctggagagtgcgcttctgcagatcaggttactgctgtcaatgttgcaaaagaatgtttgttagcatccttacaaacagatccaaaggcagcacatttatgggctaatctagctaatgcatattatatgattggtgatcatagaagttccagcaagtgcttagagaaggtactcacggttcatttcttcagtccttaatagcttctttcttgagtttgttcattggtttctttgttctcaatggaaacttatcgacctcatgatctggattaatgatgcataggcagcaaaattggagcctaattgtatgtctactcgatatgctgttgcaatccaccggatcaaggatgcagaaagatctcaagatcctagtgaacagctttcttgggctggaaatgaaatggcttcagtaataagggatggagattctgctttaattgagtttcccatagcatgggcagggctcgcaatggttcacaaagcccaacacgagatttctgctgcatttgaaactgaacagaatgtgctgacagaggtagaagagcgtgccgtttacagtttaaagcaggtaataattttcctacatttaattgaagctttgaatgcaagtaatcagcttgtaataagtaacaaacctatgcatatgtaaaaattattcccctgcctggttttctaagtacttttatttctcctgtaggcaatagctgaggatccagatgatcctgtgcactggcaccaacttggccttcatagcctctgtactcgacaattcaataactcacaaaagtatctcaaagcagcagttgcccgttttaaggattgcagctatgcatggacaaatttaggtttgtacaatctcatggctgattttatatctctacgctccatgtgattttattttatatatttctctcaattatcaacaatccattctcctaccatattctaaacttttgctcattaacttggatactaattgcatgactaggtatctcactgcaactgtcagatgatccatcacaagcagaagaagtatacaagcgagccttgtcattggccacaactgataatgcacatgccgtattttccaatcttggaaatctctatcgccagcagaaacaatatgaacgagccaaagcaatgtttacaaagtctctcgaactccgacctggctatgctcctgcctataacaatctcggacttgtatttgttgcggagggtcaatgggaggaagccaagttttgttttgataaggctctcgaggcagacccattgttggatgcagccaagtccaacgtgataaaggcaacaacaatgtccagattgcatgtgttttcttgaagtcttaaagcaatattggcaatctccaaattgcattccccttttcatggaagtcatcaatattaatgtgcacatgaaaaggtccattttgttttcgctcggcacatggcaaccgaatttaaaggccacagatattttttagcgcgtattttgctgccaaaccgacaaatctcactctggtggaggcaagccttgcagcgacaggtgcaactgttcagccatcaagaagtttccaaacaggtaacccaatcccttttctccctcataagccatcacagaagtttcactacatacaaatcttcaaattacaactcatattcgctgagcaccactagcctgtgcaatgctgcattgtaccccatgtagcagacattttggacaatgtctgacaaccacggcctggcctgcctctacagaaatccatttttctcttccatgctttgggttctcataaacatacttggaccagatttaattgaagttgacagaatgccaatgcagagcttccgcaaatcatcgtgggtgaaagtaaattaaactgctgcctcatcaagtggtaaatcttcaaatcataacaaggattccctattttggagtagtgcatcttttggtgccaaatgacattcacccacgatgcactacaccaaaataggattcccaagtcaaatagtgtttgcacaactgctttaagatgagatcatatctcttatgtgaatattgttcttctctttaactagttttggtagcttcaccttttatataggggatatttaagtatagctaaatgtaagagcgtgacttctcgatctatcctaccttgaaatcttgtggatcttttatttttattattatgcagtgaagatttgatccaaagaagatagtttctctttctcttatcacttgggtggcgtttggttggaggtaaaccaatggaatagaatagaaaagaaacaattttcattc

SEQ ID NO: 378636 - DNA, 1376 bp, Cannabis indica
agtgacaaggaacaaaagatattctatgttctttacacttgttgatcttataattaagtgccactatatgtagtttgtaacacaattggatttatttttttgtagtgtgcttggtgcggttttgatagtcattgggctttactcagtcctatggggaaagcacaaagaagcaatagaaaataatgaggagataccagaagctataaagtatcatcataatcatgtaaatgtcattaatggaatttcagtgattgaagatattgaaactaataataagctgggagatgaacttaagaagggagatcaattattgatcaataataacaagcttataatttcctctgttgccataagtttgcctatccaagatccatcaatgaaacccaaccaattaccaaaggcctaatcaaaaatcaagtgaaataatgggaatattgtggggatgggcttttttgtcttcttcatcctcgattttttttctttttctattttagatataaatatcagtttacatttcgggttttgcactatgtagtatgtatgttaatgttaaggagtaattaatgaaattaatatattatgataatctgatcatgacagtcttttctttattttcactcatttttggattattatttataaaattattatatcatggaacaaatatagagaactatttatcattcaagagaatggttaatgccgaaagtaatgaagcaagaaattaaacaatcatcaattggactcgtatcactttttattcacaatttggcactcgtttcattaaattggaatacataattaagtttggagggtaccaatacaataagtgggaaatttgatttttctaggcttaagacaagaccaaaattaaaaaataacctaaagtaaattgaacactggtgaaaaacacccttaattattgaccaaaaacagtgtcaatacaacaagaacagaacataacaagtaatcacaacaacattcaaaccagtacacaaaacagaattggacaatattgaacattaaataaacttagctctgaatcaaatggaactttattcaaccatcaagcacctttacaatccaagcaatgtactcaattgaatctaagtgtttaacatattacaaagcaaacctcacatggtagaagtcacctctaaagatgagcaatttatttacaaccctcctaatcactcacaaatatttgacagaatttagagagaaaaatagagagaattttaggtgagaatggctcggattggaactgcactaagagtagttttggtgcttccttttataggcattggttttcaagagattagttggctaaggtgttgaaaaaccgtgtttttgcaaatgtcagttgtatataagaa

SEQ ID NO: 378637 - DNA, 3837 bp, Cannabis indica
aaaaaaaaaaaaaaagaagatatgaggaaaacgacaccgttcgcaatgcatcctcatttagtgaacaccgaaaccggaacaagagaaaaggagacaagaaaaccaccgccaccagttcttgatttctcagaatcatacacaatcccttttatcttcttcatcaccaaaaatagggtttagggtttttcatattcttccattcagtgacctttaaactccaccatttatcatcatcatcaatggcgaccgaattggttgtcaacacggagagagtccagaaattcttcaacgacctggaggagcaaaagaccatcctttctacctgcactcagctattcacaaccatatccacccacttcaattctctccaacattccctttcccaaaagtaccaatccctcgaatcgagaatccaagctcttgaatcccattcccgcgataccctccagtccctcgacacccgcgaggcttccattcccgaacgagaatccgcctccctcgcccgcatccaggagcagaaggaagctgctttgtccgagttcgaaaagcaaattcccgaaaacttggaactttcagaggcccttaaatcattttcccggaaaatggattcggcgggattggtgaaattcatcgtttccaagaggaaggagtccgtatctttgagggcagagatcgttcagtccttggcggaggctgtggacccgcctagactggttcttgattcattggaggattttctgaattccaagtcggccaaagctggggttactgataagcgatgggcttgtggattgcttgttcaggctttgtttcctgagagccattcggagaagataggacctcaatttgcgagaactgtcgtggagagagcagtcatgattttggagcagtggaaggggcagatggatggtggtgaatcagaaggcttggctttaggggctgccgaagctgttatgtttgtgcagatggtagttgggttcgggttgaatgcgaagttcgataaggctttcttgagaaagctaatgctgcagcatgcttcgaggagggatatggcaaagctcgcagctgttttagaagataaagactcaatgcaaggtaaggttggtttttaatttagagaactacattaagtagcttaataaaccttttgcttagcagtgatagtagatatgtgtagttacatttgattgactcctagcatggtgaaattgtagaatttataacattacatgagaattcacacgtttaaatgattgatatacatacaagtgaatcctgtatatgttacaaaggtactgtgaacagtaccattacagtgagtataacagaaaacttcttgaaacttattgtctaaattgctactggaaacctgtctattttctagtgcaatgaagtataatatggacaatgaggcaaggcaatgtaagtaggttaagagataaaagtttcaaggcactggaaaaggaatggaaagtataatcatagttaggcagagaaagatttgaactgttatacggttcttttatgggatgggagtttattatgaatttcaagtggaagaaaaaaataaaatgaaggacaactcttatatattcaaaagtgacattggttgctcacatctgaacttgtttttgtttaagtaaaagcttttgaaagttccaaatgtttactttgaatgcatataatcgagacatttttttctgactttgcagagattattgatgagttggtgaagaataacaaagaagtggaagctgtctattttgcttgtgaatctgggttggctgaaagattctctcctgttactttgctcaagtctcatctcaagaacttcaaaaagaatgttgccaacatattaaagaatggaaacaatagcttggttgcaacggtttgtctatattctgacatattttacaaatgtctttttgcatgtagtcacatgactgcactttttaagattttataatccaagtcgtatcatccacaggaggaatctagtaatgtggagttaaattccatcagagcaataatcaaatgtgtagaagaccacaaattagagtcagaattttctgttgaaagtttaagaaagcgggctactcatctggagaaagccaaggcagagagaaagaagagttcaggagcctccagtaaacctcaaaataagcgaggatacagtgccagcagcggccgaggtggtggtggtggatcatcttcttttcgccaatccaaagctgccaagtattccaacacttattcctcttttagcaggaggaatgcgaatcctcctccgccggttcatcacagcactgctgcaagatattctggagcatacaactaccctgttcaagctgtgtacgacacaccagctccagccccagccccatatccgtcctcatacggggttccccatgctcaaagccctgtcgcaattcctcaacactatctctcggccgacaacttgagtagtactgcctttcggagcagtggctcttacagtggtctgaccaactacagaccatatgattatgccgaagcagctccacatacttaccaaccgtcctcatatccaaaatagattaggagcggaaatggcctaatgataagagccttgtaatattacttttcttttctcttttctggccaacagatgagagaattttgcttaaaatggccgactttttaaggttaaacccaaaagttggtaataagccctgtttttatgacagtttcagaaagggcttttcccagcttgcaattttttcattctattttaaaatgatgtatatgattattagattacgattactgaacagtgaattagcataatatagagtagtatttttaaaaatttctttctaatatagagaaaggttttataaaacactaatttttttttaaataatttttatattatttattaagagtaatatagtaattttataataactcatttttttccttagtactcaccaagcaactaagaaataaataagtttttaagtaattttatgtcttatgttttctttaaaaaagcgtaaaatatgcaatcgcatgtggcagtggttgggacttctttggaaacaaggaggttgtataactacaactattgttttctctttttttttttggtaatttttggctaaactacgatttagtacgatcaattcctagactgaaattttagggactaagtgcatgtttgacatcataactaaaaaattgttttttgtttttaaaaacagaaaattgttttctgaaaaacaatttggcttgtttggccttgttttttgaaaacagttttcagaaacaaagttacaaaaaacaagaattttgaaaacaacaaaatgttgttttctgttttaaaaaccaatttcacttttggtctaatattatttttaaaaaacactaaccaaacatgacttgtgttataaaaacttcaaaaaactattttttattttacatttctaaaaacaattttttgaaaacaaaaaacagaaaataataccaaacatgctctaagcttttcaaattttggttttgttttggtttcaccatgatacccgcatccccttgaaatctctcttgtttcgctctgtttctctttccttttctctctctgtctcaatctcttttgtcatcatcgtggacaaaaattaggagctcgaatctttatcgatatcgttctctaccatgagtggctcacgaacaaggaatttcgaattttcaatctccattcgtccagatccaatctttttctctctttcagttcttttaatttttttttggaggggagagggggtgggcatctgaatattgttgtggctgtggtagtagatc

SEQ ID NO: 378638 - DNA, 3099 bp, Cannabis indica
aactaacaacaaaataaaaaaatattattgctttatatctccatcgacaaattaaaataaataaacaaaaaaagacaaatttaaagcaagaaacaaaaaactacatgtataaagaaatatttaattttgttttagattatattttctttataaatatgaatagattattcatttgatttactctattttgaaatatatgtgtatcatatgtatgcgatttttaaattattatttttttacattaaaatattaattatatatattttttaaatatatgtgaattgaattggatcgattatttttatatgtaaatcaacaattactatttgtacgagtgcaaattttagattttctaatcgaatccaactagcataggcgtggatattcgtattttacgaattggatcatgcagatttaattaaattaggtattttatgagtgcccttacatttatatgttaagtcactttttataagtgagacccaccttatataaaatagattagttgaaattatttgccacataagcgttcatcaaatttttgtgttgctgtctagattttttgtaagcttgacacgtggaccctggtccaggaatgtttgacacatggaccccgattttgagaaggacaaactattctcgaccggacataatcattcgccctgaaggcctcctgctaagagtacatatgcggtgcggaaggctctgtgttttgtggtattcactagaccccgaggtcgaagcttaaaacttcacggaaagacttcccccaatatgccttcgtagatcgaccattgagggactaaggataggtggattcccgcttggtgtcgtggaagagctccatccgtacctatcaggttacaggcgtgacgaccttgcaatgtcaggtacgatgccagattttgtcccccacgccgagctacagtacaaagcatgttcacaaacctgtacttgccccagtgatccaacagctactatcaagggcaattcaaaaaggatgaccctaaggcgatgcgtgtatggtgtccggactgtacaagctgacaccctcaaatgccatgtgataaatctgccacctaccttaacgatcatatttggcccaacacgattaacctagcaaacatgcaaataatgaagattgcctataaatatccctgcattccatggggaaaggaggagaaccttctaaaaccacaaacactgtattttaccaataaaaactccattgaaatttctactaagcttcttcttcttcaagaggaacgagagaaatagagagttccagtctagtatatttgtgtatgattcattgtctgcctaagtggctaataaaatggactcgtggactaatgatagttaatgtctgaaccacgtaaaaaatctcttgtcatttattttatttactttctttcttaagctctaaatctaatcagtttttaaaaatctcggtaaatattttggtacttttattgagagctcagaaaagatagaaacatgcatagtgtttgccgtcgcaagtcttgaaatacaaagagaaagtccaatcaagaaaagaaaaaagatactgtcgtggacaaaggcccacacccttgtctgagcaagagaaatgaagaaggtggatgccaatggtctttgagcttccgtagctctcatgcatatttaaaaaggcttagatttggccggtcaatctcttaaaagcacggctgatcccttgtgctctcaagcccgagtgttctgctgctcacaaggggcgtgaccctatagaaacggtaagatatgagaaacttctaggtttagtggtggagttaacaccggtcgcaccaacggccaataacctacggggaactacccgaggtggcagacttatcaagttgagcacctccttactactctacccccttgacctacgatctcagtgccaatactgatgatggtgctagatctattaacgtcaactacttccactaccttttcgactgagcggagaagctgatcagaaactgacattgcaagaccccacggtgttggcagctatatgctctcctccaacgtcattagagtctgctaggtttctggttgggcctaatcatggtactgatagtagaaagtaggtagttaaggcaaatcactttggaccgaggttgctgatagggatttctaccattataatgtaaatatagctcctcaggtaacatcaaagaaagtaacttgagacattatagtcaggagagaaaatatttgtcgaagcaacggtggccgcactaaaggtctgagctcttaactcacctcgagctcttgcctcgtagggagggtgtgaaggtcacacccaggagaacgtcagttcccaaacaacggagtgcccaaatcttccccctaattttaagcctcttgcaaattcctgaaatgtgctctctggtgttcccaaacacattagcacaagaaggaactgcagtagggtagcattcctccccgaagtctaacacgcgcgcgaactagcacctccttgaagatatttttttggtatgacctagcttttgtgtgaaaaattagtgggagttgataagtcttcaaccctccttcccgaacgagaaggactacttgaagtctatcgtacgcccagtggtgtttcaccctttgaattttagtgcaacttcagccttttctcgcggaagccgaagcctgccataaaaaattcaacgtgactctcgcgtgcatgaagtttttttcattcgtgaaagatcactggggttttgatacatcttcaatccttcttgatgaagaaactagtttcttgatgaagaaaaaccagtttcttgatgaagaaactagtttcttggtgattttttcagtgattttccccgcgataatgccaattttgactttttcgacgctggcagcagctttgacaatttttttgacaccagcagctcctcaggcaacttttctagcactactgcaaactttggcaactttccagccccaatgacaactccggcgatcactgtagtttcatttgttttatttatttgtttaataaaatatgaatggaattttaatattttttatggtaattcaaagtggcatattctatatatg

SEQ ID NO: 378639 - DNA, 5828 bp, Cannabis indica
ctagatcaaagagcgttaatgacaacatgtgattatagaaaccaattgtttgactgtgtgcagactttatgaagtttcgttcaaataatttcgacgtttggacaagtgaataacaattgtaaaagtttactttgtgttttgcaaaatatttttatcgtctttgttaaacgattagctaatatggtagctcataacttgctagagcttctataatatatcttggtagttgtttcagtttggaggatgttccaactgacttgctaccttgtttggtagtagaatttagtggttaatttcaatgcaagaatttccattaaaaaaaaaatctccaatggtggtgtataatgtagtctaaatttggtacatgctaaaaattatgtcaaatttggcacaaaatatagcatgaaccaaattttacaccataataaaatgttatttttttatttactcttttgtcactcaatagtatttttaatgacttttacattttatttatatattttgttagatttttatacactttcaattaaatttaatgcatttgtttagctttttttttttgcacatatttatcaacaataaaattaatttacctctaatgcatgggagtaaaattgtaatatttggcctaaatagaatattaactattttttttagccaaatttagcccaaaacttacacaatgcacatttttttgttataaataagctatattataactttgagtattgttattgaatattaatggtgcctaaaatcttttagagacaagcattttgtaattagttagtaatattccataaaagttattatattaaattatacgagactaaatacttaattgtacaaataataatataacaatgagcagagtataactaagcacaaagagtactttttagcatttttctttatctttccaccacaaattaccttactttatatttgaaagttctattttagtgcgaaagaaaatgtaaagaaatagaaggaaaaataaaaaaaattgtaaatcatatatgggaagaacaatacactcaattcaacataaattttcgtgaaaaattatttttttaaaatcattttctttatttttttcattatttccaaaatccaacttccacatagtataaaagtaagttacattagtaatttttttttttaaaagaagcccttttcaagtcgagtattgttatcgaactagtggtatctaatatttttttataagtaacactttataattaattagcgatattttttaaaaattatttttttaagttatatacaactcaatatttttttgtagtaaatatgtgactcaatacttaattataccaataataatatgatacaaagttctagagtagtatcttttaataagaacattattattgaatactagtagtagctagtacttctagatatattatttttataatattctctaaaaattattatattaaactatacaagtttcaatatttaattgaatcaatagtgatattatattaacggataagatattacctgccttttagcattactctttctcttttagtaattctctttcaagtgtactgctgcagctgctgttggagcttgacgtggacaaataaaatagtcagtccgaaaagaatagacaaaaactcaaaggtgatcctcacgcgccatatacagtgtatcagttaaaacttagtgagagagagagagggtttagtgcatttcttgtaacaaaggccgccattgtcgataatcgagcatggactccattattgcccattactccttaaccccctcaccctactcacctccctcacttcccactctctcctcctccatcaccaccaacctctctgctcccactctctcttttgctcatcgtaaaccaacaatgtccaggagagacgtcatcgcttccgcttcacaaaccctagccacgcctgagcccaaggagaacaagctctggggaggtcgattcgaggagagcgttactgacgctgttgagaggttcactgagtccatttcatttgataagctcttgtataagcatgatatcatggggagtagagctcacgcttctatgctcgctaaacaggttttgctttttctttttctctgttttcggacttagttttggtgtttgaatgctgagaaaatgtcggattgatcaagttctatgaaatgtttaatctttttatcactatctataatgtagggattgatcagtaacagtgatagggatatcattattgaaggtcttaataagatagagaagctcattgaggatggtaaattcgaatggagaactgatagggaagatgtgcatatgaatattgaagcagcgcttattgatatgattggagaacctggaaagaagcttcacacagctcggagccgaaacgatcaagtgctaactgacttccgtctatggtgccgtgatgctatagatttgattgttcagcgggttaaatatcttcaggttgcattgctgaaattggcaatcaagaatgaggctcttattgtacctggttatacccatttgcaaagggcacagcctgttcttctgcagcatcttcttttagcatttgttgagcaggttttgaattttttttttattaaattaatgtgtagcagaagagtagactgataggaaagcatgtggttctgtggatttcataacaatgagtttatgttttagagttcagctcatccagatacttttatgatagctctttttgttaaatagaatgagccatgatttagtattaattctgggcaattctgttgtttgacttgtagcttgaacgtgatgctggtcgtttactagattgtagagctaggctgaatttctgccctttaggtgcttgtgcattggctggtaccggccttcctattgatcggttcatgactgctgatgaattaggattcactggtccattgagtaacaggtaacccattagctgtttgagattctaattgtgtgtatagtacatttatgcctctgagaagtttttataattgctgcctttgggttacaatgtaatattgtattgttgatggttaataaatagttcttcataaccgtctgctgtgttgtctatctaacttattaatcaaggttgtccaggctaagcttcacataatacatggtcctcttattgggtctcatttctttctctctttttgtgatctgaggtgttattctctgtttttttttggtttgattaaacttagtgaaaagctctttatgaagagcgaagaagttatctgagattttgttgataacttttgatgtaaaagatcatccatacagcattcctaatttagaacctagctttttgtgtcacttgtgacttatggcttccctggatagctcgttaacttcatttattgacagtattgatgcagtgtcagacagagatttcatcttggagtttctttctgctaattccatcatagccattcatttgtcccgacttggggaagaatgggtattgtgggcgtcagaagagtttggatttattactccaagtgatgctgtttcaactggaagtagtatcatgcctcagaagaaaaacccagatcccatggaactggttcgtggaaagtctgctagagtagttggagacctagttactcttctcacactgtgcaaaggacttcctctcgcttacaatcgtgatttacaggtaataatgtcaacacttaacttatttagtgatggttttcacttttgagaatgataatattacgagacaatctactatgattgtttaagggattacaaaaataacagtcggttctaagcaattatggcatatgtactctatttgcaagagaaggccgaaatttatcccaggcatatgtcctttctttgcaagagacggccgaaaagtgtatctcatttatgctattgaacctggcgccaattatatcttgggtttgagctttgcacttgcttccttgcttctccatatgttcatacaactacacacacaaaattctgtttcgcttccatttgcatagttcatacaggtgtataggaaacatgtgtagtaacctggattcttttcacaacatttgtgcttgactaacaatatcttctttttgtttttttgtttcgtgacaggaggataaggaaccttcatttgacagtgtcaagacaattttggggatgcttgaagtgtcagcagagtttgcgcagaacattactttcaatgaggaaagaataaaaaaggccttaccagcaggtcatcttgatgctacaaccttggctgattatcttgtgaagaaggtaagatcactaacctttgctctccaaccggcatagctaaaatttgattagcttttagaatgccatcatcattagcagttccaaattcattaaaacttcacgctactggagaaactgatctcaagtcacagcgacagattgatgcacctctttggggttgcataaatctcgccatatcatttaacagcccacctttccttattgctgaaggaacttaccttacctgtatgaagtgtctttttggctacttatgaaatcatatttttttattccttggatgtaaatatattggaaagaattatatgatgtgaagattaagataggaatatatattcccaagatcttaaaatgttatcaagaaagacaagcattaacggagttaaataatttctgacgttagaatctgaatctttttgtactttacatatatgtcttgatggagaaagcgattgttaattttcaagtgatgttttatattcgggaaaaatctagttagttggatagatgtttattggattctcatctgatttctgcagggagttccgttccgaacttctcatgacatagttggaagggcagttgcactgtgtgtctcaaagaactgccagctgaaggaattgagtcttgatgagctgagaagtttaaatccagtgttcgacaaggatgtatacgagtatcttggagttgaaaatgcagttgagaaatttagctcatatggttcaacggggtcatcatcggttgcttatcaagttgattactgggtcactaaacttggaatcacaaaagagacctaactaatgctcggttctggaaatctcattaatatcgggatctggcgtcgaagctagtgtttctcatccagagccttaggaggagctttatagaactcctcatcaagtttttgctttgtctgaggttcctagtaagggtagactttaggatattacttgtatttgtcctccatttgctggaaaaggttctgatttgtgaaaggatttggggcaataaaattaagcacaagaaagaaatataatatttttttttaataatatatatataagtatatgtatgctatcttgaaataaatttgtttatgtaaaagtagaaggtaactaaagaaacaaagttgaaggcagaagaaatagagtagtattcttcaagccatggagtcaagaagattaccgagcttagacacgagcatctccaatatgctatacaaattggtgatgcattgctaaaatataaccactttgtaaaaaatatgcttggatggtgtgccaaatttgtcacataatcacaatgcattatgattagagataaaaatttatgcagcggggatgggtattcatgaggacccgttcctaatggggtgggaattttccgtcttggtggttaatggagcagtggtggaatacaatttcaatacttgaagcggggtgggggtggggataatactatctgcaccatatttgatccctatatagatatatatatataatttcttttttattcttaacatatatataatatatat

SEQ ID NO: 378640 - DNA, 2993 bp, Cannabis indica
ttaaaactgaaaaaatccctttattaaaatagaaaccaataactaagtatcttgaataaaatcaacttaattattaattcctaagtgatgcgtaacacttttcttacctcagtccagaaatcaggtgtgcgggccgacctgagtggaaacaaagctaggcgatcctagtcctatgtcacgacaaccaaaactcaataaatgtcttaaatcataacttcggaataaaaccctaaatccgaaatcggacataacctaacttccaacaatcctaaggtaggctacacaacacctaaataacctaaaacacgtactaggtactaccccgagccaaaacagaattcgaagaaaaactcgagattttccccctacagagcaaccattcgatcagttctagtgcaccagaacaaccggtcgaccgattctggcagaccagaaaactttgggatttcttccccaaactcgaaccaaaaccaatccatacctgtccaacatttctagaacagtataataccacaaaaataaggtatcaactcaacaattcataataattcatgtttatacctaaattaaacatcaaactcaaaattccactactcaaaacatagcagccatcaaaatcattaaactcaagctctaacttattcaaaaaccatgagatcacaaaccctaatctaaaaatcaactcaaaacttaaaaattctcaatccacaaggtagtgaagagtctggcaatgacattctgctaaagtggtagtatctttagggaatgctgcctaggacctcgaggacccttctaaggacaaaccagaagatcttccaacttcgacccaaaacatacttccagcctagattcaggatcaaactgaggaaccagtctaggagtagtcttttcctgtaatttttccctttattactttaaaccagttttttgtagagacaatttatattatgccttaaccgcgaggcttcatgtaatagggtagaagactgctacttttgatttatgtatgtttactttatctgccatatgctttcttttgctatcctcatctgctattatttgctaacttaggccactcgatagcttgtcttaggattttttgaagtttttggttccaacaaccaaaacttaatacccttaaactttccaactttagaataattagttgaatctttgaagtatgcaaactgcaatttctttagatgttaatttttgtcaaagtccttgttgatggcacttcgtaaactttggctagttaatcatgtacagaggggttgtaagcttgttcccgaatcactgtaggagtcctgtttccattgaagaagacgaagagtaaaattagcagagttttagctatctaaagttctgatccccctttgtatggaaatagaagggtatttatagattaagtagtgggtatggacatgcccatgacccgcctagggatcatgctcaaagtccacaaatgagataaattacatacaaaggagagttgactattgggtcccttggaaactattgtgctcgtgcatgctgcagctggacaattggggaccatttgtacgaagtggacacgtggtgcttaaaggttgagcctttaaaagtagaagtcacgtgtcaccaaaagctttcacctttattgtattcgtctggcagaaaagtgatggaggtgtgcacactaccatgcttggacacaggggacaagatctaatcatgtgtcagaaaaagcataactgtcacttggtgacctggcttgtgtcaaaggtagacatccacaatactcttgggcagtcgacatctacattaggcccttcgaatacccgcccgggtactagctacgcatgcttccatctttgggcctctctacgtccgggagagacaacacgccttctacatccgagaagctaagataaacttgttcctcgctctgtgaggattctccgcgacaagattgcagtaagggaatttatttaggaaattatgaggctaatccctttcttttaaattccatgtatcccttgcttagaaatacggataacacatagtatgtgtgcctttatatacatgcacatgtatatatatatatatatatatcaaatccaaactcctattataaatatttgcagaacaaagtttgcaactaaaatgatatccaaatcaataatgtatttctgaaaaagaaaaaagtttaacttacaaatagaatagaaatggacagcaagcttattctaatcaactttgaagtttaaaataactaaaaattaaatttcttgcattcaactgcaatagcaaaaaacaacaacataaaaataaaagcatttagaaaataatatataaccaacttataaacaatgctagcacaacgcagaagaaatatgagaactacattctttaagaaaatacatcaaatatagcaacataatctatgcacaactcagtaaaaaaataacttaaccaacttgtgagataaatggacatcaataagcattagatttcgaagttgagatcatttgaaaaaagatagaaaaccaaatccaaaggagattgttgaataataaaactctaagtttgagttttatacctaagatttagatttgagctttgccaacaaaaataaatcagctgaaatgcaaaaacaacaacaacagcaaaataaaataaacatatttatttaaaatctaaagataaaattagtaattcataaaacccaaatcaacaaaataaagacaatgacaatatcatgaagaaacttaacttaaaagattaaaaaaaaagtacaattgaagatgctccctttcttttgggtattatatcatacacattgcatgtattcttttatatatatatatacataaaaatcaacttaaagaataagaaaaacaaacacaataattgtgcaaatatattcagatctaagcttatactaatgtaatataaatcaaagaaaaataaaaggagaagaataatttagaatgttaacttactcaaacaaa

SEQ ID NO: 378641 - DNA, 5399 bp, Cannabis indica
gtagcttttaattctagtgaacatgtaacctaggttgaatagattatacttgttaattattgcctagaacaatctacctctattaatcttaatgtttttattgaattaaattttaggtgttttttcttgaattgtatggtaaaaaaaaaatagtcaacatcgtttttctttaaattaatttacatgtaagagattgagataattattttgtgttatctacaattgttagtttaatgtgaaatgaagagtaaaaatattattaattgataatataattatttagcgatgatgaattagttcataattctcttttatcatcgttaataccaatatttaatttgctaccttgttcttctagttcacgttctttgcatttagaatcataaaaaaaaatctcctttttaagttcttgtaaataatagtcatcgtaaaatctacctataaatttggtacaacttactataggcatcattgtaagatcagcttacacattaaaatattcattgtgccatgttcagcaaaggataatgatctaaaaagttgactagtaacagatgtagtcaactatgtttgtgcctgtcatctatctaccacagcattggtgatgtagattgtttcaatgatcataaatacaagataagaagatgttttgatgggtgcctgaatgagataagttgacacaccatcaccacaatggcgcagtgtaggacagaaaaatcggcttagtgtgtggagctcttcctactacagctacctattccattcaactgtattgagactaactgcagtatctcctagtctggttctccaacatcttcattgaagaaactaaatatgtttactttgcaggtcttaataaaagcatagaagtcaaaatgacactcataaaaactacctacttttacactacaagaaatttagtgatcttactaaacaaaaatgtgatctgaattgacaattctggtgttcccctcattataccatccccaactccttaaacgcctttccaattcacagctttcaccattgtttgttttgaagaaacagtgacactaaaaactcaaatctccactccacaatagtcctagaatgcacgctatgcagccacaacaaacatagcaaaacccacaaggtccgacgcaatgtggataagaccttaatattttttaaaatctagtctacatccacaaaagaagcacagtcaatatcttggaaagtgattcgtcccatatagaagtcatgaatgtgatctgggcaaagaggaagacacttccgattaaagctaccgtgaatagcacccatccccttcacccacttatcattatctattgggtttacctttaaatgtttttggagtaactttaccctgtaaactatagtatctgttctctcacagaaatgagcaatgcatgaatatggaggttcatcagaagctaatctaatcagagccaaggatatagccccatccacaagttttggatcagaaaggtttctatctcccatcatctttacttccctttctgtggggaaatgaacttcatcattcccactcatatcgaaaattttcaaatctttagtgtaatgcttcatggcttcccgtttggtcgattcgtgcttttctgctaatgttaaaatacaagaaaacctcaagtgataagttacaatagttttgaccatcttgaaattgtgacagcagcagaagaaatctagccaccttcttccaacaccagcataccacttcacaatatcagcatcttcaagagcagtgagtaaactgattggccttggacgacccatatgatttgtaaacccaaccagcttaactgccttcctaacaagttctacgggtgcatcaactttgatacataaccttgttaaatcctcaacagtgttcttagcatatttcctttcctcttcctcttcttttctcctttcttcttcttccaatgccattttggctttaattggattcagatgtttgtccacttgctcttggaacttatcataagaatcaacaagctcttggggtagttggtctctaatgtgtctcaaagaaagaaaatggcctgctgatagcttccggtgccaagcccatcgctcttcgagtgatccaaaaaactctcgcacgacttcatcagcccaagagctgacgatctttcttacatcattctcaagttgattttcaaatttaaagccatcactttgctttgactttttgaaaagatgactcaatatcttcatccccaatttcttcctattcctctctctggcattcttcaactctgaagctctaacttccttctgtctaagatacttctttcgagctctcattgccttttccgacactggaggatgcaaaactgaaggttgaactgcctgtagttccattccaataaaatcaatcttctcagacactgcactatgaattgctgtctttacagtatcaactttcaattccaatctcccttctaagtatttcaacacccaattcttcaagtctaaagtcagcatctttgacccagatgttatcactagtatttcatctaagtacctaactgaatatatcttaactggcttatagaatacatcaccatcatccttggaaacaagttcattcgacacaaatttgggactttcttgattcttctgaaggcgcatttcatgaagttctttatcaaacccattaaagtaaacattaaccaaaattgaactcaatccactttcctgaggaaaccctcttccaaagtaacaactacccaattcaactcccacaaccttacattcaaacaacctctttataatatcaattagtatcttatcgttgattttctcttgtataaacatgcataacttatctacatggcgattatcgaacttctcatgattaaagctaacactaaaccaccagctgggattttccactgagttcttgaggtatctaatggcggtgtgtcgtcccataccaattcgaccaccataagaaaaagtgacaaacctctcatcataaacaatctccagaaccattcgaatagcttcaaccaaaaccttcaatttcaaattgggcaaaaccaaatactcacctctattcataggaggtgccattttgacacaagcagcctcgatatcgaaccgattctcgcgtatctcccgacccaattcctgtagcgaaaatcgcttcgagacagaacgcaaaagagacgataactgacccgggtcagagccattgcaggatatggcggcgaggtttcggcaggcagcgaggagaacaggtgggaaaacgacgacgttggagacaaggtcagtgaagtttccattggcgtatcgggcgagaaccagagattggagctgggacttggaaagagagtttacagagtttaacgatggaatttgagggtcttcgtcaagcaaaggacttggtaaagaagcagagctaaatctgaagaaggggatggaatgagaagcgttaatgttgaaacttggaagaatggatattcttcttctgaggtttgtgagcattgaagcttttggaaatgctattccgcgacacttcaaatgttaattctgaacaggacaatcccattgctgtacctggactaagataatgaagacattttttcaagcaaaaagcgatgcagaggacgacttcactaattcagtcttggtctatttgggcccagcccattttcggcaaagctcatgaggaaccgtggactgggccaagcccaagcgtcaatcttgtgagcgttgaggaattgatagcaaattgatagttcatgattacataacaacaatagaaaagtaaattcattgaaaacagaggggtttgaagttcaaaattttcggtttagaagtagctttgggcatcaaaagaatgtgaacattaaacaaaggaagccaaccatttcaacaacaacagcagcaatagaaggctttaaatattacccgaatctatctttcatcagtatcctataatcgtttttattggtgcattgttgttggtacttattataatctactgccttcaaataaagttcagatggagccgtcttctaaggtttctgaaaagaggtaacacttttcttaccaataaggctttaattgttcctgatgatatcagaatagctatgactagggtattcaaaataaaagacaatttttttatattgttggaagtttcatttcatcgtgtttaggttggcgggaaaagtagcagtaataaccggtggtgcaagagggattggagcagccacagccaaggtgtttgctcaaaatggcgcacatgtcatcgtggctgacatcctcgacgacctcggcgcagctctggctgactcgataggtgggcgatacatacactgcgatgttgcaaaagaagccgacgtagaatccgccgttgaactggccatcaaatggaaaggccaactagacatcatgttcaacaacgctggaatctctggccccgccggagggagcataacaagtctagatatggacaaagttcagtgccttctttcagtgaacgttctaggcatgttacatgggactaagtacgcagctagagccatgatcaaggctaaaaacaggggaagcattatatgcacatcgagctctgcagccattatgggaggtttgggatcccatggctatacattatcaaaggaagccattattgggttcgttagaagctcagcttgtgagcttggaatccatgggattcgagttaactccatttctccacatggggttcccacagatatgcttgttagtgcttatagaaagtttcttgggaaagttgatatgaaggctgaggatgtgaggaaaatcgttggtgaaaggggaactttgctgagaggaagaggaggagctgttgaggatgtggctatggctgctctgttcttggctagtgatgaagctggcttcattacagctcataatcttgttgttgatggaggttatacttcagccaatagtgccttgagctttatttatcagtgatttacacaagagagtggaatctttatgtttctttaaagtattactatgttctggaattctcttctttaagacatggctaatcataagctaatttcataagcttatattttatcttataaatattgttcaaataatatactaagcaaacatgtattgtaccttagatgtagatgttagacatttatatgtataaactaaaacatatgtatgtgtatataaaatgcggaataaataaatatatacactatatgaatataggatcgaaatacctccaaccattgaatctttgagctttagtcccacataagcttgatctgcaaaagaaaccgattgatgtgggtaatcgggcttcctcgctctctcaactctctttagatggaattttctgttatgaacagaatgagtga

SEQ ID NO: 378642 - DNA, 2578 bp, Cannabis indica
atatatatatatatatgagtatacggacctgaggagtggtaacagggctatgtccacaacccctgctattgaaaacaaccacacgccatccctttcttttggctctaagtatcatatgtctcacataagaatcatcactaccaccagtcaaaccaggctgcaattactcaatatacacaactgattaagcatcaaattaccacagcttagcttagttaattacacctaatcagactactataatgtacaaaacctcaattcgaattacattttctcataaatcaaattaccagaagaataagaagaggagaatcaggagacaagctacgatcatcaccagaaacccaatcgagagctacagaaccatcatccttagtacggagacactcgcgacggagtctaacgtcgggaacagatcggaagaaggcggcgaagatggtttccacgtggcgattccatccgacgactggaaaagcggtgtaaggtcgtagcagagtctttaacgctgggagaaaggaaccacgagctccgtcgacgatttccagagagggatggggttgaggaggagggagaagcgggtcgcggtggtccggcattgctccggcggaggaaagacgtgagcttttgtggaaaagggttgagcttgattgagaaaatgggaatgggttggtgggtgtggagcctatgaaggctctcgccattgattttggttccttatcgaatctttctccaatctttctcataatacataaaatatatttgtttaatgattttttcttaatcaaattatacttattttaggtaaaattagtaactaaactatttatttattaaagtaatttatggcctaattaaataggtttaactctagtttttaaataaatattaagtttattttttagtagtaagttatatttttggaatttaaactaattttttttaaagtaaaaatttaataatttggatcaattgtcatgtgataatttacttaacacttaacagttagatacttaaaaatgtaatgatctataccattcaaaaattaccacgtgacaatttacttaatacttaacagtcagatagttactcataatacataaatatatttgatttattttaatggattaataataattttttttctcaatcaaattataattattttagtaagataaaaatatagagtattgttattcatccccactttcccgaccaacttgatcaacatggttggtatggactggtcaataggattgcaaaatttttgatgtagactcaggatcgactctaagctaaggcgagctaagcacgcgcctaaggcctgctcttattagagatccaaataaaaaaaaacttttaataaatatacattttttttaataagttttaaaaatatcatttatttatttttttataaaaagggcctaaaaaatcatttttccttgggctcaaattcagtcagggatgaccctatgtagacatgtcgaccaattaacctgcaccgtcacgtggatcatgctggtcaaaagagtcgggatataagactttattggaaagagaaatactaaaggacatcaatagtgtctaacactcttagcgcatctccattagttaaattttaaagaatgcttgttgaggtggacaactaattggcaaaatataaaggtgctactgctatactgttggagagacataaatgtcattctaagaatttatattgatatcatacaatgatattgatgctattttttttaataaaaaattaaggtaaataaagttatctgttttttatggaagtgtctttaagaagttcgtagtgttttaactaatggttcgattttgttggtggcagatggtagctcaatcaatctatggaaataatcttggattccttggatggagtttacagattttaaaaacatgatggacagtctcagaaccaatagattcaccgctaaaattgttgcagacttatcaattggttattcttggaatagagaagtagttcttcaaatttttggagaaaatttgggtaaccgtattctaggtatcttgaggctaccatgtcctcataaagatcagattgtgtggaagaacaaacaagattggagattctcgattaagagtgcatattgtgttgatcaaagcttgaggttttaaacctaaaaatgatgtttggaaatggttgtggcattctgacattcatcctagaataaccattttagtttggagatttttaaatgaagctattccaattaagaataaacttcattttataccagaaaaagagtgctcattgtgtggttctggtgttgaaagtagcttgcatctctttagagattgtagttttgctaaaagcttgtggttcacgagtatctttccagtaaagatagataacattcttgggacaacatgatacaattcttgaagattcttgctgcaattttttttagatctcagcagaaaggaagttctgacttatgctggttgtatgcagtgacggacacagaatttttactttgtgggggcttatttatcattaaaaaaatatttatacttatattataattactcttac

SEQ ID NO: 378643 - DNA, 7579 bp, Cannabis indica
ggggggggggggggggttgtactgaataactaggtacgagaggttaaaattggaattgaattactccacatttatatccgagtgtctttcatttttctttattttgtttgaattttatcttttttctgggaagtgcattttctaatacaaggaactgtgctttgcatgtcagatttactggcaaacttccttttgtaactatttatgggtgctcccaagcaaaaatggacccaagaagaagaagcagctcttaaagctggagttgtgaagcatggggcgggaaaatggcgcacaatacttaaggatccagaatttagtggtgtcttgtatctccgctcaaacgtagatctcaaggttttgtttttcttatgctgttagcattggagacatttttaatgcttaccaaaattacaatttcatgcttcttaatttgcttccatcaatagcttcctttaacaaaagtcttatatattggtactagaatcttattttaaaccacattgtagggtcttgtaaatacttaattttatattatgtgtatcaccactcatgagcaggataaatggagaaatatgagtgtcatgtctaatggatggggttctagggataaggctagggtagctcttagaaggatccaacatgttcctaagcaagatgaaagcacttttggtagcggtggtgttcaaagtgatgaagaatctgcagaacttatgcctcccgccgcatctagtgatacacagcagatgcagcagagttccggcccaaaaagaactattgtaaggttagacacatttattgagtttggcatttccccatttttatcagacttaggaattctgccctttatggcatgctttcataatctatacactgtatgaggttttcaacaaagtaacattgggtattagttattgctcttgtaacggtttcttctgaccttaagttcattgtggtcgataattattgcgtgtatttgtgcttcttttttcttttaaaatatatggaaagttaattatgaatgttgggtaaattacattatggactgtgcatttattttatccacaaaaaatcttttagtattacaatttagatggggaaaatttgcagtataagttgttaattagtctgaaaggttgctattaggtcagtaagtagtttttttggtagcaaatatcagtaagttgtatgaaatgctgaacttaagtcattaagtagtttttttggtagtataagtcacagtttacagtaattttgtgcagtaaaagtcaataagtaggctgttaggtacggagggtggctgttactgattagtgactgagttaagtaccaatctaacagacaacatggtgaattttgttccactaatttggtgtaaaatgtggcttttactgctaaaaaactatttagtgatttaagtacaatattttagaatacttagtacttactacttacagacttttgccgcccaaaagagtactcggtgatttgcaacctgtcaaactaatttctgactttcgttgcaaatatcccatttagatattacatataaaaagggaaatgcttatatatatttcaccatttcacgcactaaataacttaacctaacaattataaaatttgaaagttggcaaaataaggtaagattttgccttttaaatagccgtaaatgatataaatgatcacagcttactttgtttctctcatattattatttaattttttttttaatttgtttgcctggtttttttagttgaaatacatggttaattacacaacccatgaataaaatcaagctactggtaacttttacagcagcttattttacatcccgttctccaagttttatgttggtattcatgcttgtaggttggacaatcttatcatggaggctgtggctagcttgatggagcctgggggctctaataagacagctattgctaattatattgaggtaactgttgttataatgcaaatcaaatcgataaataatttagtgaaagcttttagtatttttatagttatctttttttctccatgagatattcaagtacatgattgtttggttttaaaattgctggtttagccaaccaaatcacaggcatatgaacttgataagtctgttggatgaccattacacctttcaatggagatgtaaatgtttagttaaataatttatattttgagctgtcctatttcaacatttgtagtcaacgaattgattattttggagttagtcttgaatcagatcatctattaacattggagtgtgttgctaatatcttgagtttctgttctgtaggaccaataccgagctcctccagattttaaaaggctattgtcagcaaaattaaagtttttgacatcaagtggtaaactcattaaggtatgataaatgacttctcatttttggtcatgattgtcttgaaatgattgggcactgagacttgcatcaaatatagattcacaaaattatacctgattcttttctataaaatatagattgaatgatcttattcattctcatgtaataaatttaggagaacaggatcatatacaagaaagcactaagatgtaaaccctagatcaaacactcaaacaatcaagcacccaccgcttgagcatttgtgtgttcttccaatgcttattactccatgctagttgcataacaatgttttacattagctgcttataaaatgtatggtttaattttaaagcgacatttcatttgtgaattttgtgtaatctttctttgatacttgttacttgatttgagttttcatggactcatttttccttcgacggctgcttgaaattagagggccttggctgcccaatagtgattacagtctagattatttgcatgtggctgaaacttgcatgtggacacaatcatgagtgtaatgtggtgtattgttgtatcgcattgtgcctgggttttttcgttcaagggtcaaaagtctgtttagcagaattgttccatttatttgatgtggggcactccaaacatagttcatataatttcgagttgacaaagtagtatttagagctgttttagccagcacatgtatgtcaagagaacataaagcaatgggtaatctgatactatgtattaatctgatttaaattgatatttccaaaatcaactcccgtatgttggatagccaactcttgttcctgtttttcttctagcacttattttcatctcggctttccagggataattaatgaattgagccacctgtgacaagttacagtttcttttaacaatcattggccacatttgattatgaactagtgttcgctcattgttattatctcgggctggtttaagtaggttgctattgctagttgaggacttggcgtgggagtgcgggaggggggcaatgctattttctttccttctctgtatttccttacagagaggtccataaatgaggggagggaaagaagggatacactacaaatttcagttgaaaggttatttaagatattaaaatctgaatccgggaagtattctccattctccgttgtgtttttcccttttttcgtttgcttgggcagtcccatcctgaatattgtacttgataataaggaaatgctctaacttgccttttgagtcaattaaggaagatctgaactgtacactacctttctagtaatattattattttctctatctttcctttttttttcatttcataattcttctttatatattgtcctgcggtttctagggttaggtttagggattaatttaaaatagatctcgcaactgttacttgaattttcggtgcaaggatgaagagatctgagttggtaatgatctttttctcgcattcttctttctctcctctcatagattgcttccgttttctttccttcatgaatttggtatttaatacgggggattacgatatggaagctgtgctcaggatttgctttttgcgatccgttatcatcatcatttatatatctaagatatatattatataatgcatatgttagtctttcttcaacgtttacttgatatgggttttgttgagagccaagtactcttaaaatgtagcggcccatgttagcatttttcgtagttccagattttcatattttgatttacatccacatctaaataatactctttcatggttaccaatgcttgtaataatggatttttgttgttacactccctttcttgcttagacttacattgtgtaataacatattattatattattagatgtatgtcttattgttttaatttttgttaccacggttttctttcgccataagtgaagctccttaataaattgggagaggtcagtccatgactgacttttgtctcaaaaataaataaataataataatggttttttatccacttggtgaatgcccacttttatgcatcaatttctgcaatcaaacaataagttttggatatgattgtttgaactgtttcttgaataaaataatctcaaatttgaagtattgctgcttaaaaaactttgcaaactgtgttatgtttaagtcaagaagaggtctatagatctttgccttttcatttatattttcatgagatgggattacaattacatcgatatgtattttgtgtgtgcacacatatgctatttgtatagttataacactcaacaatttttgttttacttttattaattcattattcttcatttactacaattagtaattcaattatcagctgagttctgatcagcaaatgactatgaaagctaattagaattcgtgtgggacagtgggaggaagggagaatgagcacaattctcacttccactttaatttttattttttgaactgataactttatgttctctggaataacgcatgggaattatccagtcccgtgtttgggtctatttgattcttttggaggcttggacaaaattgtacattcctccaaaatagtcctcttttgtactaaatggggagtcatacctttcataactttgatcattcatcttttatcgtgcggtgaataaactgactagaaatgtcaaccagttgattagatatatatacacatgtataaatttataaaatgtgtttttgaataaaaatgtgttgcatggcatagcctatgtattggcctacaggggaatggaatccatgaccataattattatttttattcttccccatgtatgagaaaacatcagatgaataccgttacttgtggtagtcatttaatgttaaagtggagtactattttcagttggggaaatgaaaaatccaattgtttaatgttcatttatttgtcctttttagattataataataatgactagaagatatgggtgttggtggacttttacttatgtaacagatcctttcctgtatgaatattttctgaacatggatatacagacattaagatacatccacatatacatgcacattaatggtgtttttcatttttgctactgtgatttatgtgtggcaacgtgtacagggcaattattttttgtcttactttcctgatctggtggtttttaattgacttagaatgtgatcttatattggtgcttctattttctatttacgcaggtcaaacgcaagtataggatggcacctactccatcattattcgaaaggaggacttcctcagcaatgccaatggaaggtcgccacagggatttttcaaactttagtaatgatgacatttccatacttacaaaagagcaggttgacttagagttagcccagatgaaaaaaatgactgcaaaagaggctgctgcagcagctgctcgagctgttgcagaggcagaaattgctatcgcagaagctgaagaggcaacaagggaggcagaggaggccgaagctgatgcagaaacagcacaagcctatgcagatgcagcaatgaaaactctgaaggcgagaaatgcccagaagatggtaaaatttctgtaccagtactagtacaatttcaaaagatggcatccattccatctgtttgttcttgcaaagcatattacatgctcatgttttgttgaccatatgtatatatgtatacatcaagggtagtctttttcatattcattctccataattttctggtaaagtggaacacggagactttttccaaaaaatcggttaattttatttgaaggatgtgtagttaagaattttttttttctagggtcatacatgtggttagggtagatgctggaaatttatattccagggtcatttatctggttaggataggtaccctccactgtttattatctattataaccctgattttgtctggtactatttccgataatccatagtgttaactttatcggctttgtataatatgcagatgatgcgaatttgattaacattcacagaatggttaacagcgagcaattcgatctaatcttgggattgacttccagagacgacagtagtgtagtttgaagtttttttcactcagcttcctttaattgcaagttaaaggttagggccttctggcgttgtgtatgctaaataatctatctcattctgttggtatggtagcattcaattcttattggtagacagtagtaatagtatctttcccgaacgctctgagatagaattttgttaatttgggaagttacacatttgcttgtatagctttaagatgtacaatctacagtttcaataggaagtcatttattgaatttatttttgcagcctcagggttgggtctttgatcttgaaattgatacttagttgataggattgtgatggaacctaataatgcttgtcttgttgtttatgtccttttgcttttgcttttgatttgattttgagattaaactgatttttctgtgcaatttagcaaaactcatttctttaattcctctttggtccaagttttctactaacccttactcaccctttttgatttttctctattttatatatttggtttgggtaagtgtagagattgtttagcaactttgggtaggtgaaacctgttagaattgcagatgagaaagaagatatacatttttctatcttattttgtgttatgctacccaatccagtttctaaaagatagaaagggaaatgtttatgagtaattattattgctcagttggaatggttattgtttggttcagcaattaaacaatggatcataatttcaatggaataacaattccctcttatttattgaaaatctttttccaatgacttttctgccactaaagccgatgcagctagctcagtggtgagttagggagtgggatatagtgcactgtgctttgctcaatgattaatctatcagaaaaagtgggtgttttgctcaaactatttgaataagagttgggggctgcctccatgcgtatctcaatccactccctcctttgttgtactgttttaagtgggtcacttcactataataataaataggggagttttcaatattatacttaaaatttattttatttataaaaatacctttaagaaaattatttgcacaaataccgctgtgccacgtcagcatatataccgaaatttaaaataattaccgaaaatagaaaaaactgaaaaaatctcatttccagattttttt

SEQ ID NO: 378644 - DNA, 1542 bp, Cannabis indica
ataaaatattaagtaatgtgtgtattaagaaaataaatagtaaagttataatcttactagattaaatatcaaaagctacgcttattttaagaaatgggcaaattagaagtaatttattaattacggagattttattagactgtgtgagtaatttaaatgcatatgtgaaataaaatacttttagatccattaatattggaaactcgattgattaaccagaaatatcacggtagtattagaatgtgcgattgtggtatcacgaaattttgttggtgatataattaatggggttatacatggtatttggttatgaccattttatccctagcgttgaaggttactttaaggtgaaataaggggtattttagtcttttgcttaaagctttatattagtaatatttttagttaagtggattttctagaaacaaatttattgctgaatattaagttgaattaagtttgaattgaggaaaaacactaaacaaagaaaagtctctctctctttttctctttctttctctcggttcacctaaaaacaataggagccaaagatttctttcattcttcttgctgaattaaaggcttagaaggatagtttgaagctatataagctggaggtaagttgttttagatttttcctttgagtttttaatggttttaaataatttaaaaaggaattttgaaggtttaggttctgtgcttaattgtttagtttagaatcaatttaaagtccatgtttagctttgttttgaggttttcttgtggttgtggggctgttgttttggttttggagagtaagtttggatcttttgagctcaaagcttgctctcccatgttgaattttaatcttttgtgtatttgtagtttctggaaggcagaatatgtttagagctcatgttaacttttttggagtggtgatttgagtttggaataggtagggtaagtgagtttttgtttttttggtgcaaactagttaaacggttcgggattcggttacccgaatggtcaggtatgcacctaaaaatctgattaatcgttttgaatccagttacctagataagggcagttttgggtgcctcagtttttttgttttctagatatttagagtatttctgcgctatttatcgatagagaaacttccagtttggagttttagtcctagtttagattaaaatgagttatttaccgatttaccgctgttgtgacataagactcggatcgtcgagcgatttccattcaggttgaccagcatgctagaatttagacttgaggtaagaaaagtacaattatatcatatatcatgtcaatatatgattcggtaattactattataaaaaagagttattactctattttgaaaccattgttagatttatatatatggctgaacatcgggcgaatttaccgggtttttggttcacgggtttcaggttcaaaataatgaaaccgaacccggacctgaatagggcacgggttggcgggttttgattggccgggttgaccgagttggcgggttgactcggtcaactctttaaaaaaaat

SEQ ID NO: 378645 - DNA, 2232 bp, Cannabis indica
aaaaaaccccaattatgttaatgttatttatttatatattgaagggactatggggaggcatgatatgtggaactgctctacaaaccttgttgctcttgattgtactatataaaaccaactggaacaaagaggtaagtcttcttatcactagtaaatacatgatgattaattaataccctcaaaatggtcatcactaagatatttgggaatttaaatagatgtatcttgagttcatgatcttattaatgtgttacaagaaaaactcagttatgaaaacttaattttggcaggtggaacaaacgacggaacgcatgaggctgtgggctggtcaagacgttattgagaagccagctgatcaacatatatgatctcattttcattttcttttttcttttatatataagaaattagtgaaggattttccattgttatggttcaaaacagtagtagatttttgggtgacactaaccagcaatgcttctcattttactcatgttaagcggatctgttttgtagttctctttcaatctctaaatatatataagaaagtgctactgttaattttttataacaatctcttagttaacttttgtgtccaagaacatacgctgaaatatttgtttttttatttttttatgacagtgtttgttatatttataaaataaaatgaatctgaattttttttttgaatgatgaaacttttttttttaaatatgctgaaatattaataatgtaaattatttaaaatttttaaaaaatttacaagaatgataatgtaaataaaaaaataacgatatagaaagagtttgaaaaaaaatattcaaacatgtgatttgaatgtaaaaattgattgaaagattataataagatcttgtaattaaaaaaaaacaatcaagtaaactattacagtaaaatgtatttaatgtaacaataagaaacaaatattgataaacccctcttctatagtcaatgtaattaaatattcctactaaaactaattttgtaacgaaagaatttaaaattaaaattaaattaagggtaaatactattttagattttttttaaaagttattaattgaaccttctcttttgttaaatgacaatgaaccttgtattttcaaaaatagtataaataggaccatgaactgattttttgtcaaaataaaatttaataataatccgatctaaatgtgttatgacaaaactatttatattttctgtatttgttcttgttaagaattgtcttcaagttggttatattaaaaaaaaaaaagttgtcgaaaattaagctcagagtcctatttttatcattttggaagatatagggtttattttgttatttaacaaaacagaggatccaatctataacttttgcaaaacacaggattcaaaatagtatttacttataaattaaatatatgtataatgaaaactaagtgtaggtgacgttgattaagtaatgagtttttatattaaaaaaattgtgccataaatacttaaattgttgagttttttacaaataaatacccaaattttagaaatatgggctatattttttttaataaatcatgctattttattaatagtaatctgttatcataaattttgtccacctgacgtggctcctccacatggcaaaaagtagaaaacacgttgagaacaggtcagcactaacctgctaggattagtcacaagcagcctctcaacctttgagattctatgttgcatggtacacacaagccaaatgagatctatgaacctgctagtaaggtcctggtcggacctatagttggtcggccaagagtgtcagctttcaagcaccgggcagccttcaacaaggttgactggccaaaggtgcaagcacacaccaatacttgtgttcttctcacaagccttccaactcgccttcagcattccgacaattgcggatcaattcgaactgcccacaaagataggactctccatcaacaaataacaaacctattctttggggatcattgtttatttgctttctattttaaatatgtgttgtaacttttctattttctaggaacatctctatgtgcagcatgtaagccctactactatataaaggcaagatacacatgctcagactcacattctaagtctcactcacgctcataagcactataggaataagtcatctctcttttcctatacttctcacctacaaaacacattgtaatactgaagagagcctagctagaaatt

SEQ ID NO: 378646 - DNA, 1205 bp, Cannabis indica
aatgctaatatcataaatgttccttaccatttctcaatgcatgtgtgatagtgtgagtgttataaatatattcttcaaacaccgtaatcagtaacatcttctttaaaagaagagcactgttaccatgagcgtcagtatttaacacctctaaatatatcattttgtgattagttaataatattctttaaaaattattacattaaaatatataaaacctaatacttaatttaactaataagaatattaacattataaaatataactagacactagtgtcttctaacatttctcaaaaaaaaaaaaaaaacattttccgtaatcaccacaagataaaaagtgtggggtgtgttccacgagggtattaataatgccggcagacttgacctaattaagggttaattggttgcttgaataattaaaatagttttagtgaataaattgattattcttttcatatttatagtcaaagtatatctgactatttaaatttgcactacatttacatacacaagagccaaatcctaggccatggttgaatccaaaggagatttacacataagtacaatacctacaaattaatagaaagaatatatttaccattcatataattgtttctttgaaaaaaaaaaattgtttttttaaacgtatagattcgagtgacaccgattatagtattcaatttatagaattatgatgtagtagggtaaattgcatattatataacgcatcacacgcacaccgatttaatatgataataataataatattaataatatagtatgatgtgtgggttcctaccactgaatattattttgcatattacatggccatgtggtcagtcatgcttatttttacctgttacacccaatttcacgtatcggttgctagggcgtgaaaagtagcagtaacgaccagctagtcaaagcaaattaagtgatttaaacagtgaggattgaggactaaactatagtcttttgtgtatttttaacatatccaatgtagtgaaaggtaagtaaatattgacataatacgagagaataaacagtgggttttttatgttttgtgtaaagtgtgtgaattggtaagtaattggccatccaattatagtgacgcgttaagtgtcactgattaatgtgtcccaatccacttaacgtgtcatatcataatccaaattaaaaaaatactattgttattaattttttttt

SEQ ID NO: 378647 - DNA, 2533 bp, Cannabis indica
atatatatatatatatggtagtgtaagtaaaatcatctttagttgctgaatttgaatgtgaataatgtgtagctccttacaagagttagatgtagtaataatagtatatgctcattagtgtctaatttctgcctacggttaccaacttaccatttcctgacactacttaccataagtgtctaatacagtatatgaaaaccaaacaagatagagttgttaaaatgcaccccaatcccatcaccacttttagttgttttttttaataaaaaatcatactttatcagataaccatctcagtcaccaaactagataacaaatcagttggaacagactccaaactgaaattacaatcggggaacaatacagaagctctagcaaacttttgaactaccatatttgctgatcgtctaacaaaataaatagaaatattttttgaaagattaagaatagttttacaatcattaaccacttgaccaaacgtggatatcataacaattgagcttcgcaagacttgaacaaccgaaagacaattggtttctaggaccacatgttgccaatgacgtgactcgatccaacttaatgttgttaaaatgtttactttatgaagttttacatatatgcaaaattcacccctttctacgttaactctaaatcagcaaagcttcaatctctcctaaaaatggtaagtttcataatttgtaaattaagaaaatcatatggggtcggcaatctatcagcacttattattttgcaataagttatatactgaaaatatattatatatttctctaaatatttgttgcgcaagaatatagtagcattgcaaagtattgtttccatattgcttactttctctctttaaatcatattgacatagtgaaattaaattataaaagatatgacactttacattaaccatactaatgcattgacttactcaaacatgtaacttggcgaattcaatagccttcttcccatcatgaggcttactgaagaaatggttgaaataatccgagtacttaacctgtttataaataggcctctctccactctccaatacttgtggcaaaggtccaattaatgcctcgggctctggattcacaaatatagggattgaaatcctactcgtgttcctgttaggcactgcccgatgctcaacgcttttgtatagatcattgctcattatctgaagcacatcgccgacgttgatcaccaatgcaccattcacaggcggcacatggatccaactgtcagttatgtcgccttcccggtgaacaaagagcccaccagagtcgtcttggaggaggacagtgatggttgatatgtccgagtggcggccaactcctgctgtgagttctgggttgggacacttgggatagtaattaaagttgagcctcattgcccccattagcatatgttcgttctctttatcaatctccttcacattcagtttgtctagtagcacttgcaatagctttttgatcacaatttcagctctcttcatgtactctattgcttcatgcctagtatttttttgagtcattaataagagaaatataagaataagttcacataaatattgcaccacagaattatacaaattatataattcattcatataaacaatcaatataattaatcaatctattgatttctattacatcaattgaatttttgatataaacaggagaaacaatttgttagaaagagatacagagaagttgtgaaatgtaaccaattgtttagattataaaatcaaatacatttatttaaacagagaacagtattattgaataccaaaacactcattttatcactctgaaattggacacgaacaaaaatccctaaacaagtaaacgaaaattgaaaatatcttccacaaaagaatctaaattggacaaacctacattccggaggccaagaggcggaagcctcatcctctgagacatagagcatcatgaaataatctttccactccaaaacctgctctgctgctctcgggctgaagctcgtcgccaatcggacactctccgatggtgaatctttcagatatttcctcttctccggcaccggtaagtcgaaaaatcgatggacggaggccttgaggccgtggagaatgtcgatcggaatgccatggtttacaatttgaaagaaaccccagttggctgcagcttcgcagatggcttctttgacttgaggatcgtccgagttggagaaatctatgatgggtatggtggaatgttgggtgttggttatggaagagtcaaatctctcgtgaagtggttggatatattgttgtggtacagcttcgatgcccaaatcggctagaccctttacgccatttccttggttcactacaaactcagtgacgttgaatgaattggacaatgcagcagatgccatctccttggctaccgaaaagaaagatgatcttttttttttttcctttcacgagaaattagattatacagtatattatatactaaaaaaaaaaaaagacataaactgattttatatgcttcttaaaaaaaat

SEQ ID NO: 378648 - DNA, 1607 bp, Cannabis indica
tcctttggataatctgggggaaaatgaagatcattaattaaattaatttgttgctttctttcaggtcgatctctcataattcattttatggaactcttcctaaggagcttgggaacctcaaggatctttttatgctgtaagaaatcaagccacactatatttaacatcttatctttatggaacggaaaagtattttttagaatgcagtttgagaatatcaaaattctcattataaggcaggcataagtagatgggttataggaacataacttatgaatctctgttatggtattctgtaatctgatatttagattttagaataatcaatctatgtttttaaactctttgcataatattttttccttaacccacttaaccatgttcatgcaaagaaataatgttaaacagactttgttgcaaactataatcactattcacaataggtctaattctactaatatcttaatatattaggtctataacttgtacatgattggttaactatactacaaatttaatcacaggaattcagtactattgtaatgtcaataataacagacctatgttaaaagatgttttacagagtaatcttttgtatggttgtgtgtagttttgagtgtggtcaagtgtggtgtcaagcatgcttgattgtggttgagaaatactatactgaaaaatagaaaaattggcttttttactaataaacgcttataaaatggcatattttgccaagaaccctaataattagattattttgtcatgacaacacttttcaatacaacatatagtatcatctatgtttatgcatacaaacttatttcagtgccaattagtcttttccaatatttgtatggttctttgaaatgtatattgcagttcaatcggttcaaataacttttctggtactcttcctccagagctaggcaatttgatcaatcttgagcaaatgtaagtttcttcacatatttaagactttacccagttcattaagaacaaataatgctattgctatggtttctatttggtctgcatgtagtttcttatcgtttattttggcattttttatccttaaattgagttttagatatggtgtttgttggagatttaatccaacactaatctcaaatccttgcacacaaacaataataaaccaaaaagtgcaacacaaatacaataacaaagcaattcacaatttgaaccaataaaagaaagtaaaatcaaagaaataatacaatgttcaaaaaaaatgcaattgagccttaaggcgttttttttttctgtaaggcgaggcgtaagcgtcaaaaactaatgtaatcaatacttttagagcacttaagaatgaataaactgtcacataaatttcacacaccataagaatatcttcgaaaaataataaccataaaatgtctcataaatttcaaacatacaaaaagatatgtctcataaaactcaaactaaaataaagataattatatttttagaattagaatcctaaattctactatcctagaacacagctgcacaaagcgagcaacaagtttttgtttttttttttccgttgtttgaagaaataagcagctgcacaactgctgtgaagaagagaggga

SEQ ID NO: 378649 - DNA, 1503 bp, Cannabis indica
tttcttttttctttttaatatgaatagagatgaaaatcatcatttttgagtatatatatagtaccttaactatatttgaggacaattaataatgggcattgttttaagaacatgaatgtatagttattaggttagtaaaatgaaaatgaataggtttgactaaagtgggttaagtatcgatgccgaccacaaccaaataacaacacggtgaataatcccatgactcgatcggtgaagatgggtccacaaaatatatgaaaattgatcaaaatggctctaatgagtctcattctaatattatggtcattgaacatgatgtgttaggtcagagagtggctccacttgatcatgaccacacaccacctctcttttcaatttgtggatgctaatatagaaatgggtccctttgcaatttttcattttatatttttttaggactttgaaaataacttcttcaatatatatattataatcatctcttttgctaatttgttatatttattttgattgttatatttttgtttgggtcatatgacaagatccaatgcacaaataatagtcacttttgcaccccaccaaaaaaacacacacacaattatttgcttctttttttttgtaggatatttggtgctagtcatatccaacagttcaccaaatgcacataatatatattctttcttgttttggtcttttagaatatgtaatttaatatatttctttttctcacttcttgaaacgtaaatggactttattgacaacaattattggaagaaaattaaattaatccttacccaaattaggaaatgaggaaatattgttatatagtgagctggaattacaaggagggtaaacgaaaaggactgaaaaaggtggagacattttaataaagaaaggctaatagattaatctatacatattgtattgtatattcatcaataataatacatttaaagattttgacgtagatatctcgaccaaaacaaaagaggaagattacacgtagatatatttttctaagaagaaaaaaaatatatattacacgtcaaaatgtcgataaattataaattattattcttctgttgtgactaaaaagtctctggttaaaagtattaattataaaaattacaatttattgtgactaaatgtgtttttataatcacaatactgattgtgattaaaactaaattagtaacaacttgtatctaaatattatgttttagtcacaagtaaatttttattgtgactaaaagtcacatttaatcacaaaaaaattataactaaaagtagctatttttttgtagtgcaatatcaactatgttcagttgttatttttctaaaaatattatcattgtaaatcgtttttttaagcatgtttaggtgcagaagttgatatttatttacaatgctactaatataaggtgcagtgacggatccaaaaattttactttgtgggggcttatttattattaaaaaatatttatacatatattataattattctta

SEQ ID NO: 378650 - DNA, 2497 bp, Cannabis indica
agggtttagttttgttaatgggctttttgaggccaatattatattgggcctgtaattcttttggaccaatcatttaaagaccaacttgcgggtcggctttattaatgggcttttgaggcccagtatccttgtaattgtccatattgggcttgctattcaataggcccaattacataaggcactacatgatcaagataacaacttttttcaatttttataaccctgaagtatttcatcgaagtcgttagaaatatcaaaaaaaatcagactaaaatatttctaagatttttttcaaaaaaaaatatcaatgggtaaaaaatcgcaactaaaattaaaatatatttatatatatactattcataaattgaggttattttctctatcgatataataatactgcatatactttttgatattctcgttctatgttttccaagatgttgagagttattcttaatttcttttcttcttcctctaaaacatacatacatggttagtttgttaattttgtttaatcatcatctttaacaatagtcatttttcacataataataataataatgttttgttttgtttttgttgatcactacagatgatatacaagaagagatcttattaagattaccacacgaatctttgataacattcaaacgtgtgtgtaaattatggtacaacatcattacgagcaaatcatttataagtaagcactttcaatatcactccaaaaccacttcacacaatactacttttgccctaatttttacagatattatgtccatgccaagattacttgagcctaaacttgtctccatatcttttgatggtgaacatttaaacatattttcaaatattacgaaaattttcacaaatgaaaaatattatactacactcccattcgcgcttcattgtaatgggatcgtttgtattccctatcttttacttgaagaaagtactaaaaacatctttttcttcaatccaacactaagacaatccaagataatcaagggactagttggcatatcaaatgaaataggatgtggatttgggtacgatcgaagaagagatgtttacaagtatatttctattacaatacctaaaaatacttttcattatacagttcatatccttactcttagtaatagtacttggaaaacgattaatgttgaggcagatgataaaaatatgtggataggaaaatattgttatggtaatagtgtgcatttaaactcaattatttattgggtcaaatctaaatgtgttgttacatttgatctgtgtgatgagaaatttgatatgataccattttcaaatgaaattatggagcataattattttccattcgcaaataaaaaactagttgtgtggaaagatgaatcggttgtgttgtttgttgggggagttacaagtgtgcagatgtgggtattggtagtaagtaattggagttggagaaagcatcttataatcgatgcgacaccgtttaatcggttaaggcccttggagttttggagtcatgaagagttgctcatgttgcccgaagacaaacctataatttcatataatattcgaaccaacaccattaggaagttgaaaattcatccatgcttgcattttttgaatttgttgtgtaaaaaatctttagtttcggtattcaataattagatgtgtttgtattttcattattatctacttaatttagttgaactaatctaatttcaataaataatgttatttcaattttattcatatgcaatacttgtggtatatcattatatattatgtagttacataattaatgggtgaatttatacttatttcattgttactctttcttaattcttaaaccttgaactattattattttttagaacatataagtaaatatttttgagaacaataaagttgtttcatgagatgagaagtatttttgttggcttgagacatttaattataatgtaaattgataagaaaaaggatactgataaagagatatttaaattagcgttttataagcagtacgatatgtttataagagcagtttcaatattaatgtttatgtgttgcttgtcggaaataaacctacttcaaatggtggcctcccaccatagtagtcttgatttattttaagtaagggacaatagtgatgattttagagttgcttagtattaaatacgacacacgacacgaaaatacaaatttcttatcacgaaaatatgatacgtaagcacaaaataaaacacgaattaaaattcataaaattatttttatttaataatttatcactatttcgtataaaagtactttatttatatattttaaaactatatatatttttgaaattaaattattttaatatatgtagtatacagtttttaacatactctttgtcaagcgaaggttctaaattacgttggcacattttataaatcagcgacaatagtttacaattttatgtgaaaatttattaatggattaccattatggtgatataatgttgatt

SEQ ID NO: 378651 - DNA, 2366 bp, Cannabis indica
atcatccgtgtttacttaataagaatgagttcacatcatatgggtggtgggaaaaccaaacccaggtaataacttactattccagtagaactcttatctccaagagcagataggagactagaaagttcaagtttggcatcagacaatgcctgaagcagcagtgcccttgactttgcagcctgctcaaccttccttttgtacacatccaagcaatcttgctctaactgaagaagcatcttgtcacgttcctcgtcattctctccaacttcatcccaaatttcctacaatacaaaatgaatttttcaagagtcatagaaatatgaattatacggaatagaagattataagtaaatatggatggtacctgaagtttctggagtaaagaaccacaagtggtctctccaacaagaggattgtgagcgtctgtcactgccatgcccgtcaaaaccacaaattaaactgcatcataggaagccattaaaaatcattcaaggatttcgtgagattaagattctccttctctaaaagtgcacaaggtacaatgtgaatatatttaccttactgatcagcaagaaggatcacttgaccaatcaagtgaaacataaaaatctgtatagaaaaagggaaaacaagaaaactttttagtcaaaatatcaaaaataaagtgaacagcaagcaagcaacaaactaaaggaagaaataaaaagcagaggagagaactatgatcaacgtcttgcagttgcaaataattaggcatcaatcaaaatcactaacatataatgaaaatatgagacacctgtaaatgtgtgtaagatgacgaaacaaatcaatcagaagcgttcttgaacttgttcaattagaagaatctttttatcaagaactgtcaacatataaatacaattttatatatttcaatttggtactgaacaccacatttaacataagtttggaaccaaaaatcatcctaagcttttaaacaaaaaaataaaactaaaccttgtttaatgcgttagaaaaagggaaatgagttctacatcttaaacacccaaataacaatggataaaacaaaaggtaactcttattcactaacattttctaattaaccaatcaaagtgtcaaacactgactatttctagcagaacccagaaacaccaatcaccacacattgcaacatttttctcaaataaataattagacagaacttgagtaggtcattcaactaaaccctttcgtcgaatcaaattcaccgcaaaatcagacactgctagagcaagatctcgagcttaacaactctcataaaccccaacagacaacaaattcacataaatttcacttcacatcacagtcaaacaaaaacttccacttccgcccaaaaagagctccatccacaaaaacccactaaccccatttgggaagaaacgaagagaacaagctcaaaaacctcagatcagatccctcccctattcttgatcaaaccaaaaccagtagaaatgaaaaaacaaaattggtagcgccaaggaacgcaatgcttacccagatcgtcctcggagttaaggataccttcttggtctgtgtgggtttcagatctacgcaagctttaagctcactgagtgttccaatgtagtgagagaaagtggtaaagaagagagagagagagttgtagaagctaacaagagaacacagaaagaaagagaaagtgatgcacacaaacacaagttcaacaacagagtatgagtatccacaggcggagactgaggtgggtcccactatatacgaccaccccattaagctaagctatgtccgaaaacgtattgattttccttgattctcacccatgttttttactattatttacgaatatgacactatcgtgtgattgagttctgaatttacctttctatccctctcatcggctgataatcacttcttcactattgacccatcatcaaccaacaatcataataagtgtggaaagttttgtaggcctactgttaccagttcgggcccaggtaagaaagttttatcattattaccataatctggaaatttacgaccaacttagtctaatgtgcttgcagttacaattattaccccctgcttaatctaattgattgaagtgttatttgcggcaaaaccttctaaagtgaacaggtttttgcaactaacccctaatctaaaattttggtggtaaaactacctaaaccactagtccgttagcagttagccctttccatctatttttggctgttaagtgccaggttggaatatccacgtgtacacagtgtacacgtggcacaattttattgatccacgtaattataatttaaaataaaaataaaaaaattaattatttaaaattaaaataa

SEQ ID NO: 378652 - DNA, 7795 bp, Cannabis indica
tttttttttgctctacttgttgcgcaggtatcctgggttcaatatgctcaaattgcgtgccagaggtggaatgccagtagcatttgctgattttggggtacttgatgatcgacactgtagaaagaggggaatcgtagttttctatattgttatatgcaatttttaacctctttttctggcagggaattgaacaagctaacaaggctatggaggaacttcatggcagctcattaccgtcatcagaccgtggcggcatgcacatagagtaaacttcctcttctcacatctgctgtttatttttatttgttttgtctatttgaaatggccgtcattttaataattatctattcaccttttctcgttggctgtccagatatgcaaggtctaaaatgagaaagaagtagaagaaagccgactgattaacctgttctgtaaatctacttataattagagccgaattgctaaagacacttgttatctggaaagctctctcttaagttaacaatggtcattcagatttatttatgcacataaatatttttatttctttttcctttttctgttcggggaattagaagagtagaatgcctttctgcaagtaaaaaattacttgagtttattcggttataaaggatcagatcattttggattactgtaaagattaattgaaacaagttcaaacgacattgcattacacaatacacaggaaaacacttctcttagcgagatatattcaagatgtccactgtaaaaaagtaaattttccttcatttttcaaagaattacaaaaacttcacattttctacttctactatacagaagcaaaaatctagatagcaagcagttgacaaaaatatgaaaagggagaaaaactacatgtggtaaatacatatttaagcagagaatcatgaataggatggaactttacaaatcttcacaggaagcccttgccttgaccctctcccaaaacgctggccttaaattctcgagagatagcttcccactaaactcttccaatggctcggctgctagggggccactatattgttggtgctgctgatctgaccaacacatgcgaccactctggtttccaacgtcgtacccttgagttgatattaaatttgagcttgaatccatgaccatgtcaccctcaagtacacgtaatacctacaagaaacagttcaaacaaaatatacaaagttccaaaccaatttagactcagaaatttgaaaggtaaaatgatgttaaatgccctgatgaacgaagtattgaggttcttttcacctgtgacatgcgaggccttgattggggatcccggcgtatgcataaagaagcagcatgcaacatgcaataaacttcctgttcagaaaactgatttcctagccttggatcaatcagttcatcaatggcatagtcctctaataatggtcgtgcctgttacagaaattgtacttgttataaatttattgtgtacttgttataaatttattgtttacagtggcatgccagttattatgtcaatccacataatttgaatgcaaagaataatagagagaaggatatcaataaatttccctccatcactttacccattcagtgagacattgctgacccttgggtcgattgaggtccacagctttccggcctgtaacaagctccaccaataccaccccaaaagaataaacatcagctttttctgtgatttgaccactttgagcatattctggagccaaatatctacatcacaggaacatatgttaaaaataattgcaaaggttaaaaaacttagctgtaaagccttattcaagaaaattacccaaatgtcccaattactctagtttccacaccagtatctccatcaggctgccaccttgccaggccaaaatccccaaccttacaagagaagcaaaacaaacattctgagagtagggtgggtaacaaactaacatttatcgtgaaactcaaaacacgtcgcacaatctataagaggaaataaattgaagagtgcaacacttctgattccaattacataaaggaggctaagacatcagtataccagtggttcaaaatcatgggtgatcaggatgttgtttggtctcatgtcgcggtggacaatgcaacctactctgcattcttcatggagatatcgcagccctcgagcagctcctacagcaactttctgtcgcgcagaccattgtaatggctgccgatgttgtcctgaaacacaaagttatttgtgaatccaagaaagattttagcatacaattcatgtgttgatcactacaaaaatacaagcaaatacatgatctttgaaacagtaatagtgataggaaagaacaaaatccaactcttctattgtcataggaaataacattaccgtatagatgggagtccaatgatccgttgcatatatattcataaaccaacaatcttcttttgtcctcgatacagaagccaatcagcatgacaacattgcgatgctgggcacaactgaggacttcgacttctgagcaaaattcatgatcaccctgagaactagctaacttgtgctgcttgacagcaacagcctggccatcaggaagcacccctcggtgaacagagccataacctccttctgccaagaaattggcttgtgaaaacccaaccagtagcaagctccagctcagcatagctaaagaatcttggtggttttccaaacacaggtgccttatgttgacatatggaacataagggggggaggaccaggtggtgcatttctggaaagtgaaactgcttctcttacatttccactgaagtctccacttcctctgtagcttggcattccaactccagcgtctctatcaggtttcttgaacttgcctagcaaagctttggttgatgatgcttgaggcctatcacttgatttgtgagaactttcttccacgtgatgtgaggattggctatgtgatattagaaaatctgatatccacggttggaacctcaaactagttgaagacgttgataaactttcactgtcagaatctgaagcatcatctatatgttgatttcccttggctctaaatgattcctccttcttcagaaccccatttatttctgaaatgaaaagtggtgaagttcctggatctgaatttgacactgacgaagttccagcttcagttgctgtaaatggagtacctagctctggactactggttggagtcccaacaggcactcggacagggtttaaacaagcatccttctttcggggatgcttttcaggcacttcatcaagctcagaaggcaactggcaggcgggttcaggttcctttggtaacccatttaaattcaagcgaagaacttttggttgtgcacgcttcataacgacaatgttgcactgcagctcatccatgcagcgtttttcctcttgtttaagatgtctataaaaattaaactggtaagaggagataatggaaccatgattctacatccagaacataaattaaaattcagacaccaagaaaagagcaaaaagtagacccaagcttgattcttgagagtgacaaaaaagacagaacattacttgtccaacacaacccaactagcttgagcgttcttggcttcaactgcaaccgatccacaaggtgatccatatacaatctttatcttgacatttacctgtaaaagtaacatatatcaagtcaaaacattatccaaacccaaaaatcatattccatgagaaaatacaagagaggcttactttatttggatcataaacatcgtgaagctggagaatcatctgagagcacgaatctctaatgtcattcttttgctcagagattgttcccagaagagacttccgattaccattagcacagtcccctgcaaatcttggaaagccccattttttacctgaagcactgaaaaaattagctcacttccaatatatacagtagtatatccaagagggactccatcagaccatgtggaaaaaaaccacaagcctgactgtttgagctaccctcttggacaacattaacaatagtaatgacaaaacagcagaaaataaacaagtaaaaactaagtcacttcttagtgaagatgaaagatagactagctgtgatagaattaaatcaaccgttgagtacagcaataaataaacagatgaaccactttgaaagctgattggcaaggtgaaggacaaagtcagccgttgaattgaatttttcacattgatatattttaatgaagcaaaccgaatcatttgtagacaatgggcttgaagagaaaaattaccagaattttgtgaaggaacaaccacaagcaaagtaatacaatccccaggttgaacaacatgcgtcaaagcccatacaagagcagtcttgggaatttctttggatgccttgacggccaccacaactttctcagccccatcggaccctttctcttgcttaccgcgcctctggtctcgactcattagcacccactaaaatttcactcaaattccttactaacaacaatatatacagatttttctcaagctcatctcttcaaaaccctgaccagagcatgacccaacaaagatcttgtcctcaccattgattcccggacaagtattacagacacactcgatgacactgacaactagagccccaaatgacaagacgttccttggtttcctccttcagcagtaaaaaccatccttttatttttttttcacttctctgtttagtcctctatctaccaagcgaaatattacatgaatattgcgaaaccagaaaacgccgatcttagagatctttgctgcttcttatacttgaggccaggaaagcaagccactgattctctgcctgaatgtgtagatgacgttacagattcagaccctcatgaagtaaacagaaacagattgaccactgttgaaaaagaaagaaaatgtagaacactaaacgacacaagttaaatagaacccagattcttcgtacaacgatggattaccttccaagtctttaaaatcaccgagtcaaaatggtgaaacaaatagttcagaaggtaaattatcaaaattcgattccaactatataggcttcatccacatataatttcgctcagacaacagattccttgacaagatctctttcagaaactatcaaatcatcaaggttgagtattttgctttttatagtgcatacaatgaaggaaaatcgaaccaggctcagctcaaaccccaaacagttatagagatttaacctgtaaaattttggagaaaagatttgataagcacaagaggtcaaaacagaagaaaaaataaattaaaaataaataatcccatgtgcccaacataaaatagaaaagaaggattacagatatcatacaatataaacatatttgtttccataattttctggattttcatttattttttctcagcaaccaaacaaaactaaaacaaaaggatatattaaataaaatattacatttatcatcaacagccaaaaccaatggcatcttcaaccaaattcctcaaaacacaaagaatctttataccaacaaccacacccaaaaaataaagagaaaacaaaaagagaaacagaaatcagaaacccaggaacaccccgtacaaagctggactcagaaagagcatttcacagctactacaccatgacccaccacgtgaaaatcattaaaacccacaaatcttctcaagcagtggtcaataaaaaaaaccaaaatgtacatacatacgggagatggggtatatcatcaaatatcaaagagtcattaaatcactttatccttgaaataaaaacccagaaccaaaaatccttaccaatagcattaactaataaaaccctctgtttaagtcttcttccttctttcacatcaaagagtaaacaaccacaataacacgaacacgccaaacgagtacccaaaaaaattgacagatataaaagataagactgaaagtgagtgagacccgccaagtcagtgaaaccaaatcttagggtttttaactctcaacaatctccacacccacaaaaattcaaagagaaatagtacgaaatcctctgttatctattttttcttttctctctctctctctgaaaattaaatatataaagcccaaaaagaaattatttttaataccgagtactgttatagaaataatacagtgaaatatttcagtgtgtcaatcagagattttggcagcgatcgccgtcgagggagctgaatgtacgaaaatacccctggtattacagcctttttacgtagtgaaagcccaatggttatgatggcttttacgatgtcgttttgatgttgaataagagaagaaaaaaaaccttgtgggcgctaaaaggttgcgtttgacctatggtggggtgtcttttagtgaaatcacttatcaatcttctttttatatatttatctatctcatgacttaaaaatcttgagtggcacaaacaactagggaaatgttagagaggatttgggttttttgaaacttggaagggacccacttttcttttcttctttaacttttcattactatattccttatttgaaaatatatttgtaggtttcatttaatctatgttcaaaactcaaattaaagtaaattaaagggacacctagcaaaaaaggaagatagaaaattgttaaagaataaaaaacaaaaggggagctaaatttagcaaaagaggcttgatttgattacattaatgtcatttagtgtgttgaatgaatgttgggtacataaatgtgtgttataaatggaagagtttttaagggtatcctattataatataagattagataaatatactagtagtagtagtagtagtgtcctcaaaatttggtaattcaatgcaccatgcttaaatttcaggtctgaattcatgtcgccacttttgagaacaagtatttagataggacaaatagattgaatttaatttgccttaataatataactagtgcatttattattacacatacattgaggtatatattatgggttacaacttacaattacttaaaacgtgggaattcctccagctaatattgatcactaattacttcggtaaccacaatctgttttaaccttttctcttctgttcttaatttattaatttgtttaatattcaaggataaaaatctaagttgtagatctgtattgaccggtatataagactttcatgaatatattttctaaaactgggacttagatttgaattatcacatgaaatgtctttgtatgaaactcaaaagatgttgatggatctaacattttattgaatgaaatttgttactatttttactattggtcttgtgataaaagatctctgatacatccaataattttatttattttttaaatagtttaatctggtggtgaatctaacttctaacctactctaaacaaatacaaacaaaacaaaattaataaagaactgagattacacagagctcaatgcctaaatctgtacttcctgccccattgccaagtgttataatcctttagttaccccatttttataattttatttactttggaccaatgaaagttccaaatttgttaatagatcccaaaactctgcattttttgtctttcccccaatcaatcgaaccccctttctcctttccccattttccaagttcaatttttcaaaaaagcctactttattatttaactcattaagggctcgtttggaacgccgtattagatcgtattgtattgtattgtattatattgaattgtattttatacaatatttttatgtaaaactatatatggtattaacttttatggacacctaaatatata

SEQ ID NO: 378653 - DNA, 3390 bp, Cannabis indica
ttttttttttatattttaagggtcatataaatttatatcatcttagccccatattctcagagtcaaccttgaacacctcaattaatttttcttgtaataaaaatagatgaatgtaaatgttgctagatgagtcaaagattcaaaaaatacgatgttgatttgaaattttagagtccctagacccaagatttggcatagggaaaaatatcgattgttgtagcacaacaaagtttttcaccagcatatttgttaaaaaaaaaaagtttttcaccagcatatgtggcagcaacttggaaatgcttgttgtagttataatgcatttttttagcactttattatttctttatatggcatcaatcgctcaaggtcttccatggattcttcctccgatcctacgactttcaaagttactctgcctactattctcgttgaataccacctactcctccacttgttgttcttgtctctggaacccttcctcaaactctctcaattcgtcccttacaaaaaaaatctaaatcaaagcactttcatatatttgattggttgtaaatttagcaacaataacactaagaattcaatctaaaacctgcattaatctcacaacttgaacaacaataacacacacaaatcagttagtaacacaatgaaacaaaccagaattgaaacaagaagatgacgacacaatttatcctggttcaggtcttagagatcaatttgatccctcgccatactccagctgaaaaaatatcaccaaatccttcattaacatgtagaacaagagaatagcaatacaagcaccaatccaagagcaatcacagctctgcaacactcgagaaacagtcacagtttctctatttcctacccgagtacaccctctgttcttgaccccttcaacaacatggtttcacagcttagaaatctaaggaatctctctctgaattctctctctcattctaccttacaaaagtaaaaagagccgtctatatataggtataactcacactagaaaataggtgcataaccggtaccaactaactaactaacataacagaaagttagttaagttagttggtgtaggtgagttagttcataagttggtttagaggatcacttccaaaaattgatcatattagagtatgtttacaaaatgttattcaaaaattagcttaaagaggagaaatgtatgtttctctcaaatagaaaaacatatatggttcttctagtataaccatttcaaagagttatattaaattattttatagtgtattctaatattatatgagatgatttttcataaatagttagcttcatatatattacttattaaattagaattatattgaacattgtatcaatagtagtatggcatttcattttagtattagacattaatgcatttaacaattctcttaaaaattaatattaatgacatgactgatcattttttaatacaaagagagaccaaaaatgtaaattctattcatctgaaatatgaatatgttattgtagtcataatagacctttgataaattttcaagagattatgaataattaacattatccacatcaaaatttaaacagtttataacacacttctttataggcggaaaatgatttattttagaactcacatgtacataataaattaagaaacaataatggaaaatgctattggaagattaattttcaccatttttaatgtcattttgcaaaatattaactttttttcaattaatcttttgtaaaacgacctaatgtaagatgtaaccatttttagtgtcaattaagatatatcaattgtgtttggaattagtttttttttacaaggaattaattaattaagaacaaaagattaaagtgcatttttaagaaaatagctattatatttatatctatagcattgctagggttttaagattcattggttggcagactctcacaccactgaagcattcttgtgcaagaatcttataagctgcttcagtcgtgtgagctgcatcaaagaacacgtgtgaatttctgtctttgcaagtcactttactcggatcgcacgtgccgtattgtgtaagtccacaacatgtatttgttccatcttctaacctaaaataaaataaaataaatcacaaatttaaatatgttaatttgttgtaataaaataaataaaacataaaagtagtgtattaccgtagctttgaggattctgtaccaaattcaagatgtgttgataattattgccaagaatgaatgcagatgctggaagtgtacggcctaattcttgaattttcaaggcaagttttccattgaatttttggaccatagaatttaattcatccacacattttgagtttaattcatttttctggtttgtatatgagggtaaacaacccattgcttcaatgtcgaacaccacaaattttctggctcccaaattgtacaactcctacaaattcatcatgtatgtacttataagtttctattatattttcgatcaaatacttggccaaacaatggaataaaactagagctatctttaagatagaactgctggggtcgttacttaaggcccctcaacctaataggcctttcagtctctttttcttttaaagttttaacatcagtctataaggccttgaaaaaaaaaattgttataaaacgatttaaagacttattttgaatttgattttatttttcaaataaaacactcatttttataatcttgcccatgacccataaaaactaaagatggttctctaaaagcaaagaaaaaactagtgaagcaattgttttgagccaactgatttatgttccaaaaaatacaatcaagatcaccactatagttactagaagactatgtttcaatcaattattgaatacactacattataggtatttcaaccaccaaaaagaatcagaacaaacgcgccaaagcatatttggcaaaattatatttatttgatttattgtcctcaaattgctaataataatagaattaatatgttgtgaaatgtcaaaaagtaatcttgttttaaaaataaaaattagataataacattttgaactataatggtgacaccattttactttagtgactaacataggtgttattttttagtactttattatgactctagttggttgagtttctattctttatttttagctatttaggaagttttgtatacatgagaaagctattaaaattagcttatgtttagaagaaaaataaactttttagaattaatagttgtgactcaatatttatttttggagcttcataagttcaaaaacacattttaaaagtccatgatcagaacctatatatatacagtatccaagaatacacttgggaccagtaaattatattctaattgggaggttataactaaa

SEQ ID NO: 378654 - DNA, 1983 bp, Cannabis indica
ctttttgagaaattctaacatgatgaaagtttagggagcatgatttaatacatattaaaattttagagacatgatatgatttgatagatatcaaagtctgtttagcatggtttaatataaaaataatcactaaaacagtaaaattgaatctcaatagttgaggggcatgatttgacacatgtgaaagttcgggaaaaaaaatcttaattagccaaatatttatttgataatattatggcaattagatttatgggttttttttaatttttttttattttacactttaattttttttgttttgtatttttacggaatttcatacagaaatacctataatagctaatagagtaatctaaatcgcaatcaaaatccgtgtagtaatactcgtagaaactactagaaaaactatacgagcaatccaaactagtaattaaaaaaaaaaaaaagttaaaactagtatataggataattcccttagatttatttatttttgagaaaaataaaaattcttataataagcatattaaacaatagtatagataaataatgttgtatacaaaaataagaatgaaaattgtaatagtacttttaactaaaatactaataaatcgtcagcacttgaagtatcaaagaagcgcgaagaataataaaaatatggtaataataactctatattgttcaatctagaataaaaagaaataatgaaacaatcaaccattccaataacaatcgtaagaaataatcgcacataattcatggagccaataaaaatatgagaattcgccatattagaacatgaataagaatactcatgttactaatgcaaatatattttgagctaattgagatacctcccacgtcccaaaaagaaccaagactaaaatctttccatgttccaaaaagaagcaagactaaaatatcatatgataaatgaataaagccctacccatgaaattttaaaataacataacaataacaaaatagtatagcaacattattattaaaaataaaaataaacataaaataataaaaatataactaataatagtcccatgaaattttaaaaattagtcactttctaagatatattaattatgataattattttattgatggaccccacccatgctagtgtcgtgtaatcctccaccaccttccttttgtcgtaaaatccgaaaaacatgtgtatctatgagatattttctaatctttaaatgagaatggtttaaaaaatattatttatttacaatgttagatatcattaatattttttagtatttttttaaaaaaataaattttaataaatatcattaattaattgtagagtttcacttataaaaaaaatgacgagtactattaatgtccaataataatactcttaacaaaattacaattttcttaatattaattaataaatttgtcaattcaattaaaataataaatttgtaaaaatacattgcaagaaaataaaattgtgaaaataaataagtttccacataattttttttccttcttcaaaatcggtttataaaataatccttaaccaacaaaattttctcaaaaaaaaatgcttattatattattaaattaattttgtcgttaattgtttgatttttttttagaaaaataagaaagaagtggaagtaagccacgataataagcatgtgatatttttaatgattgccacgtgggtcaactcatgcatgtgcactgcttacgtgtttcactactcacttccacctcatcataattttattagtgtcaatctgcaaattaccattataccctctttaccttcctgcatttttttttttgttatttgtcctttatttggcccctcttatactaaaataattgttgtttaactctcttgttagatataatattattagtagttaggggtgttcatagtcgatttaatccaaaccgtacaattcaatccaattcaattcgtaaagtgcagatatccgcacttgtgcggat

SEQ ID NO: 378655 - DNA, 942 bp, Cannabis indica
agtgtaattttctcaaataaaaacgacattaaagaaagagaaaagaaaaaaccgatccaatatgacgagaaaattgagcgaagataattaagtacatgaaattagtggcatttaataaagtaataattaaagcatatattatttaattatcttaattaggaactagtctaagtcataatgtctatacgcataactactttctaccaattaagatatgtacataagataattgaatttattattggaccgtgattattgtatgaaagagtccctttacaaggtgttcttctattttcacacactctttttgtaatcttttaaaatattttaaatttatgtctagagagaagtaaatatgagtagacaaagttcactatataaaaatatagttcaatgagacaaataaataaaaatgtgcttatccagtcttttataataaaatggaagaaaattgtaacatcaaacttaactaacgtccagtatagtgatcaatcaacaaaaaattgtgaattatataagaattttaaacaaaatgatcatatgacagtgttagaactacatatgactatgagtaaatagtaaataatcttccaataaaaattaaaaatatatcaattctattatttaaatcataaataagagaaataactagatcatgccatgctatggtactcaacactacaaaaattaaaaatgacatcattttttaaatgacatttaatctaattacgtcggtttccgaaaccgacatatatactatagatgcaaatactaaattatttggttggttatgaatagacgcatacaattttatgcataagttcataaccaacgtatgcgtctgttcataactgttgtctgcatgtttataagcatgacacatggattttaatcaaaaaaggtcaagaaatcactgggccgcccaagaacttcattgagtat

SEQ ID NO: 378656 - DNA, 1397 bp, Cannabis indica
agcaacaacaaaccaccaacacccaacatcttcgaatttcgtaggcaccagaccattctgccttacaatttcatcccaaacttcactcttatctttcatctcttccaccaatcttagcctcgaatctccatccccatcatcatcttcaaattcctcatactcaacatcaaattgctcagccaacaccttccacatatgcttccacttgataatgtcaccattgctgcaattaaaggcctggttcttggcgttgggatccaccgccgcccatatctgatgctccgcgatcaaatcagcgtcagaggcatcccatgaagaatcccaggctgcccgagtgcccaaaaacttgagtggcttatcctcgtgcttacacatggctgcataagcgcaaagaccactaataacattcatcaaactgtacggagagaatccgaatatgagtccaggcctgtggacagaccaagtcaacccttccttcttctctacttccgccattaaaatatcttcctgagtataataaaagttgggcgtgacgagtctcggcaagtcttcatggaacggagtctcgtggggtcgaaccttgccaagaaactcaaaggagccgatgtagtgtttcagcccggtctgcaaacacacgtgttggagatttggcgcatgagggataactgcttcgaggacattctttagcattcggccattggaatcacaattctcgagctcggtgggtttgttggtccatgtgacgtagaagatgtgggtgatatcagagagtttagacagcttgtctcgcgtctggttcgggtcagtaacatcacactgaatgtagtgaattgggtggtcagcgttccaagtgggttggggccgacgagccacgccgtagaccttccagggtccgccaggggtgtcggagagaggtagaatctcggcgaggctattgcccacgatgccagttacgcccaccacaagagccacgttctggtaattattgactcttttctgtacatgaaagggaaaccacttttctattacaaaaaagtttttttagttaaaatcagctattcacaaatcaagtgtttgaaatttttataagaaaaataaatcttatgtttatatattataatattaataacaattacgattattagttagtacttacctttgcatctcttgttgctcgttcccaccaccaattcaccattgtctttttgttttacaacaaaacaaatgatctaaagggcactgaaatgaatcactaatacaaaattaacataatatatatagttaaaaattataagatttttctatgataatttaagaattgaactaactatgtactttttattagttgatgaactaactacgtattacacagttaatatatattttaattaatattt

SEQ ID NO: 378657 - DNA, 7036 bp, Cannabis indica
  modified_base (37)..(37): a, c, t, g, unknown or other
ttacttttttttagtttttttttttttttttttttanattcattgttatttacgtattatgaactttaaagtaaaaaataattttataaaaaaatattaaaacaattacgaattacaaataacagtttcaaactaaatcaattgttcttaagtgggttgatttagtttggtttgagcattaaaattgatttgattcagtttttaattttaaaaaaccaaacgaagtaacgtttggttttaaaaaaataaaaatctgaactaaaccaaattatgaatactcttactttcttttatttttattggtatcgatgattaaggaagaaagagaaagaatttataattaatttaattttgtcacatgtcaaattattatggatggtgacacactatttgggaaacatattttttttcactcatatgttagacaagcaaaatttggttcgcaaaattattgctaagtcaattagccttgtgttagtgtagctctttgcctaattgttagagtagtaattcgtgttgacgtgttatatttaggttgcatcgtattaaagttttaaatttattaaaaaattactaactcgtaacacaacaaaaattataaaatataaacataaacacgattcgaataaattttatgaacccgcaaaatttcatatgaagttcgagttgtgttcatgtcaaactcacatgatggtcacccctagctaacagtacgtaatcatggttgtttaacgaaggtgttccatttgaaaaacaaataatgctccaaaatgttataagcctgtataaataaaaaaaaaaacaaataaaactttttattttaagaaaaacatttttagccgtcggatgagaataagccaagtaaacaagggcctcgattattaataagccttagcatttttggcctcttgttaggagaaaacatttatagggtccaattactgttttgtagtttgtacagaaggacccggaaaggtcttctctttgtgtctctccctctctttctctctatttggtctttttgatacctgagagaaagccgggaacttctccgtcaacactttttctcggttttccggcaatggcctccggtaccggtcaatttgtatatacgatccttctattgctcatcggtcaaattcctagtgctttcccccaaagtattatccaaatcttgccgaaggtgaatctagtctccgataaaaatgctttgtactgcgacagttggagattctccgtcgagacgaacgatgccggatactggtcaacgataccgacgagatgccggagcttcgtgaaggattacatgatcggtgaccggtataagtccgactcggaggttgttgctggtaactctttaacgtttgctaagtctctggagatcgctggagatgggaaggacgcttgggtcttcgacattgacgagactcttctcacgaatttgccttattacgaggcacatgggtttgggtaagcctgaatcgataatccagctattaattttcgtttcaaaattaaaaatggaaatgaatttaatataataataataatagttgtcgcttttgtgatttgcggtcaagaaaggttaggcatgtgtttgaaacaccattggtggattgaatggaccattcgaagcttgacgcgatgaaatattgcataggaggaaagaaatatcttcttttttttttttctttttttttttggctgaattaacgtaagggaaattaggattgaaagccaaacaacattagtgaaattggtatttaatattttggtttacattggaatattgctaattaggaaaacaacataaaagctttggtagattcttttttatgaaaaaaggggaatatccttcaactattttagttaacgtaactgcttttctacttcaattaacctttgcttgaaatactagaacgcccatattagaattaggcttaaatttctatttggaattatgtgaaattttcaaacatttggtatatgtttggtcgttgtttgattgctagactttgatgattagtaatttgttataaggggcggctaattcaaatctttagacattaagctttgttagttatcaatatttccaacgagtttcatgattatccatcgaccattgtagacttttagattgacctgaactgaagtcatgaacaaactgacaatgataattcatactgtactataaaggattttatcttgaaatttagttgaagataaagttattccttgaccaattttttttatgttgatgtctttgtccagtagtagtattgagtaatgtatacaatgcaagttttaggtttggtttagctttcctaaagcagatttcttttcacacgatgtgttatgtttccactttatacaaatttctgatgaataaaaaactgaactttttcaagtttctttcttgaacagatcagagaccttcgacgagaaatcttttgatgaatgggtggaaatggctcaggcacctgctattccagaaagtttgagattgtacaaagaactgcaacagttggggatcaaaatatttcttctaactgggcgaagtgaatatcaaagaaatgttactgtccaaaacctttactttgcaggctacaaaaattgggagaagttgcttttaaggtacacaacactagatagttgatttttaaagggtacaatacaatatcctgcaacaaaatctaatacacatatatttacatatttggtagcttgactgattttctttgtgattataatacaggggaccttcagatcaaggcaaaccagccattgtatacaaatctgaaaagagatcagatttaataaatgaaggttacaccattcatgggagttcaggtgatcaatggagcgacttgttgggatttgcaatagcccagagatcatttaaacttccgaatccaatgtactatatcgcctgaacaaaatagatcatcaaatttgagactattgttgtaatttgattgcttgatataattctcttgacaattatgatggtggtggactggtgttcattttgtgagttgtattttttagtatattattctttaagtaacatcaaggtctcgacaaaagtaaaataaaaataatagtaagtgtttgatcaaggcgtattatgtcatatatagctttaattgaccgtgtcaaacctaggaaaaagataaaacatgcagagtctaaatcggtctttaatcaatacgacagaataaattgatgttgggtctcacatgaaggaagattctgtgcttaataatatctcagagagaaaattttatatatatatatatatatatatatatatatattcaaagcattcccgtgattctaagcagacaatcgattatgatatatccagcatgaaacatatgaacccatattaaccaacagtatcagattggtataacatgggttaatcacgtgacataaccatataaatccatttctttcaatataaagttacaattttttttattggttaatatgtaattaacagtattttatctggaaagtggaaactaacccccaaaaagaaaaaaaaaaactggcttggctttctggatatgatctatctcatctcatctgttgaagacagataccagaattttggctgtactaattcctaatccagaaaagaaataaatggggacgatctaaatcataacttctaataattaataatacaacctttcacccacccacctttttttttcttcaccttcactcatggtgatcctgtgcttgtaacattttccgaacctatagacactgccccacaaacaagaggccttgcagctggaatcctcaggcagtttaatccgccgccggggatgacagaacattccggttgaggtctttgcatatatttccccggaatgcaattcaaagagaaatcaaagcccacattcctgtagaacagcttgctacattcttggctgaacccagaaaagaagttgtaagcaacggtcaagttcatgagacttttgagtgaacagaccaggtctggaagaaccccagaaagcttgttatgtcccaagttgagaacttccatgtcttgaagacaagagatggtatctggtaaatgacccattagagtattgaagctcacatccaaaacttgaatgtctgtgaaaattcctactccttcaggaatgcaacccgtcaattgattgttcagaaacaaaatctcttttagttttgaaccactcatgaatccgaagctaaaaggaatgtctccactgaacttgttattagctaagttaatcactgaagcttgtgagtttcccaaactttgtggaagctcaccatcaaattcgttgttgtttagaaatatggcatcaagtcttccaatgaagagattttcaggaatgggacctgagaacttattgaatcggaggtctaagtagatgagatttgggatatcgagtgtgacactaggaaaagaacctgaaaactggttgttactgaggtctaactcaaggagggaagtaaggtccttgaaagtttcaggtacagagccagaaaacctgtttgtgtttaagtgaagaagagatatatcagtgagcaaagatagctcctttacaagagtcccttgaagatttgcatggttgagatctattccggctaccaccggattaggtgttgctcccatttggggttgaggatctgcacaaaacactcctttgtaagaacacacatcggttcccacccaagacttcaaaatcccagatgggtcatctgtgatcgcagatttccatgcctgtagagcagtgtaagctctctctagcttcgaagctgaagaataatcatatgggttttcgccattgatcccacttccacctccatttccaacccaaaaaccaccaccaccaccgcctccgttgccaatgccgacaccaacgccgccgtttccagagcctacgttgacaccaacaccaacgccaccgctcacaccaaatgcagcttctgtgataataattgttgtatgaaagagaagaaaagccagaaggcagctcttctccattttcaggttcagaataagcccaaggatgtttcactttctgatgagggatttacttgttaaagttgtccaaataaggttgtagcatttaatgatggaaaaatggtggggtttattattggctttgggcctttggctggtggtgacgagtgtggtgattagtgctctgttttcttcttcttttttttaatagaaaaataaaaaaacaccttttttattattattttaactgtacatttgttgacttgttgtgagtgatgtgtgtgtgatcaggtttgtgactttatgatttaatgtaatgagaaaaaaaagagaaattttatttaggaagtttgagttcagacttccaagcttgtttattgtttctttaatcttttttttgtttgttataattacacttaagaaatcacttgaatattttaacttccaacaagtcccatattcaagggggtgttcagtgaatcagtggcagcaaagcctttgaattgaacttctttgactgatagggatatttgaggatgagtattttaccaagttaaatttagaattttcaacccaaccaatgattaatatcaaatttcataatcaaacactgtacataaaagggctctcattttttttttttacttttaccacaaacccataaaaagtaaagtgaatggttacttaatgtaagtagctgttatgttgctttagaaagtgttgaaaaagagtggtgtgtggtttgtgcttggtgggttattcaattcatttccttaaatgtttcactttcttttgttctattggtgaaggctttgagctccaataataaccaatatatatacctaacaagagactgagtactttttctttcatttactattgtcttttccccctggtaattaatgtagcttaatatgtttgcaagtgccaactgtcaagttgtcctaatgatataatttcttgcaactgtcaaatttttggttttctttttctttttggttcttaatttttggttaagttaaataattgtaaaaggtgcacagatttgaggaagcagcctatacaagagacaaagtttttacttatttttccataaatgaggagtggataactacactaagcaccagctggctttggccttttataggatgaacttcaacaaaaacctgaactcactttattgccatttttcatttaaccaatggagaagaagagaacccttttttttttctttgctgtgtataaaacacattaattattgtcccaagcccaaagtgggacatcttttctcgtagagagttattaaccaagtattaacaacacgagactcaagggaaaactggatgttgattggttgggtgtttaatttgattcaataacttgaaatgtataaaagatttcaaatatggatggattattacattcattattagattatcgtctcgagactcgaattgatcttattttaaaaaatttctccaacaattgatccaattaaacgttttcacacgttacaagacaaaatttatacctctgaagacaattatttagaagggaaaatcttttgatttggaagaatgcaactaatggtgggttctctcctcgtatagcttataagtctattatcaaacttaaattgggggataaagatccaattcggagaagaattcagaagtttaaaatcttgaagaggatgaaactttttccttgaaaacttgagagggacatcctcccgttcagggaaagacttcaaaggatatttggcaacgatgttagctgttcgatttgcggtgacttagaagatttgtttgaacatctgttctgttgatgctcgctagccaaatctctctagttagctagccaatggggaatacgtgttagactataatatagtatatgtaatatagcatatacaaacgatatgaaatgcggaaaaataactgtaatcatatctataatatatgcaatgaaaggatcaatatacctccagccattgatctttgagcttcaatccctgcgatagct

SEQ ID NO: 378658 - DNA, 3406 bp, Cannabis indica
ttttgttaacaagagtagtatattatgcctaacataccttcacatcagaattgtgcacactgaatgtttgccacgggctatcgatgtttttgacatcctttgtactatgttcaacaaatggagtagttggctccacaagctccgttgggagtaaagcacgagataaagcatcatttgtttctattctcctcgcagaaaatggagttcctgaatttaatgcctttagagtatttgatagttcccgtaatcttacacttaatggtggtgatttattctgatcaaccatggaaatattattttctctcacaaagacttgacctgtaatgtaacaatgaatgaaataactcaaatcacataaattaacaaattaagaacaactctcaactaggattcacatcatataatcaaaccttctttgacaagtgtgtttgtgctgctatgttcctctggttgatcctcaccatgctcagcaacaggcttgccctgcaaaaaataacagtgttgctggattaagctactgaacataaattgaacccaaaaaataaaaatgtgacctcaccttttcttcctcttttatggtttcactactagtgctgccatgaacactcagaccatgttcttctggttgatcctcaccatgcacaacaacaggcttcacctgcaaaaagagatagcagtgttgctggattaatctattgaacttaaattaaaccgaaaaaataaaaatgtgactcaccttttcctcttttatgatttcagtacttgtaatactttccagcactaaattttcctgcattaatatatttcactaagtcaaaaaacgaactttgccacttttgttaagagctcaaataacaaaaaagcatcaaataccttgtcagaaggagtcagctgacttgcatcgtcaaaaagtttccttcaaacaaatgagtaattttttttagatatggatgtcaattgtataggaaagaaaattttaacatatatatattattttgcttgaaattgaaataaaattttgacataccttccctcaaaggatttaccgccatttgctttcttttcggaaagtggcactctgtagctaagttgtttctttgtagtagcataaacagtcttaggtatttggcttttcttcgataaagacgtcactgattttgttaagctacaaactttcttggttgattctacaagagcaccattgatcttttgacaagtgcgagaggccaacttcaccatagatatggagtcttggcaatataaggggttctacagatattttcagaacaaaaaaaaaatagtcatatgaacatattacaggctaaagtaaagaccatatatcacaagagagactcaccaaacaagcgatcatcaaaactttgtttacccctcctaaagaatcttgcagtattcgtgttagtttgctttcacgataggggacatgactttcattgccacccaatgcatgtaaaacatttgaaaaagcatatatagattgattaatcttagtttgctcgacagaattgaggccatcattgccctttctccgaacatcctcataacctgaaaaaggtaaattcaaccaagatataaactttattcaataaaacataagaaaattgttctgaaaacaataatgcaatgtggtttaaagacactaccagctaattcaacaaaattcatcttgctagtttgaagagtatctagattttcattgggagatgatacatgaactatcaaacccttgtggcttctacgaggaagctcagatggtatcttttgtgttggtttacgcgaattgaaaccaacacataacttttgaaaatctgaaattgatttcacaggtacctgaaaattggataacataaaatgcccccccaaaaaaaaaacagtaagaaggatgataattattgatgctatcatatttcatagccaacaagaaacaacaccaaataccttagaaagacctttaagttgaatttttcctagcttatcttccaatacaaaaactgccgactgctttgtatccaaaagatcacaaacacgatcttgctgaacctcatagaatgatatagcgacagtattaccatttaactccgccaatgaaagaaattcgttcattgcaagtgctgccaatccaggtttatcacaagaacccttcaaaatacaatggttgtttcagtaaaagtatatttgatttcaaaggaaagcaatactaatttgtaaataaaaatagtgattgacatgaacccacctgaatcacacaagtttttcctgtgtttttcgctccataggcaaccacagtggcattgcaaccactaaaaactcctgaaattagaggctttacttcccgtgaaaaaattagctcgttgtcttcattttgctcatagcaatagtccaattcgtaggaatccttacgactgcagtggcccaaaaaacgataatttcttgttaaatcaaatataaactaatcttatctccaaaaaaaaaaataatatataaactaatcttatatcagcctaatatacataaactaatctattggaaggattaggagaacataaaaaaaaaattctaaacctaatttctcctcaattttccctaattttctcggaaaccaaaaagacgataaattttctcgttctcttcatgaattcacaacaaatcaaaagaaaattcaagagtaccttgctgattgatcaccgaaagaaatagtgacagtctcagaagcttcaccgttgggttttttcacagatatccaagaaaggtcggtagataattcagcttccttatcggttaagcccctgagtttggctacgactcgaatctttcttgatgggttaaaacccatggttgtgttgatggaggtttccgtgagattgtaggaggaagaagaggttggagctcagatgtttgagttgttgaagtgactgaagaagcttcaaatttcaattagaatgatttcaatgaagagaattcttgcagagtacgattgatcaatttgataagagagatagatgaatgaatgaaaagtagccgttagggatttcggagggattttcaaatctttattacgctccattgaaggtaagtaagaggtgaacgttagtgaaaaaacaggtaactaaaccttaatgggccagtaccagcccaaattcggcccaattccaaactcattcaatgatgtcctaattcatagttgtctcttctcatagttgtatgtctatacacctaagctaagtgaaaattacatgaaatatgggatttcataacaaagtttattaaaaatatggcatttttaggtttgccacttttctatggcatttttaggtttgccacttttctatggcatttttttagcttaattagttttatttatttttttttaattattttacacttacat

SEQ ID NO: 378659 - DNA, 1236 bp, Cannabis indica
gtaaaaaaaaagaaacattgacttgaaatttaatatattgatatgtgtatttaatcaaaaatatatatatattgatatgtgtaacggccgcaatgaaagtggggaccaaaaatgttgaaagaatgaaagcaaaggaaatgaaatgaagtaataacaataacaataagtgttgtcgttgttcattaattggtattttcagaaggtttgccagtttacagacagacattatataataaaacacaattttgccacttgcaaatatgtatgcaatattacgacgagcattagtattgggtactagtggtgcttagtacccttaagacgtgtcgctttgtgattgactagcgatacttcttaaaaactattatattaaattatatgggacccgatacttagttagaccaatagcgatattgacacgtaggaaagtgtttggcactactggtaccttttagcatttctcatattacaacggctaagcttgacttaatttttgaattgagtgttttcttcctcttcaatcttcatcacttttataaagcctgcaaaaaaagtactgtacaagtacccaactcacttctccgccggaccctttatagctccaccttattcatcattattattcaactctttatatgtatttatatcaatctcctaacatttcaactacatatagtaaattttccaacatggaatctctttctctttggtttatttaagcatcaaatatgtcaataattacaagaaaaaaaattaattttcacgagcggtaaatactgattggatttttcggtttcgatatgaaatcaatacgagtttggaatgcacaacacgacacaaataaaaatataagcttactccaaatacaacacaatgttctaaattagaattgtaaaataggatatgagtttgagtatgacatgatacaaaaaaaccgaaggcgcgaataattagagcactcccaataaatgttctaaatatagtatcttttttaaatggagaatagaaaatataaatttatcaaaaatatgacattcaataaatttctattttgcataaattttaagagcaatgattagtgttatttaacatgtgcagcaacactattcattgttctatatttattttattagtgttttttaatttttaaggtaatttttatttataagtatatgagtgtattaacgtttgagattttttctattataaactaaaaatgtaataaatttacattta

SEQ ID NO: 378660 - DNA, 793 bp, Cannabis indica
tatatatatgggtgtgtgtttggagctctcattaattatggtagtatcataagcgcgcctttccatatttttctaaatgaatagtttggataaattgttgtatcattatcttcttttatcatacatatgaaattatgaatgtaaaagttttttgatatcagaatatttaagtaaaattccctcacaaggggcaatagcaaaaacagtaaaataaataaataaattgaaggataatagaattgaggtttccatataatttcttactcacaaaaactttgctgttggctacagtaaatatatataaacatcggaaatttttatatattatattatttttaatcaatagattatggcgtcattatttttgtctttatagcactaaaattataatccagtataccaaattaaacattgcgccagttttctgaatttattgaataattttaatttattttaatcagtatataagtttttgttttttgtacgtatataatacacttttcaatcttcaggaattagaaagttgataccgactgtaagtataaaatgatatgcaaaatcaaattgtatattttcttgcaagaaattcttgatttgtgttttggaaaaggcttcattaataccttctcaaatactggctattctttttagcaatagctttcttaattaatatgaagataattttcttaaaaaaacaatatatgtatatattgtccatacatcacatcctaccctaccctattttaaaacaaaaatgatgtgcaatttttttttttttttttttttcttatgt

SEQ ID NO: 378661 - DNA, 641 bp, Cannabis indica
ttttagcaattcacaaacataatttacacaaatgctacatgcattaaaaacagtccaaccaaaatttttaaaatggctgaaaatgggaaggatgagcaaggcaagtgaatcagatttccttcttggatccatcatcgagagggtcacgaagcgttccgaacatccaatccatccacacggtatagtggccgtagttatgtcgatacgttgtgtggtgaatggtgtggaagccagcacccataataggccacaacttcccatggatgcagtcgtgaatgtttgctgtccatatagcctcaataaacaacaaacctaagtgcgtagtcaactgtactggtactataaaaagtgctatcacatgtggtacagcctgtagtatcccatccaatgggtggaaagccaaacctgaaatatttgtcatgagaatgtttagatgtttgacaaaatttatatatttaaaatactataagaacaaaatatgcctctactatgcataccaggtcattacacaatgaatttacacacataatgagtggcacaataattgagaatagaagtgaattaaactttatttccaaatcaatagttagtatattaactttttaaccgctgaccagattcatggaattcatcaaaaaaaa

SEQ ID NO: 378662 - DNA, 1465 bp, Cannabis indica
gcctaagaccttacagttagcagattttaaatatactctgatacttacgtaattaatgagttattccataaaaggcgattacatcgattcatattccctttatcttaacacatgtcctccactgagatggaatccgaatctcgggtataacacattcattaataagaattaggaatgattattgagggtggcgaataacctttaactagtttcgcatatcataatctcaatattaatttgtttgttttatttttatttctgctattttaatcttaatctcaaaacccctttttctaactcttgtcattaatttttgaatgattgaataaatatagtcctcgtgggttcgacccgtacttgcctttatactgaaataattgaaagaattggaataaaaaaaaatatagtaaatttgatatggcatacgacacgcatcaaatacccacactaaaagaaatagtaggggtacgagagattcctcccctaaaactgcttcgagaggtcccccacaagacccgttatttggaagcaaaaccctcactgaactttgctcagagacaatcagatcggaaactcaataatacatcgaaggttcccaaatgtttacccagaactgtaagagctctagacagagaaagttaaaataaaaaaagttcaatgagaccttaaactcaaccaacacatgaaactaatgactggcagagttcatagatcgtaatttgattgttgacaacactcacaccaggataaggctacagtctcattgaaagcccttagtgtacaatcacataagccctcgacagagaaggcacatatcttaccaagaatatgaacaagcatttcaactcaaaagagttcaactgcttaaaaggggaaatatcacttacttgagaaatatggagactgtaagggtggcaagatttgcgttggcggaactgcaacagagtcttcatggggaagtctagcctaaagtccataccctcaaaatatgagtgtgttgatatctacttggatatcaaatggccttgatggatcaggataaattatcttcaaaaatggtatgcttctgggttttctctggctcgaattcaaaggagaaggttaaggcaatcattgaaaatattagacactcactagaagcaagttatggtttttatctatcaaaaaatttgaacttagagtatcaaatgagcaaaagtggtgaattgtgtttcctcaccctatttataagcaaagagtaacgatccacgtgcttcttcaatccacgactcaaatggcatttaagaaaacacaaaagtaatatgatgatcagggaatagaagcattagctgtaaagaccgcttagtttaatttggaaattagcatttaatcacgtttaattatgaaattatttatcgttatttaaataatttattatactgttattattgaattcagaaatgcatttttatgtcatgtagtagtt

SEQ ID NO: 378663 - DNA, 1601 bp, Cannabis indica
gtaaaatatattccaacacttactacttccctggttggttgaggcttctcatcgaagaacagtctgatcaagttgaaaaggaccaatctctcaaagaacatctctcttcttgctttgtatatttttaaatggctaaagattgcaaatgggtatttttgatcctatttataggattaccaagggatataatggcaatcaatttcaaaatattctatttctccccaaaaagcaaaaaggtaatcattgtaggggttgtgtaattgtcagtgcacgatccctaagatgcggtttccaagaaaagacaactaatgcgaagattttaaaggataaagaaggattcacatgcttcgggtagaagtgatatcatatccgtgcaggcacgtgggtacaaacacgtgtcacctagccgtgcaacgtgtaaggcctagaaagtccccgtacgatcagaagtttccatgcagacttgggggcaaatgttatcccaaaattcatactaatgacgtggcactagcaggctgatacgtggtatggaaatttcccatgagcggagtataacaccaatttgtgacgactaggccaattgatgccaatagaatcgaacaagcccaagacctcacctcgccccgaactatgtaagccatgtaattgtaaagtgaatgactgaacagaagaattcaatgaagatcttcaaagatactttccttaatcaattccacaataataggctaattaatatccatattttcatgggatttgatttgacagatgaaaaaaatcatgagattcacatttaaacccttccttatttatctcatatttttggtgacttatgtatttattcttccctataaatagtgaggtcaattcgctatttagatttacgcacttacaatagagaaaacactctaaaaatatttgtaacctttttgagagatattaagaaactcacttagacggatcttgtcatcttaatattatttcataagtaatacaataaaatgggattaggctgttactgctgaaatgggtcgaacctctataaatttcgtgtgttgtttatattattaaagtgttattcattattctattattatattactgtttgtgtcgtttatattattaaagtgttatttattattctattattatattgctgttttattgactccacgtcgttgactagaaatgaggtcaataatgatttagattagattcatttttttaataaaacccatttctgctttctacactgatttggacttataaaactaatattaaccgcaaaccacaccgcacttatgtgctgtgtaaaaataatgtggttaaccatagttaaattactaatttatatattaaagaaaaaaagaaaaaaattccaataaacatactcttaaaagtttttcacctgttcctaataacacatagagaaataagaataaaaaataggaatcttcatatgatcatcatcaatgaaaaatagtaataaataattgttcctctccaaatcatgttttccaggatattgatttattgcttaaattacgttctattgtgttgatcgaggttttcggcaaccaataaaataataataatttagagag

SEQ ID NO: 378664 - DNA, 8755 bp, Cannabis indica
caggcccttgtgtaccaactcttgagaggaagcttgaaacagaatttgagaatgttggattggagtcagaggatgcgtgtggcagttggtgtagctaaggctcttaactatcttcatcattcttgtgaccctcccatcattcatagagatgttaagtcttctaatatcctcctcactgatgattttgagcctcaagtaagtttttttctggtttataaaatgttgtttgtttatacttgttagttgttattttataaggtcagacagataatgagatctcagtagtgatcatattcatggccagtggtgatatgttacatgttttttgcatttatatctttcaaaatatgtagtgtttttaagagtgagagaagtggattggaggaacaagttgggaatgattagatgtatactatctgaggtaggatagttgtcttagaagggattctcatttttaacaaatttcagtctttataaatctggaatgattttgaaagaaaaatgtctactttattccctcccatcaaaggaggcagagggttttagttttttctctttcgtttcttaagtaattacctgcctaccttcctatcttacctttctcccaccaaacatagactaggtcaatgtctctaattctatggatacttacagaagaaatgtggaaactgggcataagattggtgtcaagtattcgaaaatagaaggcccaaagtagcacattcttttgatttgagctataacctcagctgaagtatggcaagtagtttcattaacagttaacgctcttttattttggttcattatagagtgttaatactatgatgatgtttcacactggtttttaagtattctaaaaaaataatcttgggtaaagcttccccgacttaaaaacatatttggtatttggttttcttagctctcagatttcggatccgcaatgatacttcgtcattctcatcaaacttcatcaaatgcaaagccagtttccgtggttggaacctttggatacttggccccagagtacatgatgtatggcaaagttgacgaaaagatagatgtgtactcatatggagttgtgcttcttgaactcatcactggcaaagaagctattaaaacagacagggcaactcatgaaagtttagtcctttgggtacaaccttttgttttttttgaaatatctctgctctcacatcattcattacatagtttcaatccttacgtgtgtgtatatgaatgcccccatgaacttgcaggcaaggtccttactcagctatggcctttgtgatcgtttaatagatccttatctacatgatgactacaacaaggaagaaatgaaactaatggtggtcgcagcacgcctatgccttatgcattcatcctctagaaggcctactatgaaaacagtaagcatgactgttataataattgagtttttcagattcatttcattattgtcccacatttctctccacttttcaactatcaacttaataagaacgctaaaagttaaagtaagattaagactatgatcatatattttggtgtatgtgacagagtaataatcatcatttttactcactttgctcagtcttcttacatggaactcactagcattctatttgggcagatactacgattatttgaggagccagagtactggataagtatgcagagggaaagggacgagttcttgaatggtattagttccaagtgtgaaatagacctttggaaaagggatgactctgttactagtgataccgaagatgattagacatgtttgaaataatttttagtcatctatagaaatgatttgaagaaaaaagaaataaagtactaacagaaacattagaccattaaccaatattagaaaaatggtctgaaactaattgtttttgcactggaatggtattagagttagtaagctcctaagaagaaaggacattgtatgtacatggaatctagacttagcttaagtaaaaaatcccaagtgtttttgttatcttaaatttgaataactgatccaaataatagttatcttgagaattccaaccacaagtttgacggagaatcagtttttatttactcatatttattgacacaatcacaaatattttactactttataaagtagtttactaaatgggaagtaattgatccttttaataaggcaaaaggtctttgctttgtcttctaaatctcagccaattgagcaaaattaataggatatacaaagcttgggggaccactaaaaagggttacagcagctagttcagaagcagtttctgtagggtgaaacaaatcccagaacaggtattcgtgccgattcggacaaagcttagcatgtggaatacaaaaggattctccatctccacaacatggagcttttacttccgtgaaatctgaaatatcaaattgtatatagcttcaagtactgttattgaataaagaaacaggaaaatatagaggtttagaggtgaagttcttactgaatggagttgggttttttattatgttgattgtcatctcaaatgcatttccaagtgagtatttcatgtccttacactctgagctaaggttgtttaaaagagctcccaacatgacatgaaaatcttcagaatgttggttcaattcctccaaacagcccccaccagtttcgttaaaagctctctgagagggacaacacccaattggggggacactaataatgccaaacttcttcgctccgaggttcagtaaactctgccatgttacataatacaaacttgggtcaagttcaagtgcagaacttcttttatatgacaagtacatgacgttttgtgaataaaattaacctttaagtgcttttgataagcgagtattaaactggacaagaactcagacttgggtatggaactttgtgaatgaaaataaccaaaaatatcgttgctaccaatgctgaggaagtacagagactcggagatgtacttcatagctgcttttcgaccttttatagcgataagtttgcgcctaacagaggaaaattgccttatctgttctccaagtgggatgacattcttatgattcttgtttaagtaatctgatggactttgaccttttccaggctttgttatgcttacctaaaaacaaaattagaagaaaacacccatcaatcatgtatgtatatataaattaatctaaaagagctcgaagacctttccaaaaaaagggctccaagaatgttgttcttacgtttgattgtccagttatgtcaagaatgccagacccaccagaggcaaagttggcacctgtgaagttcttgagaagagacttaaagttgagagacaaaaagggtggtggacttttctcataaccgagtagcttggcttaaaaaaaacaaacagatagagaaatgtaaaaacagagttaatgagctagtattaaacgacacaaagcgttttcacatcttaaatgaaaaaaatatatggtaagtttctattactagcactaaccaagaaaatcagcactgttaaggccattactaaaccttccagtggggattgattgaggaaaatcgatcccattgtagggaaagtttgccctgttaccactatgtggcaagaaattgttggtcccaacatcagcagttgagtcacccagtatgaaaatagctgggacatttgcttgggccaatggaaatataaacatgacgcaaaaaattactagaggaacccatattggtttagccatgagatatattttaaaagaaaaataatgtgtaatgttacttagaaatcccattaaaggtttctggtatttatatgcaaaggatctatcgtatagtacagaaaagtgggtgatttaggaggtaatttcagagagagagagcacactatattgatgttagactattattattatctggccagctaattttctaaggccggattgattagattcttgggttcatagtctcttatattgtttcacctgtctttttcttttttactttttcccatttatatattatatcaattaattggacgtgcttgcttgaatcttgattgtagtacagctagatggaattgaagatgtagaaagcaaagaagtatcatcaaggtaataacttaataagactaaagtttgtcatcttagtacataaaatatctttgaactcaacgacggatattagacttggtcagtcacatcctctgttattgtgtatttgtaaaataaaataataataaaaaaacaattaaaagcagaaaacttgaaagaataataagcacgtagataactaagtaacagagaagtactgtaattttcatgccaatatatatcttaacaaatgaaacatgagttcaacaaataaacatagaacgaatgaatgacaccctatatgtgacaacatacaaattttgtcacatttgtgccctcctcaacacaccccaaaaaagaattaagcaatgaattatttgagaatgtaacgcctctacatctcatacaccattttcctctctctcttctcttgtgttagttacgaataataataataataatctagtcatccaattttgagagatgtagagacgtgtttaattacttaaaatcacacaaaagtttaccccagaaccaaaagtaaatacaaataaaaatgtcatcaaggcttgcggccaaaaactctgccacacttcaaagcattaggaggaatgaggtactcatccctagttgagttggagttggtaaacactctcatgtaaaactgttgtcctagatattgccttgcccaaaactcactcctcacattccacatacccacattatccagtgctacaagagcagccgtccaagactttgggtatacctgtaaacacataataccaacttattagtttcatataatttgtatacaattatttaactttttattggtccagattagctagaaacagacctgtgtagtgtatcgtgagactgcgtctaccatgttgtattgctttctactattcttgctccacactcctttatccattctgaaatttcaataactatacaagtgagaaggtgtattatattatatgattattattgttgagttacgaattatgtttaagcatttacccgacgatcctgaaataatatccgttaatgtgatagctctgaataatgtcttcgtgattctggaaaataatctcgataaaagccctgtagtcagctcctagaacagccgtgtcaagggtcatgggttttcgggtcgggttgtcgggcatgctacccacccggaagacacctgggatcttatagtaatctgcaagcttaagaggagtgtcagcaggcttgtacgagatactgttaatggcgtatctttgctttccacccacttgcgccgctgagctttctagcgttatggtccttgaaatgggtatattccagtacgggtacgacccttgtgggttgggcctaggtccactagctgttccattgttcctgttaccaattcacattttgtttcaacaacacaaacaatagttgtatttatctgtatgtgtaagataagtgatattttctacaaatggtttttgtggttacctaatagaacgggcctgattgagagaccaatcgatgcccggattgggcccggcaggaattgggccagacactttacgggccgagtttttgtatttaaggatggcagtggcggtcatggccttttcggagaagcgagttgagacggcaatgtagtagtcttgtggggccttgttgcctgtgactagcaccgaataggattgtcccacgtgtatgtcaagtgagtcataagttgtttggatggtgtggattccttcaacttctatcaacttcatagtatgcccttgaattcggaaattaagcgagttttgtagcccaacatttgatactctcagtctaatcgttttacctgtaaaattaattgtttaattagtaaataacaattatgtttaacgaataaaagactgctgaataattagaatcattaggtgatgaagtaattagttaccttgttcaattgtgaaaactgcgtttgatccacggccatttatcaaaattccatctggagaagtaagtctacgaccattgtcgagaatagacttcaatttctgaaatgttttcacaacaagacatgtacaaacttagttcagtgaaaatgtgtaataaagagcattactacatggcaaatataaaggcccatattgattatgggctttgtagagtgagcccaaagaatatacctcatggtcagtcttgtaccaatctccaatgaggatgctgtagtcagcagcaggtggaggaaatgggactgggattcttggcctgctaaggattttaatggctccaaagccaccagcagccttatggaaagcagtcgatggaaaatagtagaagcttccaatttgatctttggcctgtaatttgtaggtatagttcttccctggtgggatggcacatgttgtgccagaaactccatcttgataagaatttttcctattttgtagaccactcctgttttttttttttttttaaaaaaaattaaacaatgatcagtatttatacaatggaatagtaaatgataaattaaagtagtgttagggaataaaattattcatatgagttagtcatcagtatagcttagccaatgatccaatacacgttttctagagcaatttataaaaaataataacaaaaaaaatacactatttctacatcaagcctgataatataacaaatcataattagaggatatacagtctgtaatcattgaaagttgaccaattaacgcttttctagaacaagctcgactacaaaatattgttccagctatattactaaaaaaaaaaaaaaaaagtcaaacgaaagtctttttcacataattttattaaacacgatcctcttaactaggttccattaacttcgtttacacctaaggtggcaatctcgtaacaagtatatataggcttgtcttttacttctaatttgttggtttattaatggctagattagtttattactcatggtctggtgtggtgaggtgaggtgatcgtgatataataatatacattacaatttataatcacataacatttacatttgccaaaatgtacatataaactaaattataatgtagggggtattacacactatatcataaatatatatatatataacattaattattaggggccaaaataagaagccatattgtagcctataagcaaagaaagatatctttttatctagttggcttaccatgaaaggaggaaaggttctggcaagttgttcttaacatttataatcagattatcgttggtaacagcataaatgttaggccccggaaataaaccattgataagaattccctgcattaataatatttaatgtcacaaataagttaacacaaactaacattataatgcaaaaactaactattagtatatatatatgtatgtgttgacttgtacatgtatatataagataattatgtatacgaaccctttgtttaactccaagagggtagatatcaccataggtaacagtccagtcaaaaaatctgtacggatcctcagcacaaacaaggcccaataccagaataacgagggcaaagcgccttacggcaccttttgccagattgagcaccaccataatttggatatagtgctatatgtgttcgtacagttctgatttagagaacagtactataaaagaaaagaaaagaaaagaaaaggtgtggtggaagtactcttctgagggagaaatagacaatgatcagtaagtacttatgagaatgagagaatggggtttcatatatatagttaccataattaagagatagctgattcatttagcaaagtcaaatcagacaacacgtagatgtgagaaaaataataaataaaaacatataacataaatcaatattaataaaataataaagatgaataatgaactggcttggtatataatataactataatatgaggattataaatttataattagtggcgtacaaatatatagtctaaaaagaagtacgtgggtccaacaatgaaatcaatcataatttataagtagatgaaaattaatcataatattctctccagttttttggccaaaaaaactaataataatagtatttgatgaattgaaacgcgttactttccctatacttaattaaatttcacttcaatcatacgaatgccggctcttctttttagtttttgctatagaaccgcgtttgtattaattcccaattcacacatacatgtaaactaaatacctggcagcacatatatatgatgtgatatattcctcatttcgtgtaatttatcttctgaaatttgggctctaccttagtttccttacaaccaaacaagccttttatctaaacaaattaaaaacgaaccgtcattgaatcatcctcatttttgtatcaaactgacattcaacgaaccaattatgtgagcttaccaaacaaataaagtatttataaatttaagaatctgttggaactttgtatgaaatatgtaaaaatagaaaagtgaagtgtgtgagtaggagttccacatgggatagatacactacattttaagtgtatatctagtacaagtttgagatatgggtttgggccccaaggggtacccagttttgcgcgcatgggtgaggactcacacactggaccaccacacgcgcgcgccgccgaccgaccgaccgatctgggttgggttggcgggtgaggtgtcactttatt

SEQ ID NO: 378665 - DNA, 5972 bp, Cannabis indica
actagcaataatttgggctgtgtggttggaaaggaatgctagaatcttcgaaggggttgggtgttcagagaggacatgtgggagaagttaaattccggacagctacttgggtttttaaaccaagttttttgaggactttgccttttttagatttatgtagagattggaatgcattgttgtaaaaaaaaaatccccttacccttttctcagcaattttggtgtgctaactatcctttgtatcactttgtaatggttttcctccgccataagcgaggtttattaattcatttttaggagggtcctgtctatgacttgcggaccctttcccttttcaaaaaaaatatatatacacatcaaattttaaaggaaagcaagttctgagtgacagcagaaatcaaaaatattacatgactgtagagaaataattaaaacatgttacagattattagaaatgaaaaagcagacgaataatttattatattaaatttaaaatgcagagaattttcagatgatatcagaataaatgaactttgcattcaatgacaacaaacagttccaacctttctttactgtactgtcatccatagccttatattccatattcttcaaagcgagttctacaccataaccacccaggtttactgaattttgtgtgccaactgcaccacaatggccaaattgtgcttcacagcctgaaggtaatacaggtctgacaacatacttaacttttccctgaaagttaacaacataaatatcaactatctaagtggagacacatgaactgatgacaaaaatggaatgcctaccaagccaattacaaaaagaaaaataaaataaaatattataattcatcagatattgtgaggttttattacagaaaaataaaagtaactactgtgttggctcatgagttgtaaacacggatgtatcttatcatctttttatcaattattgtttatatattgcatactaactaaacaatctgagcccacataatagactctagaacagaaccacagtacttagaattcttactataaatagctacagggaagttaaaaaatttaagtgaaaacttatagctggaaacatatatgcgaaaatctttagccaactaaattttatatggcaaagtaaaaacctatagcactagaaaacaaaacctcaaaaattaaatgttttatgcttttatgataattggatctaacacccacctaacttagtattctgtcactaaggtatgaaaatggaaatttaaaatgcaaattcaagaagcgaccaacgaaaataaaaaaaaaaataaataaaaaaaaaaaaagtggctccaggaacaacatagtggaatagcgttcctataatgcaagttatggacctctttggcagcatggacaagagtgaaatgaaactctctaaagcaatctgttccaagagctccataaaggatagcaactggacttccaatactcgaatcaaaatggatgtgatcaaagtcaaaaagttcaggctgctgaaatgaatctccagtactgaaaaccaatgaaacaaaaatatgtataggcataaggcacaacattttaataaatataaacatcattttccaccagggcaaacatgtaaagggaaagagcataaaaaacagataaagcagttcttaccgagtagtgctgcgaagccacaattgtagttctgcaacattaaagaacagggtggcaccattatctacccaacagcattttccaccagggctttttgggtttacaccaacagttaagagatctgactttttagtcggcacatactcatttgtttctgaaagctccccagcaacaccattttcatcagaaaaaggaaaagatgaaagggactcctcagctagttgtcggtaaagcaccaatcttggggaggctgatctcagagtaagagagaattcaaacatcgatgccaatggttcacttaaaagagagcgcccatgtcttaaaattttcttcagacaatccttagcactactataagtctcaacatcatctttctcactattaagccagccctctgtgaagtcccagaatagattcttccattctttggataataattcactgtaacaaacgcaagataaatcttcacaagtcaagaaaatgctgaaacagaaactaataacatttacgcagatgatattactttttcccaaaactgaaaagtaaattgtgtgtagagtaatgatttgcatatttattatctcttcgagttagtcccacattactaatgtgtggaaataaaataccatatataagatgaatgggttactcttctcattgccgattggtttcgagatagaaccctagtcatcttagcctctttcattccaaattctgatatagtatcagagccaaacgaaaaacttccgctatctcccttttaacttccatttgagacttgtttcaaaatctacaaatttcccaatttggtgggattttttcaaatgtcacattcggccatgtggtttcttaaaggtcgtttgttatacccacactttccagatccaaacgtgaggaaggtgtattagagttagccccacattgctaatgtgtggaaaaaataccatatataatatgaatggattactcttctcattctcaattggttttgagatggaacctcattcataacctcattcatcttagtctctttcattccaaattctaacattatcccaaaaaaataaatgaataagagaagttgtgacaagaattttattccaactgccattacaagcaccaaaggtataaatacaaagacaataaataggagaactagggcatcaacaaacaaagcatagttacagctgattaaaattaaaatttaacaaataaatgttgcatttgaatgaaaaatatattttttttctttaaaaaatgtgttatctttaatatacattgtataatcaaatattccaatctaaccaaaattccaaaaataaaggtagagaataatgtaaaaattgtacatttcactcaggattttctttatacaaaaataaatatatagctttactaaatggaagcaatatgtttttaataaatgtaaacccataattttgaatacactaggaagggtttaataaataaaaatacatacaaaatatagatttcgtcaatagcattatttttgaagactaacagcaaattgtattaatgagggagtaatacaagaagcctgaaaaagagaaatcaaactaagatagttcttttctaaaaaaattaaagtaacaatattaatcatggaacaaaatataaaggtgaaaagaggttcagcagcagcaaacagaaaccaaactctacagaataaaatttcaaactattgcagttacatcaaaaaaacttcaatccttaaccaaatcatcaaaccaaaatccttttgaatcttttacgctaatactaaataaccagatagcctccaatatctacatttgttgaacttccgggccggtaaagagccaaaaaaatgttagtgcccctctttctaaagcaacaagcaagaaacttgacttcgagaaagaagcgcctcgccaactattagaatattagtaaaggccttagcctatcataggttggggccttttcttgcttgctagcgccccctaccctaaactattagtttaatcatatcttcaagaccttcctctaacaagtaagcaagtaaactaccttttgaaaaccttactaatagcatgtgaagacaaaaagcttccctcatattatagaaaggtttgtagaaagcctttaaatatcccataaaaagtaggggcctcaaagcttgtagtttaagggtgtgcaggtttggaaccctatacaggagagcagtaagggtcagagaagggcaatcactctttcttaaaactagcattattaagaccaaagagtcgcaagttatccaacttatcctcgatatcattctattccactctaacaatatggcccaacaaatagccatggctgccaaattacatagcttttgttagttcttattccatgaaataaaagaactgattagacctgaactagttgatgagcagcccgctgcactttatagtccttgaacaacctattcctcatcagaaaaaatgatctactgtttctccattcttcttacaaactacacaccaaccaaaaggaatgaactgatagggccttcgcttctgtaacacctaatgagcgcccattccattccaaaacaacagccaaagaaacatctttctttggatggagttggacatttccatatgacagtaaaattgtgaacagatttgtagaaaaaccaggacttttaagcattcaaaggccattttacaagtgaatattccaaaattatcactcatctaaaccctcctatcttttctattgtgacaaactctcttcccttccagcataactaaattacctttggaacttctctaattatttgtaaaaatataaaagaaataacaaactaacaaatagagtatacaagcatatgtatataaaaataattgggcaagcaattttgtgcaaacacacctcaaccttcaactatactggattaccaaaccctaaaagataaattttgaaaccaaatcttgtaaagcatattacacagagaactttttttttgtcataattaatttattcataaccgttcagctgacaataattctttcttctgcaattctttccttcaattgttactccagtttgattctggtttctcatttttttaacatcacatgaacctctctttacttctcatcctttagcaccctccattatagcaacaacgcaatcatagacaacttccattttctaattctcttacccaaaatgcgatcataaatcaaatatttacatgataacgtaactcaagtatcaatactcatcatgtgcatatatattaaaaaatcccattttaaaatgtacactaaacttatcacacaacataacaaaaagcaaataaaccaacagcaacatacccagcttccaatagtaatggagtgcctgaccacttagcctgaactgcaacttgaacattcttgggtcttcgattctgagcagagacagaaccaaaaccacgtggtccaaagcaaaccagaatgattagaagaacagaacagaaccctgatctaagacggatctccattttctgagtaatccaacactttatctcaatgggttcggatttcagatgtacttgggtcaataggtatccgccattgatgaatcagagagcgaagctcgagtatggtttggtgaatttgatgaaatatcggaggagaggaggtttctgggcacactataaaaagagcgatgaccgtaggggacgacgacttagagagagagtgtatatgagtgagtgtgttcatagggttataattgtctttctacacaattagattaagggtattttggtccaggaaatttaaatacacgtgtttttaatgacatggcgcttagagattgggtcattttattttatcttgtttttgttagctctcaataattcttttggaaaacaaaatgaatgctttttcagcagaagttgaattaatttttttaaaaaaaatagttataattaagttttgaaaaaataaaaattacaaaaatcaatttcaataatcaaaaaaattacaagaatgttcataacatgttttacaaaacagttatatcttcttttttaacataaacaatgtattatctccgtattattatctaaaagactaaaaaattgtattattattatatataattatccacccatattttattaatcactttagtttatgcaatgttaaaaaaattaataataaaccgaagatcaatttgtatataacataaaatacaataataacatataataattaggtaattgatacatagcaattacctcaatttaatccatagcaattacttcaattcgatagtgcaatactatcaactaagtct

SEQ ID NO: 378666 - DNA, 6071 bp, Cannabis indica
aaaaaaaaaagaaagaaaaggttgaaaatgataagcatagtgcagtagagttcaagaaaaatgttttgtttgccaaacagtaaactagtcagaatgttgtctaagaaaatggtcaaccttgtaaatatatatcattcagatacaacaatgagattcaaaattgactgattatgcatttcactgaaatttgggtcaacacaatacattatgtcatcaatgatgcaggaacaatgtgcacacctattttgcttttcacaccaaatcttattgacaatgaaaaaacactccctaagaaatggaactttattaagataaaagcaagaagattacattaaggttcagagataggaccaagcacctttgcaaaaataagcatgcttctctttgacacttcaatatgagtatattatattcgaacaggataaacttcagggacaagacagaaagtctatggattaatgaataaaccgacccttggtaaagaatcctaaatccaagaaattaaagctagtagctttcaagtttcaacaatcaatattttttagaagaaaaatcatagatagaattatgtatatttttaaactagaaatgataaaagtagatgacattctaactttctaagtgtcattctatcacacacattttaactaatatggaagataaataagatcaaaaccttaacataccgatagagtaaagaatgactctgcattggtggatcatattgtaagtgggttagtggagccgatgatggagaaggtggtggcaacaatggaggagttgatggtcttatggaacaagcaaatgtggaagagcccaatacttcttccctttctttctctcagtttttctcacctaaaaatgaggaaaatgtaatcatactttcattgaagaaaatgatttccctcaaatttttgtacctttttcgtactgaaatccaaggaccaaacagagccttagggtgtaattgtaaacaacttacagcatagatagttagtcctattcataaacaatataagatttaccttatttcatccaaaagtaaaaagctaatgttctggactatgagaaactgctcaaaaaaaagagagcaaattactaccaatgaaagaaatttagtcaacatatcacaagctaataagtataataaggtgaaattcaaaaagcttaacagaaacatatataaaaataaaaccactcaacaagcctctgaaagatgaactcaaaaaatgacattaaaccattcaaaagttagtcatgggatgttagaaagaacatacatactaatgccataaaaagcactaactaatatttcatatgaaaatgaaatatagctcataaattcttttggattactactggttgcaaagaagaatctatttcaccattacataacattttaataaatatctctgcagttgatgaatcagcagaaaaacccttttccaccatttcattattcagctcaactccccttgatatttcacaattgttgacaagtcctcggatcattatattatatgtcccactatttggggggcatccattttctttcatatctcgaaacaaatttaaggcctcacctacaagaccttcacttagaagtccatcgatcattatcgtataagcctttacatcaggttccaaacctttcgatggtagtttgcgaaagagatcctttgcaactgtaaaatttctagctttaaacataccttcaatgatgatactgtagataacaatatccagttgtaacttcttctcttccatatcctgaaatatttccattgcctcctccatttgtccatatttgcatagcccattaagtaaaatagcaaaagtttgaatgtcgggaagttggccggcaccctgcatctctgcaagtagctctattgcagcatgtgttctccctacagtacacaaaccaccaatgagagtgttgtaagtaacaacatcaggaattaatcccttcgatgaagacatttctcgaaacaatgcaagagcttcctccatcctcttgttcttacaatatccattgattaatatattatagctatgcacattaatgttgaaacccttcttaagcatctgaaacattttagttgcctgatcaatttctcctcgcaaacaataaccatccataaccgaacaatatgtcaccaaatcaggttcgatgcctctctctaccatattatcaaccagtctttctgcctctacaacatcaccctctttgccaaacatatcaaccaaaatattgaaggtatgtacatttggttgaatattttcaccaaccatttgattaaatagcctcattgcttctgccgttggcctagcaagcatgccccatgtatcaagcagctgtatgtaacgacatttacaaatcctttcttagtcatttccgagaagagatccaatgcatcaacaactcgaccatccttgcagagaccgccgataacagtgctataagaaattatgtcaagcttgcataacttttctccatattcctaagcaattgtacagctgcagcagtgttgcccatcttacaaaaaccatttattaatgtgttataaataacaatattaggcttcaaaccttcaccaatcataagatgaaagtattcttttgcctccttcatttttcccactttgcagaaaccatttagtagtgtgctataggtaaatatatcaggcctaacaccacctgcaatcatatcattaaagtattgttttgcctcatcaattttctcgaccttgcaaaaaccatttagtaatgtgttataggtaattatatcaggcttacatttttcttctgctaacataatgtgaaaccattcttgtgcttcatcaattttcccctcattcacaaaccctttaattaaagtattcagagtgattgtgctgaattcaaacccaaatttgatgaaatttccaaagacagatagacctaaaagggtatgctttaaatgagagaagcaattaatcaaaatggctagagtataatcatctgggacgattccaagtgaaaacatttggttgtagaaagtaatgacaagggaatagtgtttgaacttcacaactttaccaaacagttgattgaaacttacaacagaaggcaaaggtcgcaagtggagcattttgtcaaacatgttgagagcatcttcaacattacggacttcttcaatggctacagtctgagagtgagaatgagtttgtgctacagtgattgaaaaactggaaggagaagaagaagtaagacctgtaatgattcctgggttgaacaaagtccgagtaattctagggcaagtcctctgcatcatcacctctttccctttggtactaaatccaagcttttcttgggtccaattcaatccaagcaagtaaaatgaattctactttatttaaatattatcattgcataattgtgattctagcagaacgattggctttatttgtagctttggatttgttctctttttttgagtctgattgttgataatgctacatttcttcctcgttgattttgggaaagaactaaaaagagaaagatttaagtcgaagtaagtcggattcgctagctttggaggtcgttcttagaggatttaacaggtttgatgtcgaatttttcatgtgtttctaattcatgtttatttgttggattatggattaggtccgtatgttcttgggtgaataaaaaacttgtatagttagattaattcctaacttatttcaatgaatcctttatcttttccaacattcaattaaatttttttgatcttacacactctgattactcaatcctcaccaccaaacagaatctaaaacatttacaggttttccattgcatatagcctttaaaacacacactggtcactcatcaattaatatcatcagctcaagcatctgaagctcaacttagacagcattactgtacaaaaacacccaaaatttgaccaaaaatatttgcatactgtttggttcattttattaattgaaacattttgaagcatggacaacataaaatctataattaaggccacacatgattgtgtgaaaaccattaaagaatcataaactaaaatgatcgcctgaaagtttagatatcaaagatcattctttagatcactattccacaaactatggaagtgctcaacaccttacaaaacaaaaacaaataattcaactactataacactgcacaaagacatctatggtaatagtatatatgagggagttcgaattacagtctatatgaactcggacggtgaatttgcatcaggctttccgctgtcacccaatccccctggatgctgcaaattctgcaacagttgaagtggtaaagtgcctaaagcaccacctaaaccatcatttggtgacccgaaaaactgacaaagaagcctagccataagcccaagaatctgcatttggttctggcaggcctcggcgtgcatttgcatcatttgcttctcatgctcaatctgcaaccccaccatcctttctctccattccattgcctcttcctccctcttctcttccatcctcatcctcctccgtcgttcatcggcaaaatctcgttccatcctcaaccttctctctgattccctccttgcccacatcatctgcctttcttccaaatccaattccctatcatccaaccactcttccctctcaattctcctcttctccttcctaaactcattttgtttcctctttgcatccctctctaaatcccctttctctctcttatactccctctctcgcctcctttcttccctcttcagcatcacatcacgaagctccaaaaccctagcaccaaccaaccccaatttcctggctactcccacacccttcttcatcttcctcttctgcccaaaaccaatttcccaattttccctctcagtcccaaattcagcctcactcgcaacaatctcctccccaacctcaccaccaccaccaccaccaccaccaccaccaccatcatcattacaaataccaattccaacatgtcggccattatcggccccatcgcattcctcctcctcctcctcatcaccatcatcatcctccacttcctccaactcttcttcttcttcctcatcgtcctccaaatcctcacaatcaagcccgaatcccaggtccccacaatccccaaaaacatcgatgctttcgcaggatttctttcccttgggctcgagctcaacatcaccaaagacctccttgtacttcaagaaattctcccagtgattctcgccatctttccaattaaaatcttcatcggataggcgaatcttctgcttgacacccaggtactggtgacgcatgttctggaccttgatggagacatcgcgccaggaccacttgaaaggaaaggtgattgggtcggtgaggtggtggagggtgttaacatggtcggcaataggtttgaatttcttctctcgggtcttaagcttggctagagctcccgtgttcagaagctcttcgtacttggtgaggagggtttgctcttccagctccgaccatttctttctcttcatctctggtttatgaactcaccagaaccaagttattgtacaccctgcacatcacaaaaccaactaaattaggctttaaaccttcacaaatcataagatgaaagcattcgtttgccattatatcgggcttaaatccttctcctgctaacataatgtaaaaccattcttgtgcttcatcaattttcccctcatattcacaaaccccttaattaaagtattcagagtgattgtgttgaattcaaacccaaattggatgaaatttcccaagagtcaagacagatagagaaacaattaatcaaaatgcgtagggtgtactcatctggcacgattccaagtgaaaatatttggttgtggaaagtaatgagaagggaacattgtttgaatttcacaattttaccaaaaaaattgaattgtaaaagcacaacagaaagcagaagtgagcattgtatcaaactatgttgagatcatcttcaacttcaacactactgaatgagtatgtgctacaataatgaccgaaaaactagaagaagaaagaagaagaagaaga

SEQ ID NO: 378667 - DNA, 7435 bp, Cannabis indica
ccattttaattttactatcacctctatttattttattatttaattaatgttttttctttttccttattttatagtttgtcagataaaaaaaattatgggaagactgagaattctgaaacaaaccaccccctcactctctctcttctctctctctactctgttttttctatgtctatggcgttcagtttttttgatgaatgaatcatagatagtggtattttctaccaaaaaggggtagttggagttagggagtgacttgcatttgggttccaggttttttttttagttttggtaagccatggctgcagccttggagtgctggtccagtcgagctagtacggacgaggacttggtagaacaagttctaatgaggacccaggatagatcagagggtttggtgccggagagttcttctggtacaggaatgaaggatccatcggctatgcagaagaggattcagaggttgggccggaacgtgtctgaggtcatagcctcgcttaaaaactcgttgaatctggactcggctcgggatcagatgacatcgtcggccaagatcgagagttgtcgaaaggtcgtttggtgcggtgttgtacggaacctcactcaactttatcctggtagtcagttaccggagaagctcatctctaatattcgcaagcattacgattcgttgccactcaggttcgttttgaacttggccttttctttttattcttttgtttctgtattgagttttaatgatgtttggttgcagagaaaatggcagcctagaaaagaaaatgaaatagcacccgtttgataagactgaaaaggcttagttgatagttcttgaatttaaggaaaacagttgtatcaatataatttgggttttttgataggatgctcacagattccatttttagttcttgaaatttctccctggtgctatcgtttccttagcatccaaacagagtatttgggtgtgtcttaatttagctaatttactttgtttttcaatgattttgaacagttatgctcaggcagggtttgatatgaaagaggtgtttcttcatataaaaatgctagagcaggcagccttggatgaccacccttctatattgatccaagaagtgtctgaagacgatattcaggggtgtgttttcaggcttacatttgcttgtaactcatctatttcgtggccagtaatgtctggtgcacttgacagtgcgtctatttgctgcaagaagatacagatctttgagaggaaaggatctactcttggtgttgttctctttctggttcaagctgggcaggagaaaactttcaagacccggattgaaagcgccttgaaatcagctgtaaagaagcctaaacaaacctcaaagaagttcgctttcgggctttgtgggtgccaagaagagaacacaaaaggtagagaattgggagagatggaagaggacgttggtgaccaaaatggtagaaatggggtagagaattcgagtcaaaaagtgcagcttgagatgcctttacccacctcatcttttgtggtgtcagttgatgagtggcaaacggttcaatcaggtggggatgaagtagggaaatggttattgaactctgataatctcgagtttattgatcagattggaccaaactcattcaagggtgtttacaagggaaagaaggttggaatcgagaagctcaaaggttgtgaaaagggtaattcatacaacttcgaactaagaaaggatcttttggagctcatgacttgtgggcacaagaacattttgcagttccatggcgtttgtgttgatgagaatcatggattgtgcgtggtgaccaagttgatggaaggtggatcagtttatgacttgatgcttaaaagcaagaagattcagaccaaggaaatagtaagaattgctactgatgtagctgaagggatcaagttcatgaatgatcatggagttgcctatagagatctcaacacacagagaatcttattggataagcaaggaaatgcttgtttaggtgacatgggtatagtagctgtttgtaagagtgttggtgaagcattggagtacgagactgatggttatcgttggcttgctcctgaggtttgtttactgtttatcttcattcatatatctttttttctttacaatccatagcttttctatttgtcagcaacgataatgccatttcgtaattcatgttcttatcacagccactagctagtagtaagcttatctccatatagaacacgttttgcataatcattataggtttactcaaaagcacttaggatgtgttcttttgtttgtcgtctgattgccattagacccaaatttcattgcctatcttctacacccaagtgcgtggaaactattattttattccatctcaattgtgtaagtgaattgattgatgagaccatttgggcattagaatatgggcacttgggcagcaatagcaactaaacatatttaatataacactataatagaacttaaaggtggaattgacttcatttgtgaccttcacttgtgctcttgagccattgaataaactaggagctacttttcttaggaatacatccatgaaccacaccagcttattttgagacagtttgttttgttaggaaaagttcatcttggttgtattatgtgctcaaggatgttatctggatccattgaatacaactaaagttcccaccataactatattctcgctgaaaaaaagggactttatgtcactaacccgacataattgtttgagcatgcataacatgtcttcataattgttactacttttacatttcaatattatagtgtttacctttatttaagcactctcatgtcttccactaaaaaattcggttttattgtgataatgctactttcagcacattatctagttgtggagcccgcataatggagctttttaagtttttagcatcatctttgttcatgggatttacctttaccagaccatgatattcactgtttttgtttttgcatgtatataattatgcaaaaatacactatatatgtttgtaatttatgtccaacctataaataagtttttctatgattgcaatattatgatgaatgccttttggatgattcggtttacacatgtaatagcttataaaatataggtatatattaccagtctatacacacgtcctgtcatttttcagtgtaatatttctattcacaattgactcactcagaacacgtttcgtggtaaaaacaaaatgcaattatggaagataacatagccctttaacattttttaactttccctgttggtgattacagataattgctggtgatccagagtgtgtgacagagacttggatgagtaatgtatatagttttgggatgattatctgggaaatggtgaccggcgaggcagcctactcagcattttccccggttcaggcagccgtgggaatagctgcttgtggtcttagacctgacattccaaaggactgtccccaaatgctgaggtctttaatgtcaaagtgctggaacaattgcccatcaaaacgacctcagttttctgaaattctgtcaatattacttcgacccaacaataacaattgcaaataaatttctttggatctaatatgactgcttcttctgctattgatattgataatgcccccaagtaagtataggagttgttatatacatataaaatatatatgtatgcataaatgtaaatgcatatatgtatggttcttctttcatgtttctttctactccgagccaactctctggatggaaaaagctttatttgtattgcctttttcttttttaggttaaaaaatgtcttgaccatgcgcactataattggctgtgtgatggtacgagaatattcattataaagtatatagttttattcatattgtgctgtcatgaatgagtaagcatttcacattactttaaacaataaaaaagaatcattacgtattaattactcaattataatgattgaaaccattggaaaaaagaaaggttatcaaaacacaaagtaaaaaagtatgattggtaatgatataaatgataaacatagtaaaagagagagacgtctgatatctttgccaataaattacgcagaaaagttcggtgcctttgttttcttcttctgtttttattggaaaggaaaagaccaagacagttcaactatttatgacacgtttgagcttaaaagtatttaaatcagctctacaaatagagtgtctcttcttctttttctttatttttatttttaatgcagtacaccccaaattcgaagggaaaaaaaagaagaagaagaagaaaagtcaagagctttaatgagggtccatctaatagaatgcgacccaagatccaacaaacactaacaagaaaaggtgaaaaggcaaagaaattgtatattataatgtctggatgagaatatgataggaagcttataatggaccaaagctccctaaataagtggttcctttgtgtttgtgtagttgctatctaacaggagccaatagagggtccatcccaaataaactgttttaaaataacactgtcccaacaactggggattagtgtgtcattgtacttgatctggttctagtttttagttccatatggaagttatatggtaaatatagtttacctattctatgttacacatccaatcaatcataatcaagttatataaagaaataaattattgggggttgtgtaaaaacacatcctaggtttcaagttagtattatatatagtaattagtagacatgtacaataaaaacattacagaaacgtatgtacaaagcaacataaccaattctgtgattatagaggtggatgataatattgggatttacaaaggcaccatatgtcattatgtgtagtatttatatgctaatttgtttttggtgaagaatataacatgaacatggccttgaagatgaagttaattatttgttaagcagcctgtattttacgcaagtcgaggcatggattggcaccctctagtcatgggaacacatggatataatatattaacttatatgcatgtattgcatgtgagggctatatcaagtcaaactaattatctgaaactggaatcctctcctactcaccatcaacctgaccagttgactttgacatttgactctggcttaatattaggtttgactcctataatgatttaggaccatgatatattatttgctgatctcctaatacaatataatattctagattctttgtcttcataatttgtttggggtgttacgtgtatatatgtaaaaagaaaaatgttcattgagtcacacctatttccaaaatttgtgacatagtaagttgaaagtcaaatataaaggattttgtttttccaaatgtattacatgttacaatcaataataatgtatactagtacaaaatatattattaattatttagacacaatgcacactagaaaaattattattggtgattgcacaatgaaagagcacattttcttagtacatctttagagagaagtatatatcaaacctcttcataatttcagaaacttaagtatcaatacaccaatactcggatgactacatttagattagttcttcataaaaaatatttagatgagttaattatttactacaaagacttgatttcttcatttttaattttgatcatgtttttattataatataatataaatgaatgattttattaataaaacaaaaggtaacgcaatatgtagttagtaggaagaagttacatgttaaaaatatttagaacgtgttaaaatctctaaaaaaaaatactaattagattgactcattcaaataatcactctttatgttagttattagttaatttttttttctctaagagactcaaatctgttattaaattttgtcttaaataatatctaactaactataaaataattgttgtgaatcaatcaataacttacaatacaaatatactgaatcaataaacacacaatcaagaataatactattaaagaatcacaagaaccagataatgaattaataagcagtaaattaaggatattgttggctggaaccaaatacccaaataattgagtcatgtgcaatgctcgatctacttcttggttggaataatagcaatcatatctttgttgatattatttataaggttacaaaaatcttcacacactattaaagagattacaagatgaactttctctctctagtatgaactctctcattctaaccttacacaatcacgattttcactcaagtttttattggtctgatattctatggattacaaaggtaatagctatatatagatttgtatagttgctaaaacttgttctgattctatcgtgactaattaatgccactttaaagtctccaaggcaactccagcaacatattatatcagctttagtaacgcactttcagtacaaacattcagaagagtcaattcggacgagactatctggatgaatacaagcattctggatgagcatttaagactgacaacaagctatctagaagtacgtctccagactggtgacaagctatctggcaagacttttcttatggaggacaagttgtctgaaagaaccatccgaactggccacaactttctaaacaaagctttccggatggataccaagcttcctgtaacttttttctcgaataacaactagcttcccagatgacaaaacttgtaaccataaccaataaatctccaccttggtttcaagttaaagttgtgtgataaatcgttattttaaacactgctattccctagccccttctaggctcagctaactccaatcagcttcagacaatgatcttttcacctttcatcactatcaacgaacttttggtgatcctcaagtttccgtgtatggacttgtatctgtaaccatcatcttcaagcgcacccagggataagagatttcatcttaactccgaaatgtgccttacattcgtcaacaccttgattccactatcataatgtttgatggcaacctttttggttccaatgaccctgtataaatgatcattttccattagaaatttacctctgtcaattgatttataatcaaaaaatgattctcaacttggacacatgtgatacatgcatccgaagtcaagaatctataccctgttcattaaagatttcagatggagaataattctccatccgttgagcagtcatcattatctttttttgactgcagctgaattcttcatgtggtgatgatgttggttgtccttcctatctctattgtgagatttgttgaagccttattactccctgtacttcttgcaaaatctttgcaagtgttcggaccttccatagaggtaacactttcgagtttctatctatctgaacttcgatcttgatcgagagtgatggtgcttactctttgaacttactttcttgggtgatctccctcttgc

SEQ ID NO: 378668 - DNA, 1078 bp, Cannabis indica
aaaatttataaaaaaaaaaaaaaaatcctttccgaacaggcccttagcaatatttcaaaatagctaatattttgatcaaatttaaaaaatcagcttttaaaagaagattatgacttttaaaaaagataagtttagtagggatggggaaaactacttttgacacgagaacatgactaaaaaagcacatgatttctctaatttttttttttcctgaaaaaaagacacattttgagggttatggttaaaaaagttggaagattgaggtgcgggttaaaaatgggtcaaatccatttgatacgataattttttggatcgagttagactaaatgtgtgacacgaattgacctaagttcaatgtatgattgaaattatataatttatatttttcatagacaatgaatctaaattagagaaaatgttatttttttaaaaatacaccataatttctatttgataattatttaatttatttatttaaaatattatatatttttatgcagtgtataacggatctagtcgacgcgtaattgtaacaagttgacatgtgaatataataagtcggattaaagttgatattactagacacgaaatataagataggttaaagttaattgagtagatacattaatttgtaacgatacatgcgacgcaaatataatgacacgacatgaattgtcaacgctaatttttagatatgaaaccaaactatacacaagttatcaaccacatacctaaacgcccatgaaaaaaaaaacatatacctaaacgtatctttatatattgaactaaacaatatgtaccacatatataaaaataatattgtatactaaactaaaattgtaaaaccaatgtaaaaatattttttaaaaaattaaaattattattatttccttgaaattttacaaattatttttaatttactttcactcgttctaaatgtattgagtacttattttaaagtattgttattgggcaccaataataagggcacacccacataaaaacaagaataaaaaattgaaagaaaaaaatgtatatatattttagttagttacgacatatatttataataaaagat

SEQ ID NO: 378669 - DNA, 5782 bp, Cannabis indica
tttttaaatcaaatctttttttttccttatcatcatctgggtattctttatccgattaggtggaggaaagcaagttcttctttgaagctaaaacgattaaaagaatggagcttttggtgctgtcaactcttcaatggaagatgaatcctgtaaccccaatttcatttcttgatttcatcattcggagacttggcttaaaagatcatctctgctgggaattccttaaaagatgtgaaagcattgttctctctgtcataacaggtgagtcatattatccaaatctaaaaaatgttcatacatgaatgaatgaaataacatttcccagaacacaaaaataaataaataggattagtgatacattattcgttgaatttaaccttgggggcactcattactttgtagattctagattcaagtctttccttccatctataatggctactgctacaatgctgcatgtagttagtagtatagagccctgtcttcaagtcgagtacgaaaaacaactattggggattctcagaatcgacaaggtaatttcgttaactgttttaataaattttcccaatgccatgtaacgattttgatcgttttacatactgtaatcttttcctcattgaacaggacaaagcagagggttgttgtaagttcatattggagttggcacctccaatctgccgaggcaaccaatcgaacaagcgcaagtttggcttaattccaggtagcccaagcggcgtcatggatgcgttgtttagctctgacagctcgaacgactcctgggccttggcatcatcgtcggtgtcttcttcgccggcggggagactagccaagaagataagggcccagcaggatcaacataatgcagatcacccaaacattccacgctagttagctccacttttttcgtctccttttttcttattcctatgcacccgacgcaactttttttttttcacctagtttgaataatatatatgtgaaaatatgttctttatgtcttattagtttatacctatcttctctgtattttccaaccccaataaaaattttcagtcattgggttctcctttgatggaagatgggtttggacaattgggagcaaaggtggatgtggctttccttccttctgactaaaaacagtttagaaagtagtcctcctatccttgcatttaaaaaatacaaaaaagataaaccctatattattatttttttttttatcagcttttgccagattaaagatgttattctatgcttgcaatcgttagattttgagtaggaatgcagaaggctaaaaatcgtaccttgaatccataggaatcaataacaaaataatactcatttttactacttggatacactttataaataaaacatattggtacgttgattaacaatagagaaattggagatccattgaaaaagggtcatctctgtattgtggtagcatgtgctggggagaaagagattgtcggccattggaaattttgggattgtaatttatttatttatagatattgactagctcgttggaggagtacttaatacttttctactacattattatatcctgaattgtgatcataacagtgttactacgggagcaacctaaccagctagtgacactgacaccctctacattgtcgttattattatcattattattaattattattcgataagccgtccaaaaatgatttcacctcatgttgcttggaaattacggccagtcaccctgaaaaataatagagtattggaattatcaattatcacacaagtcacaagaaaaaagaaaagaatgtctaagacaacataatctaatttcaccatcatatcatgatgagttcctacttgtctaaataaattgcactagggagaaaaggattctttaggtatatattgaattttcggtctcacaaaatttatatatatatttatgtccacacttttggtgctgaatatattgaaaaagtcaataaatgctagacctcgagatagatcaataacgggtcgggctcctcgggatagattttttttaatgagagagttaggtcttcacatttaatatgcgccatgtaacgttcatgccttttcaagaaattagatgaaaaggattcttctctgagagaaaaatgactagtcaagcttatagtgatcacataataagtagaacattaataatttggaagttaagattcaagtcttcatgaaacactagtatattttagaaaataaatataaaataatagtgttcctttcccatagaaattaacttgaccgaacacgagtttgagcattcctatggagcactaatgtacttagcatcactatagagtggagtgcctagaccctcttctctagcaacaagtgttggaggacctcgccttgaggtgataagctaagtttcgtctagacgtacctcctcatcttgaagatggtgggaacgtctaggcatttttgtgatgattgtgcgtaaagaaacgacttgacttaagcgtatcgttcctacagatggtgccaaattattgacagtgaacattcatcaactaacttcttggctcgaaaatcaaagactgattttccaatctcttctcacatctgagagagagatatttataagacctagtggcctaaggtacatggtcgtcctaaagagacaaactgtcactttcaggctgcgaatcgcaggaggtgatcttgcacctcgtacccttgtttggtgccaggtgatctcgggtcacaagagtagtggctgtagagtcctagttgtcgggtatgcaggagtgatgcttccactactcatacctccttgctttcagagcttggaaatgcgtgattgtacacattttgcatgcacacattgttcttgtggctgtactcttgttaccttcatttcccatacttaggaaattttcacatagtatatttatgtctttgtgcaatggcagaagttactgagcgagcttcaaagctagcatgccgaatgaccctcaagccatgcatgccgagtgacttggcaaagtgcatgttgagtggcattttgggaagtgcatgtcgagtgaccctcaagccatgcatgccgagtgacttggcaaagtgcatgttagtggcattttgggaagtgcatgccgagtgaccttcaagtcatgcctgctgagtgacttggcaaagtgcatgccgtgatcttttgggaagtgcatgtcgagtgacctttaagccatgcatctcgggtgacttggcaaagtgcatgccgagtgacactcaagccatgcatgttgagtgacttagcaatgtgcatgccgagtgacactcaagccatgcatgttgagtgacttagcaatgtgcatgccgagtgacacttaaaccatgcatgccgagtgacactcaagccatgcatgttgagtgacttagcaatgtgcatgccgagtgacacttaaaccatgcatgccgagtgacttttgaaccattcatacgagtgacttttagtcatgcatgtcgagtgagctttcaacgcatgtatgctaatccatgcatgtcgagtgacttttagtcatgcatgttgagtgacattttggaaagtgcatgccaatgacactcgagccatgcatgttgaatgacttggaaatgtgcatgccgaatgacactcaagccatgcatgccaagtgacttccaaaccatgcatgtcgagtggcttttagtcatgcatgctgagaatgcttccaacccatgcatgccaagtgactttctaacatggcatgtcgagtgacttgcatggtggccatatcgtgggactcacatggtgaccatgttgtgggacccgcatactgacttccttcctaagcatgctatttgattctttgggtacgttcacgctaatatctcgattatcacttaactaatctcaaaagttagcattattaatttttgggaataacactttccctcacagtctaaaataatacgtagtgttcttgaggactagttactctagtgtagtcgacgaattgtgagtctctcccttggcacgcactttaagaaaacacttagtacatataggaggcccctccttctaacttcacttcacatctcctcccttggcctagtggtaaattccaagttctttccaagagatcccaggttcaaatctaactctagtctttctttcttttcttttttcttgttaatttcttaatttttttgggtcaagtgacatttgaagtcactcacggccgagtgactttgggtcactcaaggccgagtgacttttgtcactcttggccaagtgactttgggtcacttcaaggccgagtgacttttgtcacttttggatagtgactttgagtcactcaaggccgagtgacttttttcactcttggctaaatgacttttgtcactcttggctgggtcactttgagtcactcaaggacgagtgacttttgtcactcctggccgagtgacttttgtcactcttagccaagtgactttgtgtcacttcaaggccgagtgacttttgtcactcttggctgagtgacctttgaaaatgaccctggccaagtgactcttggagttgctctttggccgtggggcttttgacttgagtcgatcgagtgactcttagggccactctatggttgaaagacattcacaatcactcatggccgaatgactctaagtcatccaaggccgagggattgcatgctaaatagggttttggttgaatgaacttttgattctcctccacttttcattggaggcatttcgctctccgtctattgggctttgcaactcatcgattctccttcaacactttgaagtaagtatcccctttcttgttgaaattattggttgtttatttgtttcctacatatgatagtctcatctttcacgtagctagaaggttgactaacatattgcacccgtagaattttttcctccattttctttggttagaaaacttagtaaccttctttctacctcttaggtgagggtgtcatttgagtctacattgtttttgcaatgaatccaagaaaatacctcttggggctgactttgtgtatatctcatccttaaactttgaaattccatgagaggatccttgcgagagatatgttagataattatcgaagaggagtgattatcttggacacatcattagctgcaaggagcatttggaaagatttcggtctaaaatcatttggtcctaaatgtggaaagggtcgatcaaattgctgaccttgagttgtacttgtataggcttaggatgtcacagtcgaaattgagaccgagttgttgtatcttgagagtacctttcctttggaacctattcgttctctttcgcatgagtctaccttgcctgatggttgtgggacgaagtttgaccctccttcattcctttttgggttaccttgaactaagacttgagcttgtagggtttctgaaagaaatcaaagtgtgaggcccatgcttaccaacatttccttatgtctacaggtatgccttctaagaggagggtgatccttagcttgtccgtgccaatggacccattttctcatgccaatgtcgctagttttgctaccacaaatgaccttcatgatattagggctacctatagtatcccgcctgatgcctttttctatttgtcgatagccagtgatggggaaagggctactcatacagaggctggtagggtttctttcagtgaccaactattgtcatgtggcataactgttgaaattattttaccaggatctagatttactacaatgtatgttgtttaacatcctaa

SEQ ID NO: 378670 - DNA, 4039 bp, Cannabis indica
ttttttattttagtaccagcatatgttattttatttttatacaattttaagttttatttataatttaaaatcaacttatctaatttttaaatgtgtaggtattttaatttgagtagttttagtgtagcttaggtagtttagcatttaaaatgtaacaaatcataaagtttttgaatagtttagccaaagaatttaacacataccattaataacataacaaggcatcctctcatgcctaacctcttctcatcaaatcttaactacatacattgaaatagaagattcaaatatattatataaaaattttaaacaattatgttacaatgacatgttatgttagcaagtaaaacctcagtgtgattttacttatattataaatttatgattaaacttcataaccaggattcactctctgctgcacatctccataactctccaactcttctatgtcttctgggctgcccaaaaagagaggcagcctctggtgtagcttcactggctgaatcgagaggatccgatgcttaccatcggatcctctgcctctagcttgctccacaagaaagctaagagggtttgcttcgtatactaatcgaagatggtctctcgggttcattgcaattccaccgtataagagtgtcctatgtagatcggccactaaagaacagatgtaacgagccgagtacttcttagggtacttgcctttcccttgccttacagtgtctatgtattttcttaatccttcaggccagtcaaagtatcgagcatcgtttaccgaatatatttggcctgaagagtagaagatttgtcatgtctagcattcttattgataatcttctcacaaaatgaaaaggaaatattttggcaaacaaatagccttatttttacttgtttggaatccaggattatgataatgatagttttaactacttcttttgataatatacaaaatattatcatactgagcaacttaaatgcctagatgagtcctaatatatcaaaatgatccctgaaatttacaaattcttaatttttattcaagttttatttgtacaataaataaagtttcacattttttgaaattataactttcaacttcttctatcgtctatatcacatcatatcgctattgatagaattaagtatcgatcaactctcattaatttaataattattattaaatatcggtagtcatttacaaggcatcacctcatagtgatgtggtgctaggtgttatgtgcctaacaacaatgttctttgataatgtacaaaatattatcataccgaactagaagcaacttaaatgcccagaagaatcctaatatatcaaatgatacctaaaatttggatcttcttaatttttattcaagttttttctgtacaagaactaaagtttcacatctttaaggtctccaacatcttatcttacagatgattcatgagagaaaatgtttgaacaacacactgtaattgtgttagtattagtagttacttacaccaagacttagacattctaaatgaaccacaacccatcaagtactaaatgataatttcgataagtagaacagttttacagcaaagttttattagaataaataacagcaattttaactttttattactcaagtcatttggagcagattgcaaataatcttatagtcactgacttaataggttttattactcaatggatataattgtttcttccctttagatttatcatttggttgaaataactgcataaaacttctcaaaaaattcatacatagaattcagcacactatgtttgtttagataagtagaaaaagaataaaagggttacctcgaggaggaattttaatgctaggatgtgtaagaatgaaatctccagttgaatgatccagtgtgaatgcatgagttccagaaccgaaactggtgcagaatattgtggcagacgaatagagaacatagccggaagccactagtctacttccactttgaagagaattcagcatagccttttcctccctgggaatatgatccagttccacaaggcgtttatagatcccaaagatggttccggtgggaatggaggcgtcgatgtttcgagaaccatctagaggatctgttaccaccacaaatggtccatcatcacttatccaaatgggagcatcatcttcttcagaagccatgactgcaactttcccagattttctaagcgatgacagaatgatttcattctgtgaacaaagagaatcaagtaaggaaaaccaatctaagatgttcaagatggaataaaaaagtgtcactacgcatcacagctcagactaaatattattctgtttacatgtatattaggcatttggttaggtagtgagttagttgaggttagttatctgtactggtttagtaaatcctctaaagatcaactactttaactaactcggccacaacagaaagttagtaaaagactgttatttgtaaagacttgatttagaccgaaaatgagagctagtgagagagagtgaagttctttgataagaactttggggtgaactcggggtttggggaagtgaattgagattgttcgtcctaggagtgagtaatgtgagattcaagtgttctgtgccattggtgatcacacaagttctgattgttcatagtggatttcaatatgatgatgctcagttggaatatggccagggattgaattgatcctaaggactggaacaggaaaaaattcttgcgttgttcttttgtaaatttctgttcttaatttcttgctgattcaaattagtttaaactttattacttttgtttttgatttatttgttagatgaatcagtttcaagtagaattatcacttcgatcaaaatggtatacttacaatttcaaaagaacccaaatcgataacaattgaaggtcccgagttgtttgagccaattttgcaagagagaatctataatcaatttcattaaattcgaactcaccgaaacgatatcgagcggcttcggcgcgtctctgtcggagccaccggctggagccgccggcgcgttgagggtggcggcgagactagaattgaaaggagaagcgacaagagctgcaattctcttacaagcgtattggatatggtgaattagtagaaccagatcatctccagcatcgattcctcccttgcccacatactcaatcagagtagaaaccccattttcagaggcagaagaagagaccgcttttggtggtaatggaagtgaaagagaggacattagtgttgttgttgttgttggggtgtaaggtggtgatgttggtcgcagtgaaaagaggttctttggttggaaaattcgaggtttgagatggaaaaacagagatggggatgaagatgatgatgatgatgatgatgttagctttgtgtgggtgtgcatatgcataatgtatagaaggtgaccactgaccagagtagtgtgataaagttagtgttttttttttctcttttgctaaagaagtgatttattgttgattccagttttggataagagcatgtattagcaaaacataaaagaatgttatattattggtgataaagagcatttttaatggtaaaaattgaaaggatgagatagagttattagtaatgatacaattttaaaaatttagatgaatgttataataaggtatatattaaataataatgtgttagattataattataatatttttgaagagtgatatatgattggagtgtttatagaagtaagggtgtcaaaaatgtgcatgttgtcatagctataaataaaggaagaacctttctcaacgagctgggtgtgctacttgaggatgtcatagctttattgtctaaactcccgagagcagttttgtcccatgtggctcgggatgcgaattctgtagcacatgatttggcaaaacatgctcttcggttagacaatgagctattctcgttcgaggagatgccgccgccgattgtggattgctgctttgttaatcatgtgtgatttggatcaccgcgtcaaaaaaaaatgtgcatgatgtgtaaatttttagtatt

SEQ ID NO: 378671 - DNA, 2141 bp, Cannabis indica
tatttttagtttgattggttagataatgccatatttagtggtatttactttttatgccatatttatcataaccttaataatttttcccatatttttgaaaatagcccataataaaatacgaaaaactaattttcaaataaaacaaccaactaaaaaaaatgaaataaagacgtaacaaaatagcaaaaaaaaaaaaactgaaacacaaaattcatttacttaaaaaaataagacataccacacagattaatttttaacaaatgatttacaaaattgaattataaaaaataattatatttgttagctaattaaaaatctaacacagacaaactagttacgtaaagcaaccaaattaaaaactaacatacaaaaattagttacaggaaataactaaacaaaaaatcaactgagaaacaataaaaaatacacctatattataaataaataaataaataacaattactatcgtgcagtcataaatattgagaaactagttgctaacaggaaaaaaacataaaaaaatattacatatagtataaaaactaagtgttgatgcttaaaattggctcaacaacaaatttgtatttccactttgaattctttacactacgactatctcaatcgaaaagtacaacttcgcgttattacataattactccaagattaacaatggctctctctccttcatggatcgatgctttcgagctaaagcgtgttttggagatgattcaacaggatttagaccaggctagtatggtcaagaatccgtccccttttctaaatgttagtgttatccgtgttttcgacagtagacacgtgaaatccaagtcaacaaccaaatcccatcaatgggtccctcaacgaagataaagtgggccaagcccatttggacaagtccttccaggaacgtatcccagctttgcgaccataaaaccttccgctcttggcaaactgttcccagaagcaagtccggtaccatgagactggagggacgagacagcatattcccaaaacactcttctgatttccttttttattcctgcgcacaaatacagaaataacagatgctacatcttgaccaagcatcgtaacagatttaatggggaaacttcctaaaatgaatatcaagcaattaattcacagttaattttccacaatcaaagcacacagtgtagaccaaatcaaggcaaatttgatctgcctagtcaacaaatcttctccttcgtgggctggacttcacgaggcagcccaagtgagttagtcactgtaaactccccaatagagggaaaaagaaaactaaatgtaattctcaaactcctataaatacccgtcgaattctatggattaagggttgaattctcttgcaaactttgctcaggaaaacttgagaacatatattctttgtattcctaaaggatttttcaagctaagaactattgaatatcgttgactcgtggactaaggctaattaacaccccaaccacgtaaaaaactgtttgtcttttctcttgctcttcaattttaattatttgtttcttcagttattatcgtttgtattccgtttccaaaaatctcagtaaacattttggtgttttcattgaaagctgaaggaagcagtgagaccacttatagattacgtctaagtaatcttggtcctcacccgaacaaattttggtcttcgtttcaccaaagcaggggactccaatgatccatatgaggcgactatccgttatataggtcaccaagatgaagatcaaaatcgagacaatcctattatcgaagatacaaaatctggagaaaataattctgaggacactgaagataacacctaggacgcacccgaggatatgcatgaagatgatcctcaggacaaagctgctaatgatgacattggagaatgaaccaacttgacgaatcaaactccgtggtcatcatggctatataacttcaactggcagaaagtaggttaactcgataagatgaattcaacgagttactactcacaaagatgaccataatggaggtcgtgatgactgctttgactaagatagcccctaacgcacaagcttctccaatgactaatgcccctgagaaagcaaatccaaaagatcttagtgttggattttattttaccaggatct

SEQ ID NO: 378672 - DNA, 1675 bp, Cannabis indica
cccatatatcttaaaccaccattaacacccatgtattacctcaatcagattctttagaaccctctcttatctgggatttctttgttatcaagttgtttttttttttttggctttcttgtatgggtcttggtttctctttgtttttcaattcgggcccagatgggtcgatgggttcgcaatcaaagcctggtcttggggacttgcccgagagctgtgtcgcttcgattatgggatatttggaaccctctgagatttgtcaattggcgaagctgaatcgggtttttcgtggagcttctatggcggattttgtttgggaatcgaaattgccttcaaattatcggattcttgtcgaaaaagtattgggggattccatgggaaatttggggaaacgagagatttacgcgaggctttgtcggcctaatacttatgatgatggtaccaaggtgtgttctgattttcatattcttctctgctgtttatttaccgagaaaacccaaaacccccaaaaaaaatcagttttcgtttttggttagaaaatgaaaataataatcatggaaaccctcttctttttcatttctttagtaaaaatctcgtgtttggctgatgagtaaacatggtagaaaatgagaaattctcaggtttggatctcaaatttctaattctttcatatgggattagaaatacttctatggttatgtcttctagaagattaatttctttttttgcttcgagtccataggaaaacttaataggaagaaggtgcatagaactgtgaactctaaatttaattctttagtagttttagaaagaccattgactaagtcattggaagaagtagaaggtattgaattggaacaaagatggtattggtagactagtctcttatctcttatcatgttttctcggtgaccaaacagaatttcatgctttgaataattcaggccatttagaaagactattgactaagccatttgtgttgcttgcagaaagtttggttggacaaaaccacaggtggagtttgcttgtctgttgcttcaaaaggattatccatcaccggaattgatgatcgaagatattggaactacattccaacagaagaatctaggtaaaaatcgagtatcattttttattgtttgtttgttttccatgttattttttctctcttattgtcttactttatgttgtgaggtttcattgaaacgggaatgtttgtatcagtattatcatgtatattatcgatggatgaggaaagttcaagttttacggggatttccttgctcgaattttctgaagtatgtttttttggttaccctttttgtaaaatctctattctgtggtttttgatttttaaatgaattgactttttatttgcaatgaaagtttgtggttattgcattttttaaaatcgcttttagattttgtttgtttatatgctgtcttatgtcttctaatctgaaaagcaaagctacagattagattttgtaaaaaaagagatgctttgttttctgtttctgtccaaaaagaaaaatcaaaatcacttactagaaaaatagaagtgtaaattatatttatgtttgtctgaaactacttagagtcagaaaaatcgacactctcctcacaaaagggaggtcctaagttcgaatcccctctcttcaatatcaaaaaaaaaaaaaaa

SEQ ID NO: 378673 - DNA, 5448 bp, Cannabis indica
attttttatttttgaaattaaagttgttctacattttatacaaagttttaggtaataaatattagcatattatttttattttttattaaaaaataatatttttattatatattttaaattatttattattaaaaccaaaattataattatttaaaacttatacaatttttttatattttaataaaataaaataataggttcaaacaaaaaatcgagaaaattatattgtatacctactttattttatttattttaattttggtctctatttttatattctttaaggtatacctacttttataaatgatgtccctattaatccttaggttaatgtaaattatatgctagacttaagtagagagtgatggtatattgagcaacccactcacaaaagtaagtatgtttcaataaaatataacatgagggtattttcgattaatagatatatgtttcaataaaatataacatgagggtattttcgattaatagatacaaaaaaacgtatttttgaacttatccctaaaaaattgggtataaaacggtattaaaaagttaaaaaaaataataatataaaaaatggtatatatgtaaatgaattgactatcaatctattgggctttcatttctaaattgttccttaagagcccatttggtgccgaaagggttttgaccatatcctctgctgtccaagaaagacaccctataaaacacaaggctcatcgtttcacccaaaaaccctacgtctcggccgttgctgcaggtgcctccattaacatcccttctctctttcgtatgctctctcgataaagatcgactggatctgcacctaatatcatacataactataatttctttttatcttttgcgattgttttattgatttcactcttcacttgattttgttaggttgaaattttaaaggcggagttttgagcaatggcgcctaaaggtactcattttgctctcctcatttctaattcgaaacgggtcttgtgatttttatcaattttacgagctaatatttatacatgtgcttttttactgagtgtctgttgttgtaggagttggtttttctttattgagtttactatctgtctgttttattagtttttattacctaatggttcgatttgatgctcctacatactgatgttaacaactaggattatagggattggacttgatttgggtttatatttgggcgtattattttttattaattggtgaagatatatgagctgggttatattttatgccttctttctattggaaatttggaacatatattatttaatgagcttttatctgagttcagatttaaaaaaattacttaatacacttctttaagcgtgataatagtgttctaaactttagtgaagtaattttcctcgttgtagagttaaagaattgtctgtggatatggtgttctctcaattggtgtattgtttcgtggctttcttagtattaattaccattgatgattattttatgattgtggttaggcatttgggctttctatgttggtgcacggtagacataggtttgaatatcttataaaaactacgacaacccccacattaaaatcatgttgtgatttcctttatgcttttccttagtatctcatatttccattttctacaggtgatgtcacgaagaagtctgaccctaaggctcaggccgctaagactgctaaggcagtgaagtcaggtccagcattcaagaagaaggcaaagaagatccggacgtccgtcacattccatcgcccaaggacatttaagaaggaaaggaacccaaagtacccccgtatcagtgcaacaccaagaaacaagttggaccactaccagatccttaagtatccattgaccaccgagtctgcaatgaagaagattgaggataacaacacccttgttttcattgttgacattcgtgctgacaagaagaagatcaaggatgcagtgaagaagatgtacgacattcagaccaagaaagtcaacactttgatcaggtaattgctgattccatgaaaattgtttttgagagttagcttcaattttacctgtctctgattgttaacttctattgaatgttattttgtaggcccgatggaacgaagaaggcatacgttaggttgacacctgattatgatgctttagatgttgccaacaagattggaatcatctaatctaaatagtgtagcctctgtttgttttgagcgagttattcttttcttactgtcacagttttgttaggaggaatgcaccatgttagaactcctattttgttttggtttccattaatatgtatctggaaattattctgttttcaactttgccagttcaatatggattaggatttatatatcatgcttatcgtttttacttttacctcagttttcagtttaagttcttggaattttcctaaaattagatgatttctttagtatcaaaaggagctgtttcaacgagatatctagttaaagatgcttctcccacaaattatacataaaagaattggaagagaaataattgtttggtgtatttttgttgtgtgacatgttctacatttttgttctcaatgcaaattataacttataacaaatacatagttcataacccttcatatataatttagcaaaggcgaaaatgctttcctttacctttatatttcatctacaatggggaagaagaaaaagaacaagcagagtaaaaaggtgaagggacagatcagaaaaattaaaatttgctgttcacaattcaaaactccgttcttccttttttggatttggaagaagtggtcaaactcaaacccatattaaacatttgagatcttgaaagaatcgatcacagtatgcaatttgtctttcatcttctcccacctcctttcattggccccagtcgttaaagtgtagaatttacctacatttcacattgtctcacttagaatgagaaaattttaagtagcaaatttaacaacttgagaatatgtggaagggaacaacacaagcattgtaaaatgatatttcatatgaatgctctatatctgcaattgcactttcatacataccattggcgatagagattgtgctgagagcatggcgagtatagtttggagctttcgcaatgaactcgaaagtgtaatatgccttcccatcaacgtcttgctgcaacattgaaatataaactataaggaaccacctgaaaatgtgaactaacatgtaattaaactaaaaccgacagaatatgaaggcatggagaaagtgtatgagatgtacaaacaaacagaggaagattgataataatcatattacaatatattgcactagtccaaagaatatcatggatgtattaatttctaatgtaaatgacgagcacaagtgtgatttcttagtaagacaagcatattaaagaatcacatacctcttttgcctcaattagctttgttttctggttgggaggagcaagaacctttttaattaaagtttctgcaacctgtcatttattcagccatgagtgacgatatcattaaaactgacagttgaggagctttgtcagcaaaaacaaaaatagatcaaggagctatagcatcaaaaattataatcatttcacaatcctcaatatactagcgtgcaattttttataaatcatatacaaacctgttcaggaggcccaaagtctcgaatgtcctgcttgcttgttggaagtaaatttacactaacattttctaaaggctcaatgacatctttaaataccttgtcttgaccatctataattacttcctgcccattcccaaacataaagttaggctagatcaaccatattatagctcaccaagagataaggaattcatttcatgctcacctgccacccaaatggatataggaaagtgtatccgtctttcttgtctgtgacaggcagaaatccctttttattttctgcagcaactgagccacatcaagggtgtcttcttaggatatcagtcaatagaatttaaggaaacaaaaagcaaggctaaatagtattgagtcaaatggtgtgataaataagatctggaaaccaaaaagagtaagtaacaccattctataagcatgtgctattaccaaaaatcaagtagcattacttacatacagagttttgattaaccagtgaaacccaagaagcgaaaatgcctgctgcaataatatggcgtctcccaggtctatctgccaaagacataacaaaagttagaacaaatggagctgaagtttccatagcacattatcaccattagtaaatgaatgtcaatgtcactgtatcatcagtatacttagaatataattgaattatttcttaaatagaagagatggctcaaaaagctctctttggataagacattcctacaagaatcatgggcaacttcatcatttgctagttcataatggcagagtgcagtgaaatctttataaaatttgatagttctaaagcactattggtcttattcttaaactaaacatgtagcttcaccaagttgttggattaatgcacattcttactaccactgaatccttaaataaaacaaaacttcagagataacccttctgccaaaaaaagcagtttctaaattcaaatggttcacaagaagtttagttgatcaatggggcaacatacattagcaatcaattgtgtactaattaaaggagagtaaagttcaattataccaataatcaaagggaatttcaattagtatttaactgaataccaaaattacaaagtaataaacacaaaacaaaattggttgacttctataatgttcaatcgtctaaaccttccactaaaacgttaaagaaccggcttgcagaacaatcaaattatcaaagtaaagcaatgtaatttaatgaatccaaaaaaaaaggtgaataatgaccttgagaagaagacacagtcaaagatgaaggtgcttgctgggccctgacgagaagtgaaaaccgccttctgcagcaagaaaaagcaccgttgtgcttctgcaactgagcccaacaaattttagaacacaaaccattaatgacattaagaaagaaagagaagagaaataaagaagaaaaggtgaagatgaagatgtaagaacctgaggaaaagagttgagaaagagggtgtaattgattgagggggagttttggagggaggccataggtgcagcgtcactagacacaactcgtggtgactcagtgagtagtgtgaaggtgagagaaggaaggtgaccttatcttttgatgaaaatcttcttatttggactgctgatgtgttaatttcttcgacactcgtttataggtttgttagtttggttttctagagggaccctactgccctatcacatgtttggttggtcccacactttttaaacccctacctcacctcaaatacttaaagatattgacggtaaaattatttgaattatacgatttgtaacacttaa

SEQ ID NO: 378674 - DNA, 6421 bp, Cannabis indica
tttttttttcttcccaggtgtttgattgctggtttgagagtgggtccatgccttatgcttatatccactatccatttgagaatgttgaactctttgagaaaaactttccagggcattttgtagctgaaggcctagatcagactcgtggatggttggttttcattcgtgttgatattatagtactttactgttgaaagagttcttatgataatccttccaatgtcaatgctgtggaatctatgtattcttttctttttgcgtttttatttctagtttattattagtattccaatgccacccttcgcttgtacaaattgtgatacaattacaacgctgccttctgatttttctttttttttttaaaaaaaaacccctacactagttaatttgactggaacttttagtaacaaggggctattcctgttttgcaataaattgtttatattaagagaactggaatggaggatagtgaaagataccatcaataataaacgttgaaagtacatcaatgtcattgattttatagactcaaccaggggtgcctgtgtcagtctattttttgttcagggatgtcaagacccttctctttttcctgatggaaataatacgtagtacttttttatttcttaaaagaacatgcatgttcaatttttctacctttactttacaggttctacactctcatggtgttgtctactgcattatttggcaagcctgcttttaggaatctcatttgcaatggtcttgttttggctgaggatggaaaaaagatgagtaaaagtttaaagaactatccatccccagtagatgttatcgatgattatggggctgtaagtccatttaagtatattaattattacaagttctttattaaaatgtatgtttatgttttatgtattcatttaactcttctactttatgcacttcactaaattttaattttgaatggcttattatgacaaaatggtctttatcctgctggttcatttgcaggatgcattacgtttataccttataaactcgccagttgtacgtgcagagccgttgcgtttcaagaaggaaggagtttatggcgttgtgagtgttttctcttttcatttccatttagatgctccccttagcttgtgtcttatattttattgtgttcaaaattgttgtagccatccttctttaaatttagttatccacaggtactttccattcagcgaaaaaaaagaaattcacaaggattttcttctcatatcttgttatcctctttccaggttaaggatgtgttccttccttggtacaatgcatataggttccttgttcaaaatgctaaaaggcttgaggtcgaggggtctacattatttgtacccgttgctcaggctacacttgaaaaatcatctaatgttcttgaccaatggattaactcagctactcagagtctagtacattttgttcgacaagagatggatgcctatcgactttacacggttagttctctattgtttgagtggatactaattcctttttactagtaattttgtgcagtcccttgctgttgtttgttaccaccgctttcctccaccatactttgggaggatgtcacttatggacacgtgacctttgtctctttttctaaaaaaaaaaagtaatttttccaagtcaggaacaatttgtttgcttgatttgtcaagtgtcacacacttaaaagtaaacagaggatgctacgactgctaaattgctaaatcatcactttgaatccattttcctatgtatcccaaggaggaattttattcctcctttttaaggtttatattattagatggttgctgcacactgattttgacatattttgctgagaaaatacagaagaagcaataattttgttcataatttgggtcatatttttgctgagaccaatacatttccctacttttttccaagtttccaatattagctgatattgaaagttaattattaattaccttgtttgaccctttctataaaaagattaaaattagtttgacaagtgactagtactatttcaggtggttccatatcttttgaagtttctggacaaccttacaaatatttatgtgagattcaatcgcaagagactgaaaggccgtactggagaagaagattgtaggactgcactctctacactttacaatgtatgacatcaaaattgggaaacagatttttatcattatttctgccctattattattataataatcaaaaagtttctttattactttgagcatggttgttatatgttgggtcataaattttgcactattttgctactgtgtacatttgggttttgtttttgcacctctcaatacattattttattctctgcatgcatcatgctttggttttgttttaggtgttactttttagagatgcagtgttcatgcttgctctttcgtatctcaatcagtatatcatttgtgataatggaaatgattttctgctgcaagaccttatgttttcttagtgccttggtgactcaagagcaaaacgttatagtttactaagagagggtaatatcaaatgttcaagtttggggattgctcctttttgttggtgtttggtcccttgtagtaaccttcctaacaactttatgagtttcctgcctgctgcttcttaaatgttgtagggttgaactgagatctagttttaaaggagttctcaaagagtgaaatagggcatttttttcttcaatgttaataagcaagaaaaatagaaggctaaaacttcatagctgtgcctgtttatttttgctactagttatgtaattcatcgtattgaagtggcatctttgtatggaatttagattataacattttgtatgtttttttatatgctttcaggtccttttagtgtcatgtaaagtgatggctccatttacaccattcttcactgaggttctttatcaaaatatgcaaaaggtttctaatgatacggaggaaagcattcatcattgtagttttcctcaagcagaaggaaaggtattgagctaatgttattaatgcaaaaatatttcaaacaaacattaatgtgctcttattgttatctttattaatcttttggttaacttgatttaattaccgatttataatattgaaaaccttttctgcattccttggagcaattattcccaaatgttggagctatatgctacattctaaatcaatgacaagatttagatactagacagctcagtattttatatttattatagttaatgagaacaaacttttggtggcttctaatttttcattttactttgattctcttccatcattatttgaaattttttatgtcattgtagagggatgaacgaattgaacaaagtgtggcaaggatgatgactattattgatctggctcgtaacattcgtgagcgtcataacaaaccccttaaaacaccactgaggtgcagctttgttgccttgtcttttcatttatgtgtctcaactctttgcacgccttacattcttctcgtttcatataatctttttactttaatatttattctgatatcttaccaagaaaatgttatttattgaataactccagggagatggttatagtacatccagatgcagactttcttgatgatattgctggaaagcttcaagaggtaggtcaataatggttcaaggccaatcaagctttatgtatctttttatatctcactctcagcatccataaaatccataggctcagttttattttcttttctcttcttttcattaaatatctttcctctctttccatatttgtctttcctcttttcttttgttcttttgtcactattggtcattcttatcttatttgattaatgttttgtccaagtattaatcttttttttctgtaacaatctacagcgataataatcaatataaaaatcaacaaaatctgcaacaattgatttgtttgtttagagtattactcattttatttttataatttcattatcaaaattgaattttaattaaatcaatatatagtttgtaaccacggttttatgtatgtttcgaggacagatgataaaacatagtttgtaatcacgattttcctccgccataagtgaggctcccaaatgaagtttgggaggaattcagtttaagacaagtggcctgtgtctttttttttcttctttttttatatataaaaaaacaatctaaaaaggtaattatgaaataatctttttatgaaaagtaacaactaacaaaaagagacaaatttactttcttttaataataaatcatataacaaatgaaaactcatttttttgatattttttaataaacgggtaggtgcccaaggcacgtatccgatcacaagtgtgtgtatatatgtatattatgtatttgtgcccaaggcacctacccgatcactagtgtgtatttaaatatatgtaattatgtatttgtgccaccggatttccttagtctaagcaaaagtttttctttacataatgatgttaatagattggcggaatgctgtgtttcttgttttttgtgcttttgctttagtggaagtttctcccctcaactgtgaaattttagaacagtttcaaggggaagaattgataaattcccatgagttttgtatccttcaaagttattggtttctactttctgatttaactgaactttttttgtttttgtttttgaagtttaggcacatcattgtttcaataatggcttaaattttgtttgttttcagtatgtgctagaagaactcaatgtgcgttcccttgtcccatgtaatgacactttgaagtatgcttccttgcgagctgaacctgattttaggtaagtaaactatttcttcaaggaggactatattttatacgcgatgcttatgttaaattgtactggttatttgttcctagtgttttaggaaagcggcttggaaaatccatgggaactgttgccaaggaaatcaaagcaatgtcacaggagaatattttagttttcgagaaggatggagaagttactgttgctggacactctctaaaactttcggatattaaggtcctaattttctgttgctaataaacattaggtctttccaagttttgtttccccttgtgggtatttgatagtcttgctagcttcttgcactgttgcacatctattttgtcgggctagtaagtttaagtacatgttcttttacattcttgtttttctttcatacatttaaatcgggaaatggtgataaatcatctttgttgacggtacttaggatgtaagagtggtggttgtcttttcacctcaaagttggaaaacaattttagccaaaatagatatcaatgcattcatgaaggctcgtgaaggagtattaaatgatgtatattttgcaggttgttagggattttagacgtccagatggtaagacagaagaagaggttgatgcagcaggggatggtatgggttttgctatttgtcattgaatgttctctacctgtatctgtaccttatggttttattttgttccttgttccaggggatgtgttggtaattttggatttgtgcccagatcaatcattgtttgaggctggtgttgctcgtgaggtagtaattgaaacatattatatgtgacttacatgtacacagcaaaaaagaataaaaaaaattatatgcgatttacatgtccatattgtatccttgtatagttcttcatttttctccttcttggggaagtggtttctttgtctacttgatttatagttgactaagttaactgatttcttgtaaacttttacggttagaaatgttcattttctgattgattggtgcttttcctttgttctttgttcaatctagattgttaatagaattcagaagttacgtaaaaaagttgcacttgaacctactgacattgtggaggtctactttgaatcgttggatcaagataaatcaatctctgaacgagttttgcactcacaggtagtagtttatttcctttttatccatgggtatgccctcatttctgcttgttcatgatatttgtagaataatgagcacatcgttgtggttttttccatttgtacatgtagatatcatttacaccagtataacttaataaatatattgccctagtatttaactatgtattttttacttgcaggaactttacataagggatgcaattggttctcctttgcttctctccaatttgatgccaccgcatgctgtaagttgtagtcaaggggatgctcaaattggttctactaaactagagttttttcaggactttttttttcttcaaccatattgcatttaaagaaaactctagtgatacagtagattattaaactaccattttaaagccaatttgtaagacaagcattttttggggagtataatggtgcaggcgaatatcagtgatttcaaattacgaaaaaaaaagaaaaa

SEQ ID NO: 378675 - DNA, 3287 bp, Cannabis indica
aaaaaaaaaaaaactactcagttcttacctttctgagttttctcgcttcgtgtttgtctaacgtaggaaaatcatttgcattgcaaagacttagttttgtcattcttctccagacatcaattccctcgcaaaacggcatcaatttcttcatccagaaatgggttggttttcactttccgagacgcttaactccatcaagtccatccagatcagacaaaccatctctcaggtcatcactctaggtctgtaaattccaaatccaaaatccaaactttcattttgggtctaatcgtaacagtcaaattgcagatacccttttgttagaaatgggcttttttccttgtttgaacatgattttgcccatttttaggcttgattgtgtcgtcggcattgttaatctggaaagggttaatgtgtatcactggcagtgaatctcctgtggttgttgttctctctgaaagtatggaacctggttttgcaagggtgagttccttttacttgttaaaccatttgcttttttctaattaattgcacccaaaagattgaatcttattttgggggattcgagctaaagataatccaagcattgtaagcttggtttagtttttgatgaataatgaaagtttataattggtgtcttttgccacttcaaggattgggccttatgaaaacctgtatgcaagggggtaaaataagtttgatgattttgtagttcaacattctaactatctcaccgctatagttgcaatcttaagtgaagaagctaactattagactttaattaggactatgtaggttgaagcacctcattgtttcagtataactatctttgatgtttgtttcagtaggcagaaaatgatttctcatactttttggtttggtgtggtgaggaacatgacacattttaattcctatgcagggtgacattctatttttaagtatgagcaaagatcccattcgcgcaggagaaattgttgtctttaatatagatgtaagttgttgtttaagctattttatacactgacttgattcttgcactcatcacttcattctgaattgtttaaaatgttttattgaacttgacaactttcttttatctcaactctggaagctcatacttttcattctttaaggtgatctgttttctataattatttaccccttgaaaggtcagcttcctctgtgtacaatgaacctttcattatagagataggattgctctccatttagctataaaagtcagctttaataaatcataatgacttggatgtacttcattaagttaaaccaacaagatatttttgtgaagatgtttgagagatttgttaggggtcatttccatttaatctgcatcttgatttataatggcctatgtctgtttaatttgtatgtttgctaatatattattttcttcatgttttgtagggacgtcctattccaattgttcatcgagtaattaaggtaagaattctgagggtcttccgtcccagttttcgtttcagtccaattctttatgaatgatgtatccagtcctcaagtctgtaagcttcttctcaataatgtatagactctcttaacttaatgagtatgtgagctttttgtaaagtgtagaccaataaaatttgagcaataggagagttacggagttttatagacaccgttaaattgtttagtaggaaagcatacaattctaataatctatggttctaatatctacttagctttttacctatgcaattctgcacgcctcatcttcatctccatagcctgtatgtgataatttagtaatattgcattattctgccaagattggtatgaagtctactaaaatacaaaagatatctcaaaataggactcttgttaactatgcagtatttactgtttcaatgtatttttttcagtaaacatatcttccacctgccaaccatgttgttagccttaacaactaatcaaatgacttaattatcttctttggcaggttcatgaacgaacggacactggtgaagttaatgtccttacaaaaggtattgtctcttccatctctacctactcgtgtatcattgggggcatcttaattctggttagaataatgcattaaatgtacaacaacaaatggtaaaatatatgtagttgttcaggatagcataaaacttacagctcataacaaggctgtggagttagatatttgaaatctctatattttttatttggtagatctttctgtgatcataaatttctcttgttttggaaattattcaacagtgacaattcaattttctttggtatcctcgtctcatgtgtggtaatttttccaggagacaataacttggtagatgacaggatgttgtatgcccggggtcagaaatggttgcaaaggcaccatatcatggggagagcagttgggtaagcccctaaatgtttggtgtaacattcttatcatctgatgtatagacgtagatatatacatttgtctgtgtgcaagatgcattattatattgatagatttttaataaaattaaagtttaatacatcatagaaaaaagacatcaaatcgtttatactaaccattaagtgatagatttaggtgctgaattccacatgtatacttttgaaggatcacaccatcaacagagaccttcattagatagtttattttataagagcattgtcattgagcaacagtggtgtctagtaccttatatcaaattatatgagattcgatatttaattgcatcaatagcgatatgatagtgctaaaacttattgtgagttttaacttctcgtctcgatgcataacatcaattacaattggcaggtttttaccttatgttggctggatgacaataattatgacagaaaaacctatactcaaggtaagtttttaataaatctggcgacttattttttcattttttcacactcaattctcaatagtacttagttgaagctcgcaattgtcacttattttgttttattgtattgttgtcgttgttgcagtacataattatgggcgctcttggattgttggtcattacctcgaaggattaggaatacttcctcctttattggagtagttaaagaggctaccagataaatgttgtactagcttacaattttttatgaacttaagaaagaaaagaaatagaatttgggacttaaaattcttgtaacaaggaacttgccaaccgcaaggaatgtcaattaatatttaaatacatttacggaaatttctatccaagtagttgaagttcttataatcttcttaaaaaaattaagggaaatggcat

SEQ ID NO: 378676 - DNA, 1348 bp, Cannabis indica
caagaactatggtaaatttatacatccaaatattttgtttacacataatagaaaagcatattatttacaatacattaaataggacatgtttgaaacataaatttatgcagatggatacgtggcaagaacaaggcagtcaaaatccaaaagtgaaattattgatgtaacataaataaagacaatgacaaattccagggataaatggaaaatatgatcaacccggtcgtagtaataaaaaaagggcaatatctaaagtataaaataagacaatgaaatgatagagaaagctaacacgaacacaaacttgcagaaaaattaaaattggtgtgaaggagggaatgtactttttaattatatatattaattacatatgtatatgaatctgaataatgtataatcatggtgaaaaaacgcatcacacaaatccacattttagttattattgtgaaagaaaaacggttcagttaaacaaatttatttggtgtagaaggcgtctatcctcttcaacatgttatttctcgttaaaaaatagaacaagcaatttgcatataggatatatattgtaatttatcaacaccaagattataacaaaaaacgtcataacataaagcaaaagcaattaaaataaatgaaggttctatacttattgatcaatataacagtctccaagatttggtgtatttagttcaacatctttaataataaagtaatactaaagatagattttacacatgttattcaattataaccaggaccccattatttaaaattaattagacaattgtgattgtgcataagaaatgtgcctaacttggctgtgtcaaaatgtatagcatataagattagtttcatgttgatactgaaaaaatagatgaatacattccaatatatacataaaatccaaaagaacaacagtattgcaacctattttgtgattaaattttgaaacaagtacaagctagattctaagtaccaaagccttataacaagcatagcaactaacaacttattacaatccaaataatggcaattaaagccataaaaacataactagacaaatattgtaagtttaacctcttggttttttctcttttcacactaaaagtaccaaattagttaaagaacaataacagtgattaatttcagtcaattaagctcacggaattcttcatatggatctatatcccagagagctaaacgtaaagctacaacacaattgcttcgaagttctacccttgcaccaaaatacagatgcaaacaataaagcaagagacaagaaaacaagaacaaaacaaaccaagcaaaaccaaaaggagaaacactagaaatagaaaaaaaaaaagaaaaa

SEQ ID NO: 378677 - DNA, 1357 bp, Cannabis indica
atctatgaataaatcaagtttatcagccacaggcattccatctctgaggaaacttgacatcaaatgcccagttaaaatgttacacgcgttctacatctcagcttaagtattttgtatatatttgtatatataggtcatatatatacctggtttacagcatcaacaactgctcccatgacgatcacttacgctatctgcacaaaccaaaccaaaataaataaatacataaatattactaagaaacactaactaaaatattcaaacatgaaacatgggctttgcatgacagatcaaatcctcatataatgcactttctaacatgcaccatcaaattttcacagttctacagaagtttaaccagatccacaaaattataccaaacacagaacagttcaagttcatcaagaacccatctttttccacagatctaacaaatattaaataaaaaaaaaaagctccaaaaacatataatcacataaaatctcgatccgcggagctcaaactgcagccttatctataactctttacccgaaatctcagatcacggataaaactcaacccgaacgatatcaaacgcacaatcactataaagatcaagccaaaatggcggcaaaacaaaaacaatgaacaaaagaaaaattcaaaatctcaaattcgtgaagtttccctccattttgttttcccgggaaccaaatagaattgtaataataaacatactcgaaaaatcaagagatgcgaattgaaatcagagcagagatctaaagaaatgtcagattagaaacgaatttacctgtcaaaagaggaggagagagagagagggtgtgcgtgtgtttggggttggagtggaagcgttgtttttggttagagagagaaagtgaggatctcgctccacgttcttatatagcggtggtttcaaaccaacggaagttacagacttttaaaagacgagactgcccaagctccattattataatatattacatatatttggtcggtaggggtagtttcggtattttatttgctgcgtctctttgcgtaagtacaacggctggatcgcctagagtgaagcagaaacaaagagaatttcttttttttttttttaatataataacaatacattttattgttgaaaatcaaacaatacattagttattaagtaaagagaaaaaattttctaaccaagaaacttttttttttcatggtgcttttttttttttcatagtgcataatcttaccatgttctgcgttattactattttacattatatgttgaagacatacacccggaaaaataaataacaaggacctagggccagtttagcacagctgtgctgtggggaaaagcagctgtagctgt

SEQ ID NO: 378678 - DNA, 3166 bp, Cannabis indica
caagaggaggaaatttctctttgtgattcccatctatctttttagtattgaatgcgatgttccttcaaaaaaaaaaaaacatttgcctagtaaaatgaggtgaaacgacatcgtttcaaaggaaagacagactagacttcttgttgatattcctcactcaaaagcagaaccggtgaacgagccaaaatgggtttagcatcggcgctttacactcctctcttgggcctccatagcgcctctctcctcggcggcgaccacctcctatcgagccagctccgccgcattccgccgggacatctgattattgggcctaatcctcaccgtcgctccatatccacactcactctcgctcgtcgtagaaaccgtaattctacgcccgccacatcttcttctctaacgaaaaagaacaacaaggtctttctccccttttttatctaatggaaaattcaaatttaagtttattaattatttttatttaatcttttgaatattttttccattgtagaaaaaattgggtagaaatgtggatgaggatgagatagatgaagatgccattgaagcactcttcgctcagctagaagaagacctcaagaaggcggacccttctttgtttgaaggtgaagacgacgacgaggagattagcgaagaagaccttgctaagcttgacgaagaacttgctcgggtttttgatatgacagatgacgatttagatgttgatgaagatgacgaagacgaagatgaggacgaagaagaagaagaagaagaacccgtgaagcttaggaattggcaacttcggagactggcttcagctttaaaaattggccgccggaaaaccaacgtacgtctttgattttgttctttaaatacagaaccttttggcagtgatcatgagcgtgacacgcatatttcacacactcatacgaatacaatagctgtggagtttttagttttatcttcatacatacagatttattttcccctgcaaaagctttatccgagtgaatagttgtgtgtgaaaaatttatactgaaatgtttttcagatgatcttagttgttcaattatcttaggaatcatctttcatgtgcaacattttcaatttcacttttgaatatagttcaagttagcatttttcaacaatactcacagcaataaacaagattaagccagctcacaacattgttgcatacggctacttgatcacttcactgctaattttggtgctttgttctttctacatctaagattactagcttttgacttactattcttaggctgctagtgctatttagtaattctcaatgtctagatggctgatgggattgtaaacattatgcagatcaaaagtcttgcggctgagctttgtctagacagagctgttgttcttgaaatgcttcgtgaaccccctcctagtctcttgatgatggctgctactttacctgatgacgaacctacaggtccgataataacagtaactgacatgaagaccatagaagaagctgttgtggaggaaactcccaaactggagacttctgcgaaagtgcctgttcatgtcaaacagcaaagattgtcctctcaaaagcgaataaagaaagtggacattcaaacccttgaaaatgtttacagaagatcaaaacgaccaactgtaagtgatagttcctttttttttcgtagtgattttaccacgttataataaatctcaggcagcgtactgtgtattctctttattgtctagttgaaccacctaaatggtgagtaactatgcgttacatatttacaaaatcattggagttggatgaattacagcatttctgatagctaagctaaaaatcatcttcaactgagaactgttttccctatatgtgttgataaactatgcagaacacgatgattgacagcattgtgcatgtgacaaacctgccccgtaaaagaattgtgaaatggtttgaggataagcgagctgaagaaggggttcccgggcagagacttccatatcaacgctctgctcctgatacagttcagtaaagctatatacataaagcctttagttgtttactttactggtactgacattaagaagtagaagtcttcctttctttctttgttgttcatgtcatatagatttgtaaaagtatatatgatggttttctttctatagcctatccttgtccacaatattactccagctttagttttttggagtctattactctatttgttctgatagtattgatcacttgtctaggaaccaaaaaaaatcttgtaaagttcgagtgtttctgttttaaaaaatgaagaacgtaaacgtggatcactcaacacttcattagttagaacactttcatagtttcatatctttcgtagacaccaacacttcattttttcattgtaaaaaagaaaaatatacacttcattttcatataaggatattcctgcttctttctatgtttacctttactcactgcatgagagtatgagatagtgtttttgctttgagaccatacaggatttttgggccttaatggactcactcagcttaatgactcagctttagacatctagaagtagatattgttcctctagttgcgaaaacagaggattcctgggattatgaatgaaagaggattttcatgagctttgtgatattcttatttggatcattgaactgagtgtaataagaatcgaagagggtggttgttgaaattattggccctttatatgcatattttgagtctaaaataaattgtttgatgtgtcttggatgagtaagatgatcagattaggggtgagcaaaaaattcaagaaaccgaccagaccgagtacaccgaccgtccgaacactgaaaactaaaaaacgtctccggttaaaacctcctttgcacggtcggttttagtgtcaatgacaaaccgatcgattaaatcgagaaccgaccgaacgtatatatattatacactatacatatataatataattatttttgtacatatttaatatacaattttattaaaatagttttactttttatttttttttatttaaagtctcaattctccattactttgttttattataatttgatgtatttatatattacatacacatattcataaagtaatatgaattttttaatataactcattatcatactagtagcacaaataatttga

SEQ ID NO: 378679 - DNA, 5409 bp, Cannabis indica
ttggtaagcatgtccactatctggcagtatgttctgttctccgttctttatatttgtttattatgaaaaacattactcaaatacatttgttttggtcaaatttacttctgttgacttgtaatgttgttaatgagttctctcatgggtcaggaatagtaaatgaacaattttgtatgcttaagattattttattaatatgccacgttttattagagtggcctaaaaatgttttctgtagtattgaaaccgaatattctcctgatatcttatagcctcttattttattctctctctacgtttaatgatttacctctccatcttactttatacacctacaaccgaattccctgagctagaacgtatctcttcatgtcttgtagaatctaatattgtcatcatcgtgatagtttcacttggcaattcttctggctttactgagtatttaattaattatgtcactttgacattggcatcaggtcttggatttgtaacttccataacattcatcttcttggttggggtgttcatgtcatcatggttgggtgcttcggtcctaaatcttggggagtggtttatcaaacggatgccttttgttcgtcatatctacaatgcttccaagcagattagttctgccatatccccaggtctgctacatattactataacttgttattttaattaaactaacaaagtgaggtacgctggctggaatgcagtctacataataaatggcttcacaatttcagatcaaaatacacaagctttcaaggaggttgctatcattagacatccacgtatcggtgaatatgcatttggattcatcacttcatctgttgttctgcaggtttgtttatcatttttgtgttttctggaactataatcatatctagactacctttagttgaatatattcccttatggtggtgattacattttttttgcttatgattttttacattgtcttaataattccttgatttcaatttttaagcaaacaagatcatatgcatacagacttcttaccaatgtacttgattgtaagcttgcactacatactaccaaatcaccaattcttaggcttaatttgcttttcatttaagtgttcttttgaggtcagtgtttcatatgtgaaacttgcttcagctctgtaaagtaattgcattaattccttgaatatgtttgattagccaggtttaacttttgccacctagagtgtacttctttttcttctgaaaataaagactactttacgtcctactttctgtctagtgtaaagagttgggcatgccattttatttcttaatgatgtgttagaaattgaggttgtgatttgtgagaatgaatattggtgcctaacaagttttaatagattacatggattcatttatttgaatattaccaattagtaatcacttgagtttttttctgatgcagaattattccggagaggaggagctatgctgtgtttatgtgccgaccaaccatttatacattggtgatatattcctcgtgaacgccaacgatgttataaggccaaatttatcagttagagaaggaattggtcagtactttgattttaatatttttattatatctagactgtttgaggataaataatgattatctctttataactgataaaattagaattgcacattatctattcttactacgatacatacctttccggatctcagttttaggactctctaatgcccataccctcattagatgccttattcttaatagtgtgtacaaaacatcttccttaatatactatcagtttccagttatttttgattgttacttctgctgctgcataaagcacaggagttaagtatgacctcaaaagtgaacaaaatcttggtttaccattaattaaaacaacgttcacagagattctcccttgtgtttttctcaaatgcagaaattgtcgtttccggaggcatgtcgatgccccagatgctgtcaactgttgatcaacagatttcaccagctgatagaagtagtagacctaacagaagctgagtgaagacgttagctgtagcagatatgtttgcttatatatctcttgggtttctttcattgagtcctcagaaaggcctggcaaccaatttgttgtttgtgctaatttgatttgatcagattgtcaaatttttggttgttgtaatgtattctgatgacacctgtaacatcgtttgtcatgttagtgtagaaatattttcttggaaatatagttttgttgatgatactggattgtaataggcaattccatttcaaaattctattgtttaatatttatttatttttgctggatctgattcttttaggcaaaagtcattttgtagtatttgtacatgtgaacttctcagtacgtttattagggacgataaagaactggttgtgtagtacctgtactagtagtagtgtgattattctatacttgtaaggtgactttctgttcgactttggtggaaatacttttattatggcaaatgcccaggaacccttactcacaaaaaacaaacaaaatagtgattattcaccatacaaaggaaccaaaaaaagaagaggaactctttttcattgaagtcagaaaataacagtaccgagaattcatagatgagctggtttgtataggaggtaaaataggaaagaaaaatacgtttcataccaatgttcacttcccataatgtcttactaagtttcataaatatattcaatgaagattagctagagactcagatattcatcggaggggtatagtgagccttttatgatgatgattatgatgctttccagctttaaagtaagcatacttttaaacatgttacaaataaattaaatgaatcctttgcattattattgttcctcagtaggtacacataaaatatgtaattatcccgattcccaaatgggtatttttttttagtatgggtgaaaatcaacctccccagctaaaaaatggtgaaattttccatcaacttcaattatgctacttccagcagtcttaacaacgcctgaactattcatcatacttctccatttattagcttcttcccatttaccacaagatgcatataagttagagatcatcatgtattccccatcactcaactgattattacgaccatcattattagccttgtcaaagattaaatttatcactttctccccagtgtgaaggtcctgatgaatcacacaagaactaagcaaagcacccaatatggaatctcccggtttaaacggcatcgtttcaataatccgaaaggctctgtcaagaaatttagccctgcttaaaagatcaacaatgcatccataatgctctatctttggagtgattttgaaatccctttccatacactcaaacaactcacatccctcttctaccaaacctgcatggctacatgcacttaacaagccaataaaagtaatatcatccggcttcatagaattctctctcatttcgtcgaacaatttcaaagccgcttcaccataaccatggagagcaagtccagagatcatggcattccaacaataaacatccttatgttcaaatttatagaacacttctaaggagttctgtatgctaccacacttggcatacatatctatcagtgcagtcacaacatgaggagtaaagaactgcccatgttttctcgcatagaagtctatttgagtgcctttatcaaggaatctcaaatgggcacaagcggataaagcagccgtcactgataagtgatccggttcagaattattaccacttctcatttcgtcgaacaaatcaatagcttcagaatagagttgattttgtacataaccagtaatcattgtattccatgtgataacatttctcagcggggactcctcaaacaacgcattcgcttcagccatatgtccagcaataacaaacgcagatatcaccgagttccacgaaacaacatctctaacaggcattttatcgaacacttgtctagcagactcaacttgtttcaagcctgcaaacccagctaggattatattataggaagaaacatctttaacaggcattgaatcaaacagatccaatgcaatacccatctggccattagaggcatacccatcaatcatggagttccaagctactaaatctctctgagacaatttatcaaacacattacgtgcatcttcaacaagtccaacagtaaagtaggcgttgaggagagccgtttggacgaaagcgtgatgggagtagccagctttaatggcctgggcatggagtccaaacacaaaaggagcatgggagacagtggccgctgccttgagaagaatggggaacgtaaaattatcaggaaaaagaccaagtttttgcatgtgggtatatgaccgaatagcctgccatggattccccttcgccacttgtctctttattaatttgttccaatgacttattgctgggtctccgtttggagaaggtgagatgcaaaagagattacacgtgaaaacagccatatcaatgtaaagaaacactttttcattaattggatgtgctgtggattttaaattattaaattacatttgatcatttccttttatagaataataataaactgagatatatattttttttttgagaaaatatatatatttttgaaactataataaagtggtatgtaaaatgtaaaaatataaataataacaaataaagacagccaatatctaaatctttattttacattttgttatagttaaaaaaagtgcgtatgtgttctttttttttttttttttctttattggttcaaatatataattttaaacaataaaatttgtatttagaagagtcacacacaaacatacaatgatctcccataaaaaaattattaattatctaactttctaattttctttttgaggaaactaactttataaaattaaggttgcaaattattcaaaaataaatagctaattaggatttattttaggaaatttgacttgaactaaattatacctctaattttttaatttgttaaaaatatttcttaaactgtattaagaatgttgaattgaaggacttttatgatgttttgttccatttcaatttcattaacggaaagtgctattggactctgcacaatataaaaaatagattactatatgatcatttctcataaattaagcaatgagttgtcctataaactttaacttattcaatacataaaatttcaacaaaattaaagacacacaaataccctgaagactatatatccacatgtacggctatctcatatgggaaattgtcatgtgatttgccgtttaatgaaatagaaaagaataagacaaaaatttgaaataataatatgttttaaagaagaattaagtaatatgttatgatgagaatcatggggttccatctcaaaatcaattggtgat

SEQ ID NO: 378680 - DNA, 5449 bp, Cannabis indica
attcaacccgcccaatatacagattgggcggtttagaattttgtcaagttatgtcggtttgtattttttttcggttttgtgggtttagtttagtcgggttattcgggttgggcggtttacgaaaatttctgtacagccctaattgttattgctcatttttcaaaggttagttagattcattattttaaaagcatggtagttttatttatttgatttttaaaaaataatagaaaattatttgaccaataaaaaccctaaaactgtatcttcctccatagatctcaaagttccaagaatggcccagagctccgacgattgtgaagtctgagtgggttatagccgaattgaagcatttgaagtttctactcagagttcattttgcatttcatgaggtaggtaaggcattcgaacaattttcagttttctttcttctattgattccgttttggattgtgatcaccaagtcaaactcaaaaaaaaataaaaaattcgaacgatatgtttgatatgatgtccagtctcttgcgacaacttcaattggcataatgagctccatacagattctgattgtgcttagaattgaaccaaacacacacacacatatatatatatatgtatgtatgtatgttttgtatttagctgtagtctttttgatatggatttgcatttttgtctttagcattagtctctttgttcttgcaaataaaatataggaggataagaaacgcgaaaaattgcgaactagttttttttttccccgcaaagtaattgcgaacatagcttgttgaagatgattattttgactgaaaaagtttgagttagaagaagctctgtttctttttccttcctcaaattgaaaaaattgacaaaaatagccagtgcatttgtcttcttactaaatatttagtgtcatttacgacttaaaatctttgcttatggaaatgctagtgaagttgttgttacaatccaaatctgagtccctaattttgttttatttttgcctaaaaaaacaaaactagaatgccacttttttttatttgcttttaaaaacaaaaaaactgtgaaccgcgctgtccttttcttcttccctatcgttattcctatctttgtcgtcggtgctcagtgcccaccagtgtatgcggcttccatttttttttgtcgagagcaaattttttgttttgtgggtgttttgattgtttattctttgttttgatttatatcatctgcagttataaatttgcttctttgatttggttaggggtagagatctagatatttgattaggattgtgggatgtctgaaagatatggctgtgctttgattgagacctttgagttttcacattagttaagctgtcttttaggattggctcaacttgtataattgatggcatcaaattattgcaatttttaggtgatttattgacattagaaaccaaaacctttagcgtatgttcctacttacataccctttggttattgttgccttatgtggctttgtttgatgatctcatggacctgctcttgtgcttttgagtggctatcatttcagttacttatttagtagtagtgcactggtaagaggtaatagagcatcctttagttaccgagacttgaccattaggctgtgggtggattgtctctaaccttattttgaaggatctgtctaattataggattatttagcagtctgatagtctcgtttctctttttggtttgatgttgcttaaactcattccataaattttctttgagtgagaaaaatttgacttaccctatcattgcctcttctatgaagagctggatagatacaaatacaattagtctcttttatgtttcattatgtgttctcagcctgtaacccttttacgttttccaacaagaattttatgtcatgaaaatggtgtatcctttaatttgttgtaatagtaaataagaattgctatgaaaagaaattgtttttgcattgacctcactgatcacaatttatttattttttctttgttttgcttccagattggcaaccaatcgcagttttagttctataattttcaggtttaatagacggacaacacaagataatgtttttaaacatattttctcatactaaattcagtttcttaattcagattcacccttcggagatagatttttttaatgcaaaccaatcagtccctattccatcataaattaggagttactttcatgattttagttacttgatgtgaaacaatgtgtgctgcttcacagaatcacaagacatatatatgagtatgaacttttcttgtttattattatgatttttttcttggcatgaaattgcatttatattgttgcaggatctcattattaatattattctaaaacttttttttcccttttcttttaatttttggaaaaaacttgtgatttcttatcacaaattttttcatctctgcaacttaagtgttatgtaaaattatcaaccaattatttgtgattgcaaaattatcaaccaattgtatgtgatttgtgatttttttgcatcttccaaatttttagcagagatagatgctgccacgtagggaccatggaacgaataaacttgcttaccttccttggttactgcttatcctttcatcacatcttagcttattatccattgttgttgtacatctggatttataaactttcttcatctttcttcatttcggatttgttgttttattaaaatttacttgtactttgatatgaatttaaaaaaccttagtcatgttgcataatgaattatttgggattttgttttaattatcatgcgacaacaacattgcttttgaacttattgcagattagagaagttttatatggttgatgagttaggaatagtaagttttgactttattaattcttatattatttgatggatttgtgatttgacagtgtcgtaccaactcaagtagttatatgtgtgtagatttttctatatgctagttttattaatactgtgtaatcagaaagagcttgaaccaggtttgtatttttgttaatttttatattaacaaccaatctcaatttcaattcttaaaattaaaaaaatcataaataatgggggcaggcaaccacatttttaaaatcacttattcaattgctaaatccacatttttaatggaaagtaatttttcaatcacgaaccagtcaagagaaagcattgtagaagattttgttttagtttctgtattctttaaaggtattttattatttcctttacatatattaaatattcgtatgtgtcctgtatcttgtgctttcttctattcttgaatgatattgtctttaatagagatgagtaattgatatatgtatcttcttaacaggttccatcaacatatgtaagtttcacgcttcaataattgtgaagtttctaattaaatcactttgttggtggaaactgagcctttgggaagtcatttcatagtagtagttggtggaaacgaagattgagggagagagagtgagagaacaaattcacttttgtttagacaattggtgatgtagatatataaatgatcaccataagtgtagtatgaagaggataaagtttccaaagcgttactggattgttattttgaccttcatctgcacgtctgtttgctatattgaacgtgtgggcttctcaattgcatataccgttgcagctgatgctgcgggagtaaatcaatctagcaaaggcaaaatactttctacattctattatggatatgcctgttcacaggtgcctggaggttgggcagcccaaaaaatcgggggaaggaaggttcttcttttctcatttgtattatggtcgatgacatgtgcattagttccactagaccccaatttagtgggaaccttggtgattgcgcgactgcttgttggtgtggcacaagggtttatcttcccttccattcacacagttctggcacaatgggttccacctcatgaaagatccaggtctgtttctctcacaacctctggcatgtatcttggggcagctgcaggaatgcttttccttccaagccttgtcaaatttagaggtccccaatcggtttttcttgctgaggcagcattaggtggtatgtggtctatgctttggttcgcatatgccagtgacccacctcgttctgaacatcctaaagccacagctgctggatttggggaatctttgttaccaattaaaggaagccaaaagttgaaagtggagaatggaggaaattccgctagaaattccaagatcccatggaagagaattatccttagcttgccagtttgggcaattgtggtaaataatttcaccttccactatgccttatatgttttgatgaattggctgcccacatactttgaattaggtctcaaacttagccttcaagagatgggttcttccaagatgatgccttatctcaacatgtttttattctctaatattggtggtatgttagcagaccactttgtcactaagagaatcttgtccgtgaccaacacccgaaaattcttgaataccataggctttgtagttgcttctcttgctttgatggcgattcctatgtttagaacgtctaatggagctgtactatgttcttccgtggcgcttggtttcttagctctcgggagagctggttttgctgtgaatcacatggacattgcgccaagatatgcaggtatagtgatgggagtttcaaatactgctggaacattagctggaattattggagttgatttaagtggcaagctattggaagcagccaaaagtatcgattcagatctttcgagtccggaaagttggagaatggtgttttttataccagggttactctgcattctaagttctgttgtgttcgtactattctctacaggggaaagggtttttgactgagcttaagtatgttacatgcaaagcctctcacttttgaaaggtgattttatcactttgggttattgatataacttaaagtaatcggcataaaagttggtggctataaaagagaattcttcattctttgatacattttgctgcattattttgtatctcacaataccaagggtttgtaggatttggaacatgtaatattctttcgttttttcttttgttgaaatgttaagcttgtaatttaattatttgaccacactgaaaataaaaggtctcaacatagtaggactctagttgtatgattaccaagacctctgtttagtggaccataatcacattttataattacccatgcttttatagtccacattttcatggcatatgtgacttgatattgtgctgaacaatactattgtttaattgaataatgtaaggttttgatggtatataacatatgatataatttaggtaaaaaaatatgaatgcatctttttctttctatattatgaaagctgtaaaaactttatgcagaaatcaaaggaaaaatatcgaaggagtggcttga

SEQ ID NO: 378681 - DNA, 3408 bp, Cannabis indica
ttggctgacaaaaataaatcaaaatcaaacaattagaactcgatgcatcccggggcagtggaatcccaacaaagttaatttattgttagtagaatacagcaacctacttggatatctaaattcaacaacctaatcaatttttatttttatttttttaaaaaaatggccttgaaatgattaatgctcgctccacatctaacaaattatcaatagaacacaacttagctaaattatgattatatttcttgctaatacttaaaacttcactaaattctgtcacctaaactaacacaccattaaagtttacttgattttgagtattcaaattcaacaagctaatcaattcaaaaacattgtcctttcagaaatgagtaatgctccatatctaacaaatcataattaaaacacaacttagctgatttaacaattgtataacttattaatgcttaatattattcctcacaagtaaaaagtaatgctccattagaattacttttttcaatataaattatgattatataattcgatcatattctcaacaaaattactaacaatactaatctaggaaaaactactactcacaagcgtagaaaccacaggagttccagctggtgcagccggcttcggaggaacaggcggcgcttcaggaacatttccggaaacaacagcagcttcacattcagcatcacacaatcccaacttcttaaaaggtccgctatgagtttcgctagctcgaactacaaatctacggctagtcttggatttaatcgctacagaatcaaaacttctcacactaaccaccaaaggtcgaagaccgacgtagctttgacaatccaaacccttgattgctccaacactggtaggcacattaagtatcgccgtcgacgacgccattaattaaccggtaattaagctttaatttcgttgtggtttgattttttgagtgtttggatgacgagaaagtgaaaaggaaaatggagaaagttagttttagagagagaaagaagagagagaagtgattatgtttatgggattgaaaggagtaaggagataggaagaagccaatcggagaagatgacagacctgtttggatcggattccattgggtcccaccacttcagctaaccaacgacgactctttcaaatacgatgtcgttttaacgatgaatgacatgtcgttttatgttttgttggagagaaggaagggtcggattcttgggtcccaccacttcagctaactaacgactcgttcaactatgatgtcgtatgagaaaaaacgacatcttttttaacaataaacgacatgtcgttttatctgttttgttggagagaaggaagggtcggattctattgggtcccaccacttcagctaaccaacgactcgttcaaatatgatgtcgtatggaaaaaaacgacataatttaaagataaacgacatgtcgtttatctgttttgttggagagaaggaaggatcggattctactgggtgcctgtgccaccgcttcagctaaccgacgactcattcaaatatgatgtcgtatggataaaacgacatcttttttaacgtttaataacatgtcgttttacctatttttggaaaaagtgtgtagtgtaaatgtatcaccatttttagttttatcatttagaaaaaagaattttgatggactaggattcattttttttacagattttttttaattatatatttacgaaatatcatgaaaataacacaaatataaaagcaacatgaacaaaattaaatttgtgaaaatgttaaaatactataaattcgtattttttataatatctattggatattttaaagatgaactacacgtggttttagtatagtgtaaaagtaccaccatcttgaagtttatcaattaaaaaataggattttgatggggtatgattcctctttttatttttttaattgtatttttacatcaaaataatagaaatataaaagcaatatgaaaataatgttatataatattttctaatgaaataaaagaaaattaaatttgtaaaaatattaaaaatactatagatctgcattttttttttgtaataatgtgactttatatatataaaatgtccatttattaaacaaacttaaacttgattatcattacaaaatagattgataagtatgaaagaaacatccaaacaaccataatgatggtaagaaaatagcaaaatgtccactttgctacagtatgagccaaaaaattacatgttctactagtacttgaaatgaacaatcaataaagattaaagaagttcttttataatgactagaataattattaatctctcatctaaactccaaaccattgagagaattgataattactttataatcgcttttcacaatgacaaacttacttcccttaaccatcgtcatatccagaaccaaacagcaagcagttgtctcgccagaaaatgagtcataaaaatctaaacggtcagtagtcactcaagctacctctccatgatggtctttaacaatgaacgcaatatacatatatactctccatccccactcgagtgtcacagtttagtttaagccaatatcgagaagattgacgccacccatccaaagaactcagaatcaaaggaggaacaaggaaagttatgtgatctacataacaataactaatggagtcattgtaatattttatgttatacatattattattattatgtgtctcattctaaactcgtcatacagtgtccataacaatagatacatacaaaaaaaaactacatcaatattgatacctctacttttaagacccagataaagttgacctaatcccatatagagtaaaacaagataaatatcacaaagataagatctatacaaatggtaagctaaattacatcaagataatttgttatatttatagtacacttagtaattatcaagttttaatctcagggttttaataattagataaatattatgtttagtgtgatttatcaaaaaaaaatgtgtgtatttattcaactttacgtgatttatagcaaaaaatttaattttaaactttatattatatttattagaccgaattaggtgaatctaattggaaattgacaacataatttctttgccaaaaaaattataagcatatactaaagtataaactttgacttttgtataatggcaattggtaggtagctgtcgtttggttatatataatatattagataattattggacaaataatatagagaaatagacccattagacacattacattacatgatccataatatgtgttaatgagttttgtttgatagaaccaaaatatttatgtagaaattgagaaactatttgttttaaaacttttatttgtggtagtacttatatatttaattctttaattttattaatatatattt

SEQ ID NO: 378682 - DNA, 2999 bp, Cannabis indica
tgaccattttgttttcatcatccgaaatatgatagccagactcatccccaccatagcgaatgaaagtgtatttcttagatttaggatcaaggttattcctgccttgatcactaattttcccataagctacacaactgaaaacttttagatgtgataggtttatcacttttccactccatacctgtactcaaatggacttgatgggccttgattaatcaagctgatgtgttgattgctttggtaaacctaattgtatactttactttggctgcttctggaataacgagtgaccttcgaatccaacatgattctttccagcgtgctttgttctcacttgcacgttttctaaaaaacttcttaggtcactcgtcataagatttctctaggtcaatcatcatttaactttggagttcttaagtgattggctaacgaaaggaagatgcattttgttgtcatagatagtacctatcaatctatttaagccttattcaactacgtagtcttacacctacacaatcttaaaatcatcacatttgaccttccctaaaaaatgtgcgattgcacaacttaccggtcattacccttacagatcacggaactctaaatctcatactatgagactaaataattttaatttaagaaatgtgcctacaatcattagctcctcatatacacgaagttcttacacattgtaataaagaagagtaacgactaaggatctagaagatgaatattttctatttttcactaaaatcatatttgaagttgttagtctttgagaatactctttcccccttcataaagctttataatgagggctttcaaataataggataaaataagcctatgaattttaagagtgcttcgaagcacaaggtaactttctaagttttcactttcatgagatacaattcaaattcaactttcgagattgaaattagctattcaggctagacaagataattgacaaattaattctgattcctttcaagggccacttatttctcaataggataagtctaaggtttatttgaattgggacttacaaggtagaaggagcatgttcaacagagcaagtatgttggagtgttttgaaggcagttgaagacacataccttaattctcctttttgtttctttaattactccatctttgttttatgagtcaggatgttctagcggtaatttatgttcataacttagaccttttatagtatcagtccaaaagaaaaaaaaaagcaatatgccatatgcaaaatgcaagttaccctaggcgattttttatgtgtgttgatggcacctttacttttgcaaagccaatttgagtgagattagggtggtccaagattttatttagaaataatgtgattggtcgagacagactatcaatgtcaggagatctattgtggtcttctcttcgaatagaaagttgaatgtaaagaaagagatgtttttgttgggtttttgaaagcttggcatgtaggataagttcttcaaaaatccacttttgttgtctattaatcaggttcgggattttgagttcattacggaatgcatcttgaagaggttggaagagtgaaaaagtaaattgtaatctctagattgtagaagaaccttgtttaaatcgattctcttctaaatttatttgtactatggctaccttcatactactcagggcatgtgattcgatttgggatgcttaaagcaagagctatatccggtctggtgctcaccaatacatatattaggcatcctaaaactattgcataaggtacatccttcatttcctctttctcttccgcactagtaggacactgttccttccttgttggctttgatacttttgatcaccgattggtctttactcattataagcatattgtccagatagagcaataagaacacaactgtagattgctctagattcttgtatataaacagtgatcatatgcggattgtttgaacccaatttgttgcatataagtatcaaaccttttattctattgtcttggagactgttttaaaccatatatgcacctgtgaagcttacataccaattcaactcctttcctttccatctgaaacccaagtggttgcttcatgtagaaatcttcatataagaatccattcagaaaggcaattttgacattaagttgttcaacttcaaactccatttgtgttgcaaaagacaacatcaatttgtcttgtactttaccacaaatgagaagatttcaatataggcagctctttccaccttagtaaagacattagtcactaacctggctttgaaccgtactggttcattctcattgattttctctttcaccttgagagtcaattttcatttcataatcgttttgttctccgatttcggtaaaacaacccaagtctggttcttttagagtgaatctatctttatccatggccttaagccattttgacttgtttccacctaaaattgcctcttcgtagcttctgcgctcttcaatttcaatatgttgaaccactgccagtacaaatgcaatcaagtctgcctcagcgaacctttttggaaggtgaatctctcttttggttttatcccgtgccaactaataactttttagacctttctgtacggatccttcttgaacatctgtttggttttcattatctttcggttcaacaccagcttttgtgtgtgcaatatcttctggttccaccatagcttctggtttctggaattttctgcatcatacggagaaacactacctttctcgattgtcaagaggggaaattccaactcattaaagaccacattcttactattattacctttggtttccccttcttggagatacatattctgtaacccttggcaccgaagacataacctaaggaagtttccttaactgatctaggttccattttgtcaatagattggtgtacatatgttgtgtgagagtcagtagtcccgtgatccgtaaggggaaacactgggtaagctgtgcaatcccacaccgc

SEQ ID NO: 378683 - DNA, 2792 bp, Cannabis indica
tttttcccgattttttttttcaaagggggcgactgccccgcctcggttatatgtgggtccgtccctgatcatatcttatccgcccctatacagatagtgaccaataccatgtctactctgatacagttcaagattagtgagcaaaaaaatagccaacagatctggaataaatttttggatccgtcactaattatatatacaccacatgtctttaacttagtatatataattatattagtgcatgatttaaaggctttaaattaaagcataatcaatttttatttaatttatactttatcttaccaaccgaccaatcgatggctgtactcaacttgtgagcatcccaaaatattttttttttcaaagggctgcccaactttaataatctgtgcacattgtatgttttcactcaaataatataagagaaatgcttagggtattttaatatggggttatatatatataaatatattatcaaaacttttatatattttgattataaataatatgaaaactgttaattaattatggagcgttgcattagtgtatattaacaggtgattaataggaatgctcataaagataatctcaattaataaataaataatagaaacaaaagaaaaagaaataacctactccatatattcttatatgccaacccatttttatggccaacttgagtgacagacatcacacactagaaaaaggaaaatagaaaaaagctttttctcacgtttgttgatttatttgctgtggtgtggatatatatagaaatcagaatactaaatatatatgtatttttttaagaattaaataatgtaatttttcataataataataatgtgagtgcatgacaatggttatatatttgttggtatgtttagtcatttaatataagatatgctttttagcaattttgtaaaatatgatttatttggtttgcctggttataactatagcatcacattggaattattgctgttattggcttattctcataggtattcatagcagaattatttatagaattcaaaattctattgatgactctatgtattctgcattgacttattttggtgctgcacactttttatgtgtaagtagaactatacataattttagtagaccatgtgatgtattatttggagttttggtaaaaatgtaccttctagaaagttggtaattcctaggaggtgggttagatcttattgagagtagagaactatttgttgatctaaatgagctaaatatggatgattttgatatatttttgggaataaattagttggctatgcacaatttcaccataaacttaagaagaaaatagtgactttcgaattgcaccatttgtgtacctctgattttgacatttaaagctagagacctattacaagaagttcgtatgagatttttaactaccgtagtagatactacgtactcagatagtaacaatttattggatcagaacatacaagattagtctgggagtttctggatgtgtttaccgaggagttacgagattgtctccatatttagaaaccaattttgttattgaattgtcacctaggacaaaatcaattttcaagcattgtaaagaatgacatcaacataactaaaagaactgaagattcaattacaagagatatttgatttaggattcactagatcaaaattttccctttgaggtgcaccaaagttatttatgacgaatgtgtatgaatgacagagagctgatcaagttggctattgagagtaattatttatgaatgattaatgatttgtttgattaactacaaggaaaaattgtcttctttaagatagattttcgatctaattatcactaattgaggataagagaatatgatacttctaggactgctttcgatatgaggtaggaagctttttaggtttaagtggacaataccaatgttaagttaggtgacatttaaaaaagttatgaaaatacacaaacaaaaaagaaaagaagaaagaaaactcgaataaaaagcggtatttgcaaagtcagttagaattgagtcaaatgtcaattggagtgtcttatgtagaagtttaacctagtctttcaaatgacatgtgttgacctgtctaagcctgcttaacattcttaacccaagttgaatcatcttccaatcagagtgtatcatccaaccaccgactgtacctaccgacttgaatgttagataagctctcacaagtttaagcttgttgttacatgggacatgtattatatcatgtttagaatataccaaccatattattcactcaaagtatttgaatgaaacgtgatctaagtttttgtcaagttatattatcatgtagttaaaagagagagaaaggactgtattggtatagagactaaaacttgtacaacaataattgttattttgagtgaaaatatatgaatacgtgtccgagacctccctccctctctcattctctctctccccctctccctctcccctctctctccccctatgtccctctcaccctctctcttgtgggctaatttattaacttgattaggccccaaaataggcccatcttagctagatttgagccatggaagcataaaaattatcaatttggaaacgtgaataacactatcatattattaaaatattatttaagtgaattaaatattatatataatattaaatatgtatagagaatgaatagtgtcttttgtatttgcttctttataataggggtgaaaatcggtcggttatggtcggtttttaaaattttataaccgaccggacggttacggtttt

SEQ ID NO: 378684 - DNA, 4089 bp, Cannabis indica
atttatctcacaagagacttaccataattgtacggcaagtatattaattatcacccagtttgggttttttttttttttgtggattttgtttgaggtagatgctttttagattaagtggggtgggaattgttactatttatgtttatatttttttggggttgttgttctatgatttgtatgcgtagtttacaaattgtttggttttgattcatgtatatttgctagctttgattgtgtagaggttccctttaagtaaaatttggtgtaaatttgttaacttgatttgggttttggaagaaattttcagttttgtgatgtgggttgtttgaatcttaaagtgggtagttttttttttcttgttttcttggtgttattagtgaagatgatatgatctttgtaggggcaatttagggataaagtggtttattagattgcttgatgtttttgctcaacatgtttgtcatgattttaggaccagcatgtaagccataaatgacttgagatttggttcaatatgtttatgcaggactcacaatattaatttcctgaaaaagacagtgaacaacaagtactaatattagaagtattttggggttgtatctggagtgtctctttcccaagatcttaaagttttaagctgataatcaaggagaagttgaagaagattggtttggatgttggccaattttagtcaatttgagggttcatgttttggaaactaatatgtccgcagggactgattgcccaactccactttctttagttgatagaagttatagaaaggtgaatgttactgtgatgagagatgacaagtctgaaattcaggagttcttaaaagaatctccaaatattgggaaacctcctcgccatgtgtcgtcaattcggcattctgtaagctctgctcagttggctcatgctactgaagtggtgagtcaaagtctctactttcatcaataatattgttatatgaagtgttcattgatatgcttgatttattactgattggtgtgctttctttaggaatgtgatggtgggattgttagctctaggctgccatcagattctaactcaacatttgtaccgatttttcgttctggaagctgttcagagattggatcaaaaccatatatggaggatgaacacatatgtattgacaatcttcttgaacatctaggtgcaacagaaaacttcccttctcctggagctttctatggggtttgtgatttgatttcttctatcccaaatataaacatgttcaaatcatagagaagccttttgtaaactgaacattggtttttcctgttacaggtatttgatggccatggtggtacagatgcagcttcattcatcagagagaacattctaaggtttataatcgaggacattgattttccgttctgtgtggagaaggctattaagagcgctttcctcaatgctgaccacgcttttgctgatgatggctctcttgatcgatcctcgggtactaccgctctgactgcccttatatttggaaggtctgaactttgaaagtgaatgttatttcttgcttctagttgaaaagatttatcatgtcttacaattgagttaactcatggaaatttcttctaccaggacattgttgattgctaatgctggagattgtcgagctgtgttggggaaacgaggaagggcggtcgagttgtcaaatgatcataaacccaatagcatctctgaaagatcaagaattgaaaagctaggtggggttgtttatgatggctaccttaatggccaactatctgtagcaagggctcttggggactggcacatgaaaggtgccaaaggctcgtcgtgtcccttaagtgcagaaccggaacttcaggagacaattctaagtgaggaagatgagtttttgattataggctgtgatggcttgtgggatgtgatgagtagccagtgtgcagttacaatggcaaggaaagagttgatgcttcacaatgatcccgaaagatgttcaagagagttggtcagagaggccttgaagcgaaactcttgcgacaatctgactgtcgtcattatttgtttctctcccgacccgccacctcggcttgaattcccgaaattcaagttcagtaggagcatatcagcagaaggtttgaaccttcttcaggaggccttagatagtggtgtataaacagagcttatgacttataatctctgaatggcaatgaacaatcactaaatcagttccattttttctttcttttttctttcttttttaagggaaatcagtttcatttataagatcatgtctttgtttcttgggaaattttacttttgtagtacggtagcattttgttattattatctctctcatgtacataaatagattgggtcatacgtttatattattttgaaactactactcaatttgaggcttgaattcatctaatttgtactatagaactttaaaatgccaaaaattttaaatttaactttttaactaatctttactatgaagtcattgtcatactatatgaggtacagtttgcaatgcctaaagctatggaggaagacaaagaataaaggtcaaaatttgttgcagaagccaataaatataaaatgacatctccaaaaggaggtaagagcaaaaatgctaaagctcaaactcaaaattgctcaactaaagagcatgtttttacttgagagtgtaattgtgtagattcataatcgaggccgtttcggtgaagtattatcatcttcgtgtttgaaagtccagccagcaaagtcagtgtctgagaacaaagaggtgggaggtgctttgtagaatgccagtggaacttgttttacccttcgtctaatctgtaatataattcttaaatcagttcagaaattctgacaaaaacctatttaccagagggggattatgaaagttctaatcctctgttggcaaaagttggtgaaacaaacaaatataaacttgttctacatgggaagaagatctataagtcatcaaattagttaatagtgaaaaacctgaacagtttcttttggaaactaagatctccgcctaaccctataatatttggagaccagaaaactatagcaattgctatggaggtacccagaagggacccgaacagaagttgttttgggagtaaaagtaagcaagtgatgataacatattcaaaagacagagaaagagagactgatgttagaactacctcgtccgcaaaaattgttgcatatgaacccgagctaaaatcttcgatagaaagttcagttgttttggctctaaccgtcagatcattctcaagtgacaaaacaaatctaaagaaagaggacaataaagggttagaaacataacagatatataataataataataattaagggttaagcacgaaagagcctggttattattactgaagcaagtaccttgaaacagcgggacagtaatggtggcgaagagtatcaatttcccaaagtgaacttcctgttccataagtcatcatcatatacaaaacttttgtaagtaattgacccactaatttagacacttcatatacagatgcgcataattatattttcacatgacgttgaatgaccaacacaataatacacaaagttcagccactcactcatggcttttgactttttgggatcactttcttcatttttaaaatgatcaatgcagagttttttattcgacacgtctgcactgtttatggggtcctcagaattttcagaaacctttttatctgcttctgaatctcctttactagcctcttcatcaacctaaaaagtattagatattaaattgttacaagatgcagtagaatataaagaggggcaaaagtaaagcaacacatacatcaagatgctcaacactccacgcccccacagggaaacagaaaaggacggtaaataatgatatttatcaaagttaagagtgtcaacattaagtattcatattgaataactacaacaaatttgctgcaagtagttaccagggatatttgaggcgaaatcctcttaacatttacaattgttacacatatgaccctaatcaaaaaaagtagcgacaaaagtaccttattttacgattttgtt

SEQ ID NO: 378685 - DNA, 5713 bp, Cannabis indica
tgaattttcactgttctaaatttaatgtttttgttgaacattttgagcgatcacttgatttatttttacaatcatcttgtcagtagtatatttttttagtaggaacgtgttgattaaattcttcagaaaaaaaggtgtgtgctactgttttatagattatttaggccagaactaattgtacttgaggagttcatgcatgttttgtttgaacactgattacatgtgttgttcaaacaaatgaagacatgcgctctagtccacttattcgcatagattgtctccaacttttaataagttgcttgcttgacacggtcttcattatgaatatggacacgtaattttcttttcttttcttttctctttgagtgtagtatacatcactatttcgaagaggggaagcacattctgtcccatcatcaattcagggcgcagcatctattacttcttcagcatcgcttgacaactctctagctgacatgtatcgttctcctccaagacccttgccttatgatgctgacccaagatacttccgtttgcagcgggatggactgatttcaaggcgtgataaaggctcaagtcattcacatgaagaggcggaacccctcagaagtgatactgatgcagattcagaatctctgagtacagcagacaaatggagtgaatctgtttgtgaagatgggtcaaaagagcaccgttccaagtcctccaactccttaaagctctcagtgactaaacctacaactggagttgggaatatctacacatcttcagaagaagaggatgtctgtcctacttgtcttgaaggtatttgtttgacttcgaagttatctcatcttgttattactaactgaatgatctgttacctgctagtattaatctgtttggttgtcatggatacatatttctttcacgagctgagacgaagtcaggcacttgtataggcttttgcagaagagctattacttgtgacattttatgatacacaggtcacatcaacgcgcatctcttgtacaaattcttgaacgatccattattcttgttttgcattacatatttcacacattttgctttaatagtttagggcatgttgtatataggttataattcttaacaataaggaattaaagtagcttggctggttcaccatttgaataaattcaatagccagactggctcttcagtttgtggcttcatcatgcttattgctttcaaacaacaatgttaaggaaacatacaccaaaatgttaggaaaacatacaccaatgctccagataaatgctaccaacaatgttattccattgttccagatgaatgccaacagtatacacaacaatgttagagaaacatacactaaaatattgtggataaatgctaacgaacttattctactctttttaatgcagaatatactccagaaaaccccaaaataaatgacaaaatgctctcatcattttccaccttggttgtatctatgagtggatggagagaagtgaaagctgtccggtttgtggcaaggtaatgtttcttcttagcttcattgggtataattaaattgttgttattcattttgatgttgatttgggtttctcaatcgagatcgagtgtggggttagagggtcctgcttttaaatttttaatatattttgaactattgtttcattgtgttgcctcatcatgctcaaactggttcaaaattatttacttttatgctatacttgaataggaatgtcatagcttagtaacattcattttttagttattattctctggagcttattcttatatacagtgtaggattaaagatgtccgaaactcttagataaccatctttacttaacattttccttttctttgcatttctctaggtgatggtattcaatgaaacgccttaaatcttgatcgaaaagtttaagtcgtggatggagtcttgcaacatcaggaggagaaacaacaccaaaatatagtcttgttactgtgaatagtccaacgttaaagaagtgtgatgtatggtacatataaactataaatatttttctgcaatgattgctgcaagtaacatttgatttccatccggtatctttcccttttgtttttcattttttgcaatttcactcaaaacttggccagtgaatcactggaaaagaaatgtacatggcaaaaaaaagaaaagaaaaaaagaaagcatgtgaatagaccttgttgagttttgtgacaaaaatgcatatgggcccctatagcatgattggggtatatctttatgtgccaattttcttcttttaactagtgttaagctggtcccaatatctactatgcacaaaaagaagtgcttgaattatgatgaaaatccagctttgtcaagtactttgtgtggtaggttatgtagtaacttgtgtcattattggcagtaaccccatcaatcaaccaagaatgctactctactccactccacttggtatttattgagctagtgggtgaaattgtttgtttatatgcaaaataatgaggttattttccaccaactcttggtcggtttaaatgtcaaatctattaggcgtggacatgattgcttggatgtaaagttcctttttagctaatccaattgagctttataatgaaacaatgcctaatgtgaagatggatttttccttttgtatgtttctctggacaaaattatctcactcagttcattatggctatttcctggtgtccttttattgtttgtttagtcttggtcgtggcgtaagaaaagtattctcaagataagcaaaaattaagtttggtttttttttggaagcaaaagcaacttctctaagatgagaacataaacaactcttaacctgactactaagaactttagcagaactacacacataattaaaagtacatctatttctattacactaaatgcaatataatgcagcaatagtagtgttcatgatagctgccaacaccaggtcttccagctttgcacatcttgaatcaccatcttagtaatagtcaaagaaaatatgttgatgagtttcatctatggtctcacaaacagggcagtagctagaataaaagtccacggtctttccaagatggtcctttgtgagcaagtgattattatcacttgccaaataatgaagggatgcttgaaaaaacaaagtctatgccagataactttagaataaaacaccatttcacaagcaagaagaaacagatagaagtgttttactttaaaccattcttgtctatcatcctccagcaaaaaacgacgatcaataaaatttttcagtttgagaagttttttaaaataccaactgtaattattttctggactaagattccagaaatcttggtcttcctttagagcatctccgatggttaaattttagagaatatttactgaggtagacaacttagttgataaaatatgagggtgctataccattgaaaataaatagatgtcattttaggaattcgcattgatgctatacaatgacattggtgctatattttttaataaaaaattaaagtaaataaagatacaatttataattaaaacaaataatatatttaaatagtattcttgaagggtgttgttatttttagaagtaagagtgtcaaaaaatgatgtgaaaaagagataaaataaaatattatatttttagatgatgtggaagttttagcaccattaaagaatactaccattggagttggagatgctcttaagtagacagattaagtccatctcacccaaagagagtcttgctttgctgagataacccaaatgtactttgccataagagctatattctacttttttttccttctctaaaaccaatacctccaaattttttaggttagcaaacatgctcctaagaagtaagatgaagcttagtacgattacctttagcacccaaaagataatctctacagagtttttcaatatcagtagttactttttcaggaaggagaaaaatgctcatctagtaatttctaatttccagcagcactaaaatggataagttgagctattcaagcaaacgagagattcctgctagcccaattatggaggagcttcttttgaatcttatcaataatatctccacagtcagctgctctccacttggttggtctaaaattaacgccaaggtaccacaaaggaaatgtaccttccttcatttgaaggatattcaagacctagagcttgactatcgctattaatttcaccatggttttatttgtagctaaaccaatggtggcacagaaacaatcaataacatcaatttgaagagacttcaaattacccttgcaaaaaatcaccagatcacaaatatataaatatatatatatatatatatatacataaagatttatataaaacattttataactaaagtttcggcagagtaaagttataataataataagccaaaggatctctcctctaattcatgtcaaaccaacacataactttaaaagagaaacagatgctgctgatgtcaagttgaggctatttcaaaagctctcaagaagccttcagggggttgggctccattcagtttctgttttcccttattaatctgccaaattaaataaaaatatttctcagaattttccatttaattaagaaacacacacacacacacaccctgattcctcctaaagttttgagtaactgagatttttcagtactcaccaggaaaaatgggactcctgaaatatttgttgagtacatctccagctcttctttaacctttagttcaccatagaaaccagggttagtacttaataaacaagagtttggctttgctttatttacttattttccatagcttcttgatcacaaaaggtctattactacagagaaaacaagttttaagaaagtagtcaagaaaaagacctcattaacaccattgttggggtcttgaagaaattctactgccccctctaccccagctttatcagcacactgcacaagaaattccctgtatccaaatccacaatcttttggaattaatatgcataagtaaaaggtctgctaattgtgactaaattatgcttatttaccagtccccaatgtattttgcctgagtgaagtatccgaggaacagttcctccataagcttatgttgcttctcagaaccttgtttcccagcaaaattaacaagcctgtgactgtctagagtgtttcccctgtgcatgtacaagatcacattaatgataataacaaacaaagataaagatgacaaagaagataactcatccatgaaaacttacgttaatccagacatgttatattccagcccaagtttcttgtaaacctgcatttgtgaaaataaaagcaacccaattgatataacgagtgttaaaagaatgtttaaacaccacatcctgataatataaactctacacttgtatgaaagtgtgaaaaatttattaatgttaggcgtggttataataataataataataataatacaattagtcatgaaaaagagatcaaaaaaatgagaattagacctcagtcatcctagcttgcatcctatcactttgaggcccaaacttttccctgtaaaactctctcttatcaactccttctttaggggcattaggctcaagttgaaatggatgccatctaatctgcaaattcaattttgacaacatacaagacaggaacaacaaaattttaaggaagagagagagagagagagagagagagagagag

SEQ ID NO: 378686 - DNA, 6806 bp, Cannabis indica
catcttggaaatgttaattttgcaaagggagaagagattgactcttctgtcattaaggattgagaaatccagattccatcttaacatgacagcagaactgcttaggtatacatttaaatcactcttgcatgcagtgcagtttcattgttacttgatgcttgccttttgatattgttatacttttgttaatttggatatatggtaggtgtgatgccaagagcttggaagatgcactgattactcgtgtaatggtaacgccagaagagataatcacaagaacacttgatcctgttgctgctgtgattagcagggatgccctagctaagactgtttattcgcgcctatttgattggtacatgactctttcttttctatgtccgtgcatcccatgttgcatgtatttctgttatcaattacttcaaggactaatagttatgtgcataccaaatgcaaataattcatattactaagtgtgttttaaaatgaatgtacattcaatattctgattttgacaatttcatccgtgtacaggcttgtggataaaattaacaattcaattggtcaagatccaaactcaaaatcactaattggagtccttgatatttatgggtttgagagtttcaagtttaataggtaagctgatttaatttagatactatatttcatgtgagatttggatttacagctgaaaactttccacactaaacagttttgagcagttttgtatcaatttcacaaatgaaaagctgcaacaacactttaaccaggttggccgatatctgtgttttattctcgcttcctattatgaagtaatttatcttgatctttatgtctactattatatggttgcagcacgtgtttaaaatggaacaagaagaatatacaaaagaagaaatcaattggagctacatagaatttgttgacaaccaagatgtgctggatctaattgaaaaggtgacatatataaacattctattagcgttagtgttatataaaaagatcattgaaagatagtgctagatatataaaattaatgtttctatagtgtggcagatactcttttcattttcttttcataagcagacagtatttgatctacatcaaaatagtaaatacgttttttgtttttcttctggagcacttttcaaataactaaaactaagttctttaatattttacagaaacctggtggaattattgcacttttagatgaagcctggtaatgatataattctgctcaatgatatttgacttaaagttcattggatatctataaggagggtggatgctatactggattttatgtttttcataaatactctttctattattattattatttgaagcctgcgtgcatgatttggattctttcccttggttggactaatgaatctttgtttgctttattcagcatgtttcctaaatcaacacacgaaacatttgctcagaaattgtaccagacattcaaaagcaacaagcgtttcattaaacctaagctttctcgtacgagttttactatatctcactatgctggggaggtaaggatttttttggtttgtgggttggtggggggatattaaggtcatcttggaagaccaactactggtatttatcctgaagttttgttgctttgtcaggtaacttatcaggctgatcactttcttgataaaaacaaggattatgtggtggcagagcatcaggatctcttgacagcatcaagatgctcgtttgtggcaggtctatttccagcgtcaacggaggaatcatcaaagtcatccaagttctcttccattgggtcacgctttaaggtactgccagtctaccttaatgaaaagttattatattggatgggataagctttagtgattctggccttattatactgcatctgttaaaatgcccattagaggatgcagctatagagtatataaactactgaaatggtaatttggaaacattgaaaaagaaatcatgaagtaatgatatatatgtggtgtgatatgtgatggaccttaacttaatttcagagataaattccaaagcaggcaaaaataatctttcaatttaggtctgcacagtagcgtgtggaagttaaatgagatcaaaagacagcataacctgacttattctcacaaaaaataagggtaaactcaactttaattggacagaatgtcgaaatccaatctgaattgatatactggaggagatgagattattttagtttatacatatatattataattagataaaaatgaaaatctttgatcttggtcaaaattttgtcactttttgatttgggaaagaaaattacatgaccttataattcatcttgcatgatgtaaaaggtgcatttgacatgactatgataagctgtgctatttatttttcctttacattgagaatagtctgtacatgatgttgaaattaagtttagcataattgcaaaacatgttattctttaaggtggattgtatatacgtttgctagcttagtggtatcaacttatcaatatctgtatttatgatggttgatagaaaccatagttttgatccaaaactgtatttattaaattaattatgcggccacagtgaatagacttgtccaaaaagaaaaaaatgactttggactttgtaacattccaaaagtatgccttagttatagtcatcactttttatcatctgagtcaatagttaaaatgatatcatactgctaatcaggcatgaagttgttgtttttctttccttttagatttcttgtcattatatgttcttggacaagtgggtatgatgatatttcaaaaatgcagttacaacttcaatctttgatggagaccttgaattcaacagaacctcactatatcagatgtgtgaagccaaataatgtcctgaagcctgctatttttgagaacatcaatataatccaacaattgcggtgtggtgtgagtatattctaacgataaacccgctttatatcagaaatttttagcattatccttggaatgttgtgcttcagagtaagctttatgtttgccaattctgtttcttgtagggtgttcttgaagctatcaggatcagctgtgctggatatcctactaggcgaacattttatgagtttcttcatcggtttggggttcttgctcctgaagttttggatggaaagtaagtacaggatttttaggttctagttcattccatgatgaagatgaatatacatgttcaatataacgcagagtccattttatttatggaagtcatgatcagccattgctatgccttgtacagttatgatgacaagaccgcctgcgaaatgattttggacaaaatgggactacaaggatatcaggtgattcaatttcttgcgttctgtcttattattttaaatatcaagctgctcaggaggatgatatagttgtgggaagatcccttcatgacccatatgtatgacaacatattttgcatatatcagactgaaggccactccaagtctgaataaatagcttattcaaaaattccaatctcattatcatccttgatgagatttataaacttaaacaagctccattgtttggcaactatgctggttctcatctatgtctcttaatggattgctgtaaggaacttggtatgagtggattctcaggaaaatggggaattgtgggtggggatgatggctataagtggaaattgagaaactagtactttaatattttatcttgaaataagtggaaattttaaattacatccaacactatccttaattgatgataatggcagagattctaacctctattcactttgcgagccttacaatcacatcggcattctaacaagattttttaaggatacagtgatgacaaggtctgttggaatatctgatgcagcttattcaagaaactcagaggaattaatgattgtttctgaatatttgctcttactgtgtgcaagtaactgctaaatgtaatattcaccaaaagttttttagaacgaaaatcccataaaatttatcctgctagttaacttccacacatttgtattttgtgataatttgtctcaggtttccctgatccctaacgtcgtactttgtttaactatcatttggcagataggaaagacaaaagtttttcttagggctggccagatggccgagttggatgcaaaaagagcagaggtgcttggaaatgcagccaggatcatacaaaggcaaattcgaacatatattgctcgcaaagagttcattgaatttcgtcaagctgccattaaattgcaatcatacctgcgaggtattatcttaatttgtagctaaaacactgctgcgctctaagtgcacatgctatttagcctgtttatttttactgtatactgatgcagtttgtctgatttggaactttaagaatacagaactgcattagtgagtcatttttgtttctttgcatataaaactccattagtgtactgtttgctttagtcttttgcgcctcaatttttttgaccatataaaaattgtttagtagttgacaacaatattcaatggtacttcaagtgttcatgattttcaatagtttctttttagcatttggaggtgcctaccggggcagggaaaagcttaaatttttttgtacacttgactacctagatcatgatattcggtgttcttgtttcttatacaatactttgtgggggtatgcgaattgaactttgttccaatggagattgtaattggcttctctttttcattgtaactaggtatttttgctcgtgaactttatgagaagttgcgaagagaagctggagctattcagatacagaagaatttccgactatacacaagcagaaaatcatacttagcggtccgcttggctgcaatcacattacagacaggattaagggcaatgactgctcgcaacgaattcagatttagaaaacaaacaaaggccgcaatcctcatccaggtttaattttagaaaacctagcaacttctagatgaatgtttctcttttgttttagaaagtaataaataacataaaagcaagagctttataatgcattaaactcatgctgtgcttatttctatgaaagttgtgaatatgaagtgattcattgtttatttggtattgtgcaggcgcatttgcgttgcttcatagcgtactcttattataagaggcttcaaaaagcaattatttttactcagtgtggttggaggcgaagagttgcaaggagggagctcagaaatcttaaaatggtctgtcgcaactggttagtgcgccttttgtttgtgtagtaacataaggtgtctcattatatttctctggtgtaaatcttttcaggctgcgagagaaacaggggcccttaaagaagcaaaggacaaacttgaaaagcgtgtggaagaacttacatggcgcttgcaacttgaaaagcgattacgggtaaataactatgtatcacctattggttattgccatgctcttgaaggattgtcaattagacatgaatctgataagccataaaaatcattgactttcatctgagttgcagactgatttagaagaagaaaaagcccaggaaataaccaagttacaggaagctttgcatgcaatgcaaattcaagtagaagaatcaaatgctgcaattgttaaagaacgagagatagctagaaaagccattgaagaagcaccacctgtcatcaaggagacacctgttctagttcaagacactgaaaaaattgattcgttgactgctgaggtggagagtttgaaggtaggcaatgttgtcattgactctaatctctatattatgagtttaataggattgcttttcagtctgattaatcctttgttttttgactgctaagaacataaacatgcttcaggattttagtctacgatcgaggttgggatgttgggttgattctggatacatataatttttgcaatcttataaaataccatttgtcaattttctaaatgttattttatgaactccattaataattacttcttgcatcaattggcttatgctgaattcatgaaccttcgtactgagcaggctatgctactatcagaaagacaagcagcagaagaggccaggaaggctagttcagatgctgaggcgagaactgtagagctgaccaaaaaccttgaagatgcagggaaaaaagtggatcaacttcaggaatctgtgcagaggtttgttaaatttagtaataattgaaccactgatatgttgtgtttgctgtcatgaaattcactgattgttttgaaaacaaatgaaaatactctacctagaaggctatttacattttcgcaactgatgatcgaagtagacctgcaattgttttggcctcatttgtcatatcatacttacagatattatgggtctggtcttgttaagatttttatataaattaaccatattcatctttttgaaataacctcttacctacagtctcaatatttgcatttctcttctcatattcatacggaaatgtatgcaaacattcacaaatgcacactctggcatagcagttagtttcctatgaactctccaagttggttaactttgacattgtttatcacaggctggaggagaaactttccaactcagagtccgagaatcaagtacttcgtcaacaagcattgactatgtctccaactggaaaaactttatctgcaagaccaaagatggttattgttcaggtaccaatggatataaagctgatactgtcgtttttgtaatttatagaaatgcaggtaacttatttttttttttgttttgatttatctttttgaaaccaattgcagaggacaccag

SEQ ID NO: 378687 - DNA, 8344 bp, Cannabis indica
attttggtgaatagaggagacggaatcaatctgttttggttttgatcgtatgggtttttggagttgttataactagaagtaatttacttgggctgtttgggtgtgtttggcaaactagaaaagttgtgcttggtgaattgagattggctctggtgatgatattttggatacaatactaaaatttgagctgtgggttttgttgaggggtgttagagctcaaatgggtgggatttgttcgaaaggatcctctaaagttgagaatccatatggggaaggaaatgggcatgttgatcgtcacaagtctgataaaggagagtaccagtcaagtgtgaagaccatggttacgccgcctccggtgattggaatcaaggaggataagttacaagagcagaagcagcagttgcaggatcctgttgggttacagaaaattgatgctgctgctcctggcgatgatttctacgatgggattccacggtatccgagggctcagaagtctcgatccgtcaggtcgacacaggcggcggtggccaaggtttttgcattttctgaagttcttaaatatacgtggtttagtgctgttattctttcatatgaagtgtcgctttagtcaaactaggaggttatggttagcaatgctttatcagttttttgaaaattaacctccgttagttataatgcgcttatacctatcataaagaaaatagaaatttagtattacatacttctgtaataacaatggatgaacttgataatgtcttttctaacaagaactgaattttttccatatatatgatgctgttatttgttgttccagtagtcttttaccctaaacagtgctggttgggattccataacaactgagtaattgattttttcttttcttaataatctttctttatatgtctacattttccattttttttttccttagagtattcttaagatctaccctcattgatttgttggagtcgttaattatgactctgaccatttagttggagctcaaatacatatgcttgctgcctttattttctcacaaaaagaaataatacttctatttgattctctttcttgatccgccatgtttcaagctagtcatgattttgctgctaataattctggcattgttaaagtgataaattttatgagcagattggtttttagtctgcaccacctaattttgcatattattttgccaatttagaatttggtaaagtctggctctaaggaaattgtaagttattgaataaccatgcataagtcttgtttgggaagctcatgtttgagctgtatgtttatcattaagaaaatacatggtttacttccttatacttctagtgggcaagtgttgtcttaagttagtggttgaaaattaaaatatgctctatggaatgatggcataagtaatttaatgctctgttgttgtaggtttccgaggtaagttcacgtttaggtagggctggtacagctgggttgggaaaggcagtggaggttttggatacgcttgggagcagcatgactaatttaaatgctggagctggatttgctacaacagcacccagtaaaggcaatgaagtgtcaattttagcatttgaggttgcaaataccatagttaagggttctaatctcatgcaatcactttcaaaaagaagtattcaacaattgaaagaggagattcttccttccaaaggtgtgcagcatttgatatctaacgatacagatgaactgctaaggattgttgcagctgacaaaaggtggataatgaatcatgtagcagttgttcatttcattcaatacttgaataatacaagttttggaagagaattcattttgttttttaatttacggaatttttctctgatagggaggagttgaaaatattctctggggaggttgttcgttttggaaatcgcagtaaagatcctcagtggcacaacttggaccgttatttggaaaagtaatatatgtgttatgttatacatttaagtaattctgtcgaaattagatttcccagtcctatatcccttatttgctttggtgacatcttattttcattttctagaatcagcaggggactaaattctgaaaagaatttgaaggaggaggcagatttggtgattcaacaactaatgaatttagttcacataactgctgtgagtatattatcatcctataattagacaagtgcattttctttctggtcacatattggatagtttccttttttatattatgaagttccaaatattgtatgcgtagcttattcttatgtaccaaatttattatgcataaaccagctatgcaacatttctaacagcataaattttcttgtaagaagaaaaggaattataataaagataaggatgagtagtcatcaaattaaactagggagacccttgaatttatgcgtattagtctacttcctatggaagagtacttttcctctgaatgatagtaaaaggttgtgttgttcctcttcttgacgaaatgaccctcacaaagctataaatatgtaaagtgatatagttagatgatggctcttgcataaatgctatttgttgtttccttatcactttttcttaaatcttatattaaggatttttcagttgataggtgccctttttctgaactagtggctgaacatttttaaagacattttcgtattattgaatttaagagtttaattatttatacaaatatttttaatttttcaataataaacttctgttttggttgcactttctcttttcatcggtaaaagtttgtcttcaagtattatcttgtatgttaattcgttttcaaaagaatgctgtttgagctctgtgtgtcgttattttactgaacgcgttaaaagacagccaaatactattctgaatgcaggaattataccatgaactacatgcactggacaggtttgaattagattatcagcgtaagcgtgtagaagaagagatgtcaacaagtactcagaaaggtaactatgtggtacttgcattgttagctgttgttctccaggatgatatgtacttttctgttttataattggatttgtaagcatcaattgcacgttttacaccaaggttggtttaattctcatcccattttttcttttcctacctcatttttttgaaaactcgtaatataattttcaaatatgttttcacgccaataaaatttccttaaatgcaaacatatccttactttattatattcaataagagaaagtgaatttgtaaaaaggtgaatagagtcacacatcattcaagtgtgtgtgtgtgtgcgcgagtgcgtatgcgtgtacgtgtgttaatatcaacttgtgtaaatttgtggtgagctaggaaacagtacttaaatgaatggtgatatgtgtaaaagactgttaaacgtgcatattgtattgatattgataccatttattatgatctgacatttagagatgtttatttataaactaatggatatttccaccatagaatccatttactagaaaaaaagagttataccatttaatataattttaaaaaaagcttagtctagcttgtgtattggtataaagataatattgtggattggaagacaatgttgcacaatatggagcagttgaggaaaactaagtaaagtagaatgttaaaagtcatttcaacctaatgttaagcacaaccaaatactgaacttagttttataattatattgtatttgatattgtttaactccctttgtcccacaggcgataatatgtcactcttgaggtcagaactgaaaagccaaaagaaaattgttaagaacttaaagaaaaagtcactttggtctaaaagtctggaagaggtaactttcttctttcagtatggtatttactatatattaactgttgaagatgactgttagatagtagcccattggctttataggttcaaaaacttattttatgactgttatgggattagtaataccatttagagaagttttctaaagaagctggtctgaaaagcccttcaataaatatgtaggaccttgcaccattaagtaaaagaattctgaactttatcttatttcttttgtttctcatatgtccatttaaaattgtaacttttgtttgaaatagtttttgaacaatcattcataagctctattttttcttcttcaaatactcaaaagaaaagaatatccaagatggatgctcctagtgttcacaatcaggttataaccatagcagggacttctttccatgcttaatatatataccaagtattttctatcatttattattgttgttgatttattgcaggtaatggagaagcttgtagacattgtccattttctacatctagagatacaaaatgtgtttggtgatgctggtatgtatgcattaacggtgtaacatgaatagatttattagagatagatattattttgcttttttttttttctgaaacaagatattattatacacatcatacgtacgtaatgatttgtatatttaagattaacaatgatagtattttcgcccatttaatggattgaaactgtgttttgaagtggagaactttaatgtttgtgttccttcacaatagaaatattaaacaaagttagtgaaatggcagtgagaagattcgggtatgaggttgtggcaggggtaattgtgtccaaaaaagtttgtcaagcatatatccttctatctaaaagtgctcccttgatctctagcctgattgattatgcctcgtattttttttcactacagagtaatacaattttcatatctataataataatggtgaaaagaacatccagtattcatccaactcagagagtatatataacattctcaatttctacagatgatgaacatataccagcagcagaagaaactccaagcagccgtaaaaaattgggacctgctgggcttgcactgcattatgcaaatataattattcaaattgatacccttgtaggtttcccatttctaatcattctcttcatctcattctgcatcttatgattatctgtttgcatcctgtatctactttttctcaagaaacatgattgattatgtattttatcttgtagttatttcttgtttaactccatttgagttgctcatttagcctatgcttgattagattttttttcataaaaaaaactactgaatgttagaaatagtcaaacaaacaagtaggacaggccgatcttagaatattgcagttttgttaagagatagctttatatttttattgttttggtgcttggaagagcttgatgagaggtgttgatggtgatgagaactttatgagatttgatttgaatggttccttgagatcttcagggtttacagtgtatgtagagtttatatatgtaattggccagaatcttaagggtaatttgtagtaataatatctaacgatcttattatagaatacatatacaccaaaattagttgactgccttacttatctgtatctcccaatcattaatctagcactgttcatatttaatgaggagagtacagagtaaagttaaatcaggggcagctgctaaatattctaaactgtgatactgaatctttgaatctgataaattgatttcagtccttgattgagattggttgctagaatatcgtaaatttttccgacatagactctgtggcaggtttagagtgtaagggagtttttgaacctggattacatttggccaagttactgcttagtttacactgagacatgtatttattcagaaatataatccattgcagaatattattcaaatgttggaatatatagatataattattatgggcaaagatttttgtagttgtgatattatagtaacagctaatgcttgtagacttcagaatgccgatgcttatcaaagatgtctcttaatgcttagacaaatgtgatggattgaaagagaaagatagtatatttaaccatgtatcttaatgaaaattacaatgccacattaaattctttgtaaacatttcaatttttgtagatcttacaaaacaaaatgaagtatgtgtcgctaaaagagcccttttttttatctgtttatggctgtactttataagttcatattaaattattaatgatcgagtgcaggaaaaatttgtgggcttatgatgcatattctttttatgaatatcactctccttaatatgatttaaatgttttctgctgctgcaataaccaggtagcccgatcaagtgcaatgcctcctaacacaagggattctttgtaccagagtttgccaccagcactaaaatcatctttgcgctccaaattaaaatccttccatgtcaaagaagaggtagcatgggtgcttgtaatttttccttgacaagaagtttttctatgtggttcgactcttttgttcgtagtgatgttttatagttatgtgtcgatccactgatttcttttttcctacagatgactgttaaagaaatcaaagatgagatggagttaactcttggctggcttgtcccagtttgctacaaacacagccaagtaagatgtcctgcatttcttgccctctttttctgtgtgtatgtatttgtaggcttgcattaatgaacttatggctaatcattactatgcttgaatttattttcaaaaaccagagctcatcatggttttggatgggttggagaatgggcaaatactgggtaagtaataaaaatctatcaagttttgtacttgtagcatatttctctttcaatgagtgcttctcttattcttttgatgattgtacagttctgatgggagccgaaaggcagctattcaaactgagataatgcgaattgagacacttcaccatgcggataagggaaaaacagagtcctgcatacttgagatgttgttgtggcttcatcatttagcctctaaaagcaaatctgccaacacagaggttaacaagtcacctttcaagtccacatccgacccaatggcaaatcaggagcccaaggacatgcaaaccaatgcaaagtcagtagtgctaacgcctgaagactatgcaattctgcaggcgacaaccaagaaaagaagaattccaggtatcagcaaaagccaggacttcgacgctgagaggacctgttcgagaaaacgcagctctcttacacggagtagcagctattctcctagaagagaaagcagcaaggaaccgctacctttcaataggctttcttctggggttcgtgttctggatctcgtatttgagaaacagaaagtattggatatgatagacagagtggaaatacatagatagatcacagatattctgttgatcctgaatttgcacccgggagtgatgagaggggccagtcgtgttctgtaaatttactacacttcgttctattttttatttattttattaggatgttgcacttgggtcgagaagaatatcaaactatatttttgggttgggaaatataacctttacacttgaaaatatatctatatattgagagtgaagaatgtcgctaggtagaaagaccatcgatattatgatattattgggtgcacagttagaaataggaacttgttgaacttgaggttttggagtaatagttaaagaatatgactatagcaactattacctttttcaatagtgtataataaataaacaagattctatgtaacatatcaaattcatccatcaggtgagatttttgtgggttacatgttaaatgtcttgtttgtttgtttcgttttaagaatacgatactttattaggattgcacacaaaaagggttacatatgaaggggtttcttccaaagaaaaaagaaagaaaaaaactagtcaaaggatatactaagtcaatttatgacccacaacattaaaattaccactaaaatgagaatgagatgctttggaagtttagacaatagaacttaaaagtcagaaaatataattgctaactcattattgtacacattagagttatttaaaactaaaaccagccataaagaatctaaaaaaataactttaacatgcaaaacaatagtacaaacctaattcaatccctccaaaaaagtaaagtttctattcgaaatgatgaaagaccacatgtatcataaaaaccaacctaaataagtgtccccttaagcaaacaaaaatatacgataaataactcaaattttagaatatactctatttaacaatcgaactatcagtcaaaaataaaaataaaaactattaaaccaaagggagatccctttagttacaatcctaaattttattttagcttattgataatattgtacctgataaacattgtattataattacaatcttaaaatttattttaagggtgcgtttggaagtaactatgtaattactaggtagagta

SEQ ID NO: 378688 - DNA, 1484 bp, Cannabis indica
gggatctcagattccaatgatattgacacttaggactagagagttattgcgagaaggatgtatgggaaacctggctagtgtgttggataccatgaaagatatacttaagggaccgaaaaaaggttcgagtgtagtatgtgaatttctagatatattcccagaagaattgccaggatcaccaccaaagagagagattgacttcgaaattgaattagtaccaagggttgagccaatttctaagggcccgtatagaatgaccctaaagaattgaaggaattgaaagtccaattgcagaacctacttgatctgcgatttacgaggccgagtacctttccttggggtgcactagttttgtttgtcaacaagaaggacgagtcattacgtatgcgcattgatcattgagaattgaacaagtttacaataaagaacaaatatcctttgccaaggatagatgctttgtttgattaattacaggaaaaaaccatcttctctaagattgacctctctcttgacccatttttgacgaccaacaaccccaaatgggtcaagagagaggtcatcttctctaagatccacctcctctccttctctcttcatcttcttattcttttctatttttagatccatctttttttttctccatttttattttctatgtagatctcgggttctctctttgttcactaaaccttcgagtttttttaatctacaaatctttggttgttttatgttgggggctcgcaaaaggccaagtttgcgtcggagttcgggatcacaattggtcagagttgtagatcgaaccagaccagctttttttatgattgttctaaaccatcagttacagttttaaatagtcgagacataggcatacatgacgattttctactgacgcctattctaattttacgacattcgaatgggcgttgatcatagagaccaacaataatactatacccaactatttttaacagaagaaattttctttttctagtagtgcaaaaaagggtcaaatgatatggtcaggtcctgcagatcatgtgaatattttcatgaaacacatgatatttctttgatacttttttcttcagaattttctttttgctcttgaaatattttaaggaactaagaccaagtttttctatattaaaaagaaacctaagccacatttaagggaaatttacatatatactgtttttggaccaaaattttacaaaaatactgggacacggcaaaaacaacttttttactgccccagcccattttctttacttttgtactgcccaagcccaacaacttaacatttatactgtgaacagtaaaaaacacgggaaaacgacctgcttcgtgttggggagtcgccggagtcggacatcaccaagaaaaaaccattaaatccggcgaagagtttttggtaaaaggaagcagaattgaagaacaagaactacagaacactgtcccccccaaaataacagaggtaaacacaa

SEQ ID NO: 378689 - DNA, 10056 bp, Cannabis indica
tttaaaaaaaacaaagaaaaaaaaatcaaaatgttttttatttttaaattaaaaaattaaaataattacagccatttttatttttatttttaaaattataaaacaaagtgattagagaacacatttttattttttatttttataatttaaaaataaaagtggttagagaacacatttttttattttttgtttttataatttgaaaacaaaagtggttatagaacatatttttgtttttcaaaaataaaattttaaaaacaaaaattctactttcatttttctgtttttaaaattaaaaaacaaaagtgttaccaacgctaccaaaatatttgatatttcaatttttcatacattcgaaacattaaatttattttttacataaattttcaaaaaaaaaaaaaaaattaaaaatagtgtagtatacgttctcgggcgtaaaagttaaaaaactgattgtaatacaaacacaataattaccacttttttcagaagacgagaatctttttgacttaatttagacttaattcacacagctggttgtttgttaaaaacatgcatagcatactcagaaggtacattaacgtggtttccttctatgattacttataatattattaataataatgttttttctaatataataaattttattactattattgttattattaaataaaataaataaaaaaaacgtggcctccaatatgatacatagaaatagaatgacgagagtcagacctgtttctaaaaatctagagattcttatttcatccaagaccgagtctcctgcttccaacttccccaccaaacaaaccaagtcagacaaatcaaataataataattaaggttcctacaaacataactcgtttgtgtttttatttgtttttttttcttattacattttctgtctaaagacacaaggaaggaaaagaacaaaaaaaaatgtcatgcactgttctcctacacaaaattttaaaacaaaggcacacatttcttgcattaagtcagataattttctggggttagttgtccctaaagcttttatgtatttttcttgtttctttaagcaagaaaatttagccaaagatttgacttttatggttctcagcattgacaaaaaccagagatatatagatatagatatagtgtattggtgtatctgtctctcattccccttaagaggggtgtttgtaaaagtttgataacaggaatgggagacatctcgccggagaggaaaactgggtgtggcctcataaatgcagttttcggaagaaaaagtttatgggccaaaaaaacgacaactcaaagttctattccatcatcaaacgacaaaaacagcaacaatgaattcgccaaaacgacagccacccaggactccaaacgacgtcgtggtacctccgacgagatttcgtttctaccttcatctgctcaacatcaacaacaaccccatcacccgaaacacgttgtaaatagcagagcgacaaacaatcagagaccccaacagcaacaaattatcacaaacgacaatagaaagcaggagacttgttatcaaacgcagaacaaaacgtcggcgtacgcttatgttaaccaaggtactaatagaaaggtacctaaagaagccattacaatatctggtgagcttgagagtatgattattgatcatcagaagaataaaggtagtagtaccctcgttcgagcttcttctagcaatgttatgctttttgggaatttgggtaatctcaggcaacaacagcagcagcctaatgggtctgttctggatcatcataatcaccacaatcataatcaaaacaataatcataatcatgttcattcgaagcagaggtcgagagaggagaatccaattaataataaatacacaaatgttactgctactactactagtagtaataataataaaatcagtgaaccagttcctagtgggtcattgtgcagagctatatcgactagaatggaccctgaaacgttgaagataatggggaatgaagattacaagaatgggagatttgcagaggctttggctttgtatgatgctgctatttctattgacccaaataaggcttcctataggagtaataaaagtgctgccttgactgctcttggtagacttcttgaggctgttttggagtgtagagaggctctaagaattgaaccccattatcatagagctcatcttcgtttggcaaccttatatcttaggtatacttttttctcttttttcttttccaaaatacaatctttttatagtctctgcataatagatcaaaattctcgacaccatatttgcatttttcacactagtgaaatattcaattacttttttgatagaaaattattcaattacttttttgataggaaatattcaattacttgtttctaataatttggattttttttttttaattatttgttactttcagcctgaacttatgattgatctttctgttggccaaacaagggattgataacacagaataatgtttcattttgattgttgttgctaagtttggtctctacatagtagcttataattctcgacaccttatttggattgtcgacgccacttgttacacaacaaccagtgataacacataattatgttttattttgattgttgttgttaattttagagatcattttactttttcgtaatcagtctaagaagttatacaagattataaaaaagggtacatttacctttttgttggttttgcttctggttaatgattttttgtgtacatttacgtttgtgtaataatagattaggggaaccagaaaaagctacgtatcattacaaacatgcagggcaagaggctgatagagatgatctagctaaggtgaaatcaattcagatacatctgaacaggtgcaccgaggctcgtaaaacaagagattggaacacacttataaaggaaacggattttgccatatccgctggtgctgattcagccccacaggttattattattaatattataaaacaaccaaatttacatattcaaataattttgctgttgttgtagctgaaatacttgtcttgtgtttgttttggttgtgatttttatgtgaagatttatgctctacaagcagaggctttgttaaaactccacaggcaccaagaggcagacacagcactgtcgagaggtccaaagtttgatgtggacgaatgtactaaagttcttggtcctattggcaatgctagcttgttagtcacacgagcgctggttgatttggcctcaggcaggtaaaactcaatactgatctgatataatatcacataactaaaacaaatttagagaaattggttaaaacttacaaacaagttaaatttgtttgtttgtggaaagatttgatgatgctgtggaagcagctcaaagggcaggtagactggatgtgaacaacagagaagcaaatggggtgatgagaaaggcgaaaggcatagcgacagctcggtcgaaaggcaatgagctgtttaaggcatcaagattttcagaggcatgtgtggcttatggggagggactagagcatgatccttacaactcagtgttgctctgcaaccgtgcggcatgtcgctccaaactcggccaattcgacaaggcaattaatgattgcaccgttgctctcaaccttagaccctcttatgccaaggctaggctaagaagagctgattgcaatgctaaggtgactaactcaatacacttctactcctacttatagattggatatcatcattttcactaacaatatctactttctacttcatacttatattattttctaatccaatttttttaatttagctaataactagtattgtattataggggtaccgatagtgacacacattaatataactaacggctctttctaatgaaatacaacaaccaaaagaaaaaaattacgtacataaatacgacacagtattatttaccttagtattaaagttaaaatacctcaaaactaaaaatattaaattaaacaaattacaacaatcaagaaattttcttttatttgtattaaaaatatatattattttaattttaaataatatatatgtattaaatgaggatagtaatacaatgcataaattaacaaataagtttataacaactaatttaccaattaaataattaatagttaataaaaaaataataaaaattgtgtaaacaaattctctttataaataaacaaaagtgtttagaaaaatattgtgtaaaaaaatttctgtaaataaatagaaatatttataaaataattacaaaattatcaaatatacaaatcactctttgtaattaaataagtttatcacaactaatttacgtatcaaatatttagtaataatgaacaaaactctttacaaatgaaaaaatgtgtaaaaaataaaattatctaaaaaaaaataaagatattggcagcaaaactacttgaattttatgttttttaacacttaatcacaaaaatttaaattttggcggcaaaacatattgagcttccgttccgttttactctttacatttttgtcaaaaaaatctcagttaggtgccacagtaaattgtccacgtgtactcgtggtaaatttttagtggttcacacaatattaattttaaaaaatagtttaaaaattatataaaaaaaataattcatttcttttcttttcttttgtcttttcctttttctttttcctgaaaccctagtttgctcctctctaacctatcttccttctcattcttcttctccattatcaccgtcaccacagtcactaccaccaaagccattggaagaacaaccaccgcagccaccaccacaccattgcagccaccaccaaaaataacaaaaaaaaaaatatatcaccataaatcacaacagccaccacaactttaacctaaatcaaaaattataaacgaaattgggacctggagatgctcaattgggatctaaaacttttcaataagggaaaaacaaaatcgatctttaattagctcaatgggacccagagatggctcagtcagagtcgtggtgcttcggctccgacgaagtccaccatgaagagagagaagagacgatagagagagagagagaaagagagggcctaggagggagaagatcgaggagagaaagagagggcagatcgagagagagagaagagacgtggagcttcggctccggtgaggtcctaggtggcaaggtagctccagatgacagatggcttaagagaaataaggagctttgacgagggcctaggtgcttcgcctccggcgagggccaccacgaagagacgagaaagagaaacagagggcctgggagggagagctgtgagagagaaagagatatttagggttttccaaatgtttaagaaagaaagaagaagaaaaaaaaagaaaaaattatttcaatttttaagtattttaaactattttttcaaacgtaatattatgtagaccactaaaaatttgctacgtgtacacaagtgtacgtatacgtggtcagtccactgtagcacttaattgagattttttaacaaaagtgtaaagagcaaaacaaaatgagagtttagtaggttttgttgtcaaaatttttatttttgtagttaagtgttaaaaaatataaaattaaggtggttttgctgaaaaaaaaatgtgtaaaacaaactctttataaataaatcaagctgtttataaataaaaaaatgtgtaaaataaaataacaaaaaaattctttatatatacacaaaattatttataaataacaaattgtgtaattttttttttcatgatatttattattgtcaaataaacatatatccaattttaaatatttctttttattttttagataagtataaaactaattaaacatatttatacctaaatatatgtatttttgtatttttacggaaatctatatagcaattaatgaagcaacttaaatcgcaactaaaatccatatagcaacaaacataaaaactacgggagtaaaccaaactataaatttgaaaaaaaaaattaaaaatgatatttattaggtaattccccttaactaacaaattgataaatctaaaagaaaaatactaattctaaccgttagaaaattttaaaataagttgcttaattttagctataatatattaaataaaatatgaaaaatcaaattaaaatatcattacatattatattttataagaagtggtactacatttacaaaaaaataaaaaaaataaaaagtggtattaaatcaatgcattaaataaaaataatattttgtgtcttattattgtaaatcttataaaaaaaattgtgcaatataattatctctataaacttataatatgatccataaaatataaagatgaatgcttagacacattttttcacatataataatagtaatatataattttaaatgggaatgatatcattttaattttattgtgaagattaaatacatcttattgtgacattcaaaaaaaaaaaaaacatgttattgtgggcacaactgtaaattgtaaatagtgtgtgcaatttatatgggtttcttattactcatatttagtttacacttcaccaaaactaccatacactagactcggtgatattaaattcgtttgtgggttacatttcaatccaaattttgtatttgggtatggtattaacaagttagtaatagagagagtatggagaacgagaaactccacatattaatataagtagactttcttaaattcttgatgttttgctgactttaaacgcacacaaattaagttatagtgtgaatagaatattggtaagcaattaaggacacttttttcttgtttgaattgtatggtgtgcagttgggaaggtgggaagcttcaatacaagattatgaggctttgctagaagagacaccagaggatgaggaggttaaaacagccttatctgaggttcaagcacaatttaggagaaaaatagctaaagactcaaataataagatggagaatggtggagcaggagccctttaaactctgcttgtttttagttcctatacaaagtacaattaatgccaatttggattatatacattagtttgcaaatgctaatgagtaatggcattctttttcatgtacaataccaatttcaagacattaattttcactcaagttattatgatagtgcacacatgtgggatgaggttatgaaatattatgatagtgcacacatgtgggatgaggttatgaaatgaatgaaaaatgtaaaaaagaaaagtgtgaattttagcgtaggagggagtggattttaatttaattctttggagaaaggaattcaacgattttatagttacattttgtagaggttttatacattttttttagtgcttttatacctatactatatcccttcaataaatcaataatttaattctccttgatttgggtttttgaaccccttttgtcttcaattaatctagttttattaattgttaattattttttaattttttttttctgataagtatgttaatttagtatgtgctgtactttgttgttactttggatcactacaacccatgtcacactagcctatcatcaactataatccaacaaagataatataagtactagcttagtgataattaaatattcattttatatatgtatctaattacaatcaatattttactaatcaatatttactgttattttgttattgtataatttatactaaaccaccaaaactgagtctcaacactattatataagctactcttaaaaaaaacactattatataagattccatacacacagaatcctcaacaataattaaaaagaaaatatatcatcatcacaatgtatattttaatatattaaaagtggttatgtaacaacaattcttaatttttttattatttttttgttaaccttaacagagagtttaacatccgttaagacgttactcaatcttataataattaaaattgactaatatttgacctatctaaatctatattgtgattgattcgtcaccattcttctcccttaaaccaaacccatattgctattgaccaaaacatatcattttgtggacatctaagaaatcaaaattaaagtgaacaaatcggcaattcagtatttgcaaattgacattccatctccattcgctttgttcacaagagagtaatgcttgaatcgatgtcacaggagctgcaatcattacaaatgggaggaaatctgattgaaaaactcaaggaaaaggaaatcggtcaagactaaattcatttggacggtcttacactgcctcttgcgacaaaaatttcattgtggagtggtcggagcttgcgattgaggatacataaaagttaggctgtgaaatcaaggctgagatagaatcttcaaaatactatcgcttactcacaatttgtacggatctacaaggagaaatgttttgatttagacaaacgaagatgtgctaaaatactctgtgagagtggaaaggtcgtcattttggagaacggtttacttctcaagccggaacatgtaaatttcatttccttatgatatatctataaaattacatccaagagtacagcagtgatgattaagtaggaaaaattataagaaacatgataacttttacatttaaaagcttagatttttcattgtatatctacccttacatatcaaattttctatactaatcatattttgaaaattatggagattgtcttttaaggacgtggtccatagaatcagcaaactcgagtctgtctccattgcgatggagaaatctctcggtagaagatcatacaacgaggttgaagacgacgatgaagatcattacatgactaatcccatcttcatctaacattggttttagaagattggcaacggtgtgaaatcaatttccatgactaattttttgagtcaatctcgttggcgaaggtccaagactttaacactgatttgtttgctatgtgaatttcttaaaacttttcttttcacaaacttcatttggttttagcaagttttcatgaccaagctaaaaaatttaggtataaagtcctttttggctccaatttattttctttgtttataacatgtacatagtacatagagtttttggtatcaagttttttaaaattcagacataagattgatataagtaatttggatcatattttgtgtaacatgccaaccagcgcagacaatctctatcaattctcaaacaacgagaatggtggaggcaagcgcaacaacgatgactctaactaacatcatggtaaaagagagaaattcaaaactccctttatgacatgatgtccgaggaagaaggaggaaaagtgtgtcaaaactcccaaagcaaggcatgcccaaacatcccagcagggcgagtcagcaataggcagtcagaaggctagcctccatctccgaagtttggcctctgcccccaaaggatggcctccatctctgaaggctggcctccatgtcaaaaggctgacctccatcttcaaaggctggcctccatctcagaagtctggcctctacctccaaaggctggcctccatctctgaaggttggcctccatctccgaaggctggcctccatctccgaaggctggcctccatctccgaaggctagcctccatctttggccaggcgcataggtaggtaccaccaactctgtccaaaccttcgatggcaggacacataggggtcgtcattgacggaccccatatggcaagtgagaccaacaaagacagagagcgctatgctcgaacactccgtcatgagcacaaaagcaacatcctggcaggcaaagaacaaggctctaagcaaccaaagcttggagagcccacgatctctttctcaaaaaggagatcctgccgaagagagttttccacacattgacccctgggtcattaccacacaaattaggaatataactgcagcaagatacatacggacaatggagcctccctcaacattcttttcaaaatcaacacatgaaaagatgaggctccaactgttgggttttatgccctaaataaaaatctttacaatctgatt

SEQ ID NO: 378690 - DNA, 2418 bp, Cannabis indica
tttttttttttgaggagagtgacttgttgaattacaacaaatagggaaatgggtcacttctgttccaaaactaagtgttatctaattcaatagacatttgtgctaagttgtgagttgttgtattccttagcctgatagtgtggcataaggatataatttagaagaaagagaatacttttttaagagattccactagagctctataatatgtgaggatggtttcttgtgcttggatgacccgaacaaggttcaagcagtctacctcaacctggtgtacagtaatttggcggtcttaacactaagttaatgcttggagtaaggatcagacctcagtctttggggacatcgtacctatgttcctacacctgttctttgtttcttgggaaggacacgactgtagggattttatgccctaaataaaacctatttcaatataattttatttgccatcaagtgttggccaaatatcatcaagtccctaaactacccctgcacataacagaattaaccaactgtctgttatgacagttggtgatctagcccctactattcagctaccacattactatataagactcgattgtttcaaacttggaggctaatttttcagagggaaaaaatgatagtaagagagagtgttcatgagctacttagggagagttgagttgttattgagtgatgtaatggtgtgacacattgcttgtgctcatcaccacaagagagttcttttacagaagtgaagcttccaagattgtgtaattgtaactgttgtaatctctcattgaagttcagctaataaagattctctcaagccattattgtggctattttctggtcgggaatgtaggcaaggtgattcaccattaccttgttcgaacctcattaaatttgtgtgttccttatgcatgtttaaagttcttgttactgggttatacttgttgcattattgtgcttgttgttgtttgatttcattgatcaatttctcttgtttattgtgttcttgtcgaggtgttgtttcacaacaatcggcatcagagctcaggtttcttggagcaagaaaagaatcaagaaagtgatctatggcttccacacgttttgaagtagacaagttcaatggagccaatgattttggactatgaagaatcaagatgaaagcatttttggttcatcaaggagtggatagccatggataaagaagagttgaaggagttgggagatgacaagaagaagattaaagaaattaaaacaaaagttcatagttccatcttgttaagtttgggaaatgaaatgttgagagaagtatcaaatgaagaaactgctctgggattatgggagaaactagcctcgatttatctgaagaaatcccttgctaacaagttatacttgaagaagaaactatacactctcaagatggacgattcgaaagaactcagaaagcaccttgatgagttcaatcaaattattctggatctcagcaacataggagtgaaaatagaagatgaagatcaggggatcttgttgctcaactcattaccaaaatcctatgaacactttgtggacacgattctatatggcaaagaaaccttggccatgacagaggtcaaggcaacactcaattccaaggaaattcagaagaaaaatgatgagaggactgatggtattgcaaacagtctatttgtgaaaaccagaaataactcaaaagatttcaggggtggatacaacaagacaaactacaagaacaatcagaataaggggcacagtcaagggtacaaacctaaagcaaaatccaagcaaggaaagcagtgttactactgcaagaaggaaggacatttcaaagatgaatgtagggcacttaaggaaaaactggacaaagaatagggacaagaaagaggtgttgcaggcattgcttttgatgattatgagtatgctgaagctttagttatgacaagtcaagaatcaggatgtgaatggattcttgattctgggtgttaattccatatgaaaccaaggagagaactgtttagtgacatcaagaagattgagggtggatcagttctgctaggagacaataaagcttgcaaaatctcaggaatgggaagtgtgttgatcagaatgaatgatggtcaagtcaaactcatacaagaagtaatgtatgtccctgaactaaagagaaatttcctttcaattagtgaacttgtatctaacggctgcactgtaaagatagatggttcaatgaaagtaacgaagggtactaggatagtaatgaaaggagacatcaaaaatgggatttactatctgcaagggaagacagttgttggaaaaacaaacttagttgtcaagaatagtgacagagacaacacaagactatggcacatgaggttaggtcatgttagtgttggaatttattttacgaggatc

SEQ ID NO: 378691 - DNA, 2231 bp, Cannabis indica
aaaaaaaactgtaatgtgacagtatttagatgcttaaaccatcaatcaccatagaaatgaaaaatccttgtttgttgatattaagctaaaaatcatattagctttcttcattatgctcttaattttctttttgttatgcattgattttgtttctcttttctcttttactgtttaggacgccatcttgatgacacatgggtggcatatattggtaatgattgtcaaagaaagttgaagtggcagaagcttaattcaggcattccaagtgggagatttggacattcatgtgttgtaattggtgaacttctagttgtttttggaggaattgatgatcatgggaaccgtatgaatgacacatggattggacaattatcatgccacgagactctcggtataacattgtcatggaagctgcttgatgtgggatccattgtcccgccccaccgtggggctcatgcagcatgctgcattggtgctcggaaaatggcagtccatggaggcattgggcttaatggcttcagattgggtgacatgtgggttttagaactctctgaaaattcatgttttggaacatggcaggaggtagcagcagatccgtctcctccagctcgtgcaggacacacgctgacatgtattagtgaatctcagacagttctatttggagggagaggatcaggttatgatgtgctcaatgatatttgggtgttcaatggggacgagtgtcacaagtgggtccaaatactatatgaactacaaaacattcccggaggagggtcactccctcgagttggtcactcagctactcatatcctaggtggtcgagtgctaatatatggaggggaagattcttctagacaccggaaagacgatttctgggtgttagacttgagtgcagttccatccattggagtgcagccagatacagtgacctccaaacgaattttggcaaaaatgtggaaatgtttaagggcaaaaggttataaacccaagagccgatcattccatcgtgcctgtgttgatcattctgggtgtcatttgtatgtctttggaggaatggtggatggggtgcttcagcctgctgagccatctggcctaaggtttgatggggagctctttatggtagaacttttgcttcagctgtaaaaatgaattagaatgacgctctaagatgggttatgtcatgactacagttacatataatggtggggtccttgtacataagtagatcagcttgtagttaattgcttatatatttttcattagtttaagattgtcattgttaatttgggttcttaggtctatttaaacatttgggattgtgagatgagccgatgaagatgacaatagaaacaactcaagctcaattatgctctcttttgctgttctactaggtattaaactggtatacaaaattaggaacaaagagaaattggcatactataatttcttgaaccttacaaatgagatagttgtttcaaaatatgtgacaagagaacttacaacatcactctactttattctttaaaatatttatcaaagcactatattatatattttatatcaaatttgtacatcataccatatattaaacaatattatcacaaagaaaaatcttcattaatcaccaaacaatattacaaatcaaccaaaaacaaaagggctgctacaaaaacacccaaaacaaaaactccccactatacagttatcattcacacatgtatatatatggctttgcatactatctttcctgtaatacattatgatatctttagctatgtgcaaattagaattagaaaaaccatcaaaaacacaattgttcctgctaaatgctaatccatagctacagtgcttgccatagaagcattgagaattgaggcaataatccctgttcgctttatgttacaccaattctttacttccaagggtatggcaaaccgaactagcaaatcccccgtgagtaaatgagaattaacggcctgccaaattagaaatttgtgtttaggaatactaagtctacaccaaacaacactttagtacagaatcgaagaccattgtacaatttggctgctctaaatttaccactagaaccgtctgctatcactaggactgagcataaaatttagaaaaccaaaaaaattgtttaaactgacctaccaaactccgtaggaaccgaaaccgacataatcaaaaaccgaaaaaaccgctaacggttaaaaccaccattgaacggt

SEQ ID NO: 378692 - DNA, 14827 bp, Cannabis indica
acccagcagaatatttaacaagaagtgtgttaacttttacatgcaaactcaacacagcacactgttactttaacctaccactaaatccaataataattaaaaaaaataaaaaaaaaaaaaaaagtttacaacctcatgagaggacgacgttgtaccagaagtttggactgctgctcacacaacaataagcatgcacacaaggatattaaactcacaacaatgttaagaaaattaatgatataaggactaaagctataaagagattacaaacctgagcctgtattggtggatgcaccaccttcagaacctgcaatcatttcagaaagcttctttcttctcacgtcatcaagtttctcaagtgaccgctccaagggtctcataccgaccaactaaataaacagaccaagaagaaatattataaataatgtcaataatcaaaattcaacagaataagcaacaaccacataaaattgatacaaacaataccttagctattgcactcaaagctgaaaaggcagcatccctcacatctggagtcccatcattgaggcactgtgaaaaagcaaaaaacgtgaataaagataatagaatccatgaagcaccatgaacaggataatccatggcccaaaaaaataagttgaacagaacttttaattttgtttttcatccagattacaattacaaatcaaaataaaagatcgcctaaaccatgagtgcactacattcaccaaaaccagtattgaaactgtctcttaaaaattaacgagaataagccatgtttggcacaattaacttaactgattgttcaaaattaaaaaccttaaaacaaaatatgttacataaatgcacttacctccataaggataggcacatagtccttgtgcacctttagaataacagccttgttactcgtttcaatacagaatgttacccagttaagagttgatgaccgtacaagagggaccttatttttcacagctgtcttaatatctgcaatagacaacatccagagtagaatcttaaaaatgatcacatctaacttttaacatagtaataaatcctatgacagtaccaaattctgaatcttagaactacagagtagaataaagatatacttgccttccacaatgtcagctagacttaagcacccagctgtatgcattgcttgaagactttgatttagtgcctcagttgaagtaggttttttctctttcaatttttcctttataataagaagaaatatacatataaaaaaataataaaaaaaagcgttagataagcaattctatcaaatctgaactgaaatcagatcaaaacatatcaaagataaaacatcatttgaacttctaaaagagaatctactagtatctgtatgactaaatgtacttttcttattattaataataagaaaactgaatgtacaagtcacaatccaaacaaaatacggccatgcttcattgtgagtttactactttaattgaagtcaacactagaacatcctggttacattcaaacagtctgcgttcccatttttaggttctatgggaagaaaatataatgttattttgttaagctagcaaaacatgaacttaccagcaaaactggcaataggaagcgagaacttgcagaaaaattagttcttaaaccacgagcaagattaccaatagcttgaatagcctcaactgctacagcaatattaacatctgttacgagctgtacagaaaaaaagttgatatttattcatccattcagaaagcatgtatcaacttacataaagaattagaatagaaacatgaagtcaaaatttcatgtatcagattgagcactaaacaatgcgatgcaaaatattcttggcaatagatagagtatcaataatgcaaaccaaatacccaaacatcaagacaatgtaccttttttagtgaccgacaaatttctgagaaatcaccgggtgctatttttttgttgaagcaagcttggttagctctgcaacagcctctttccgttctgaccacttggtggctttctgtgacatacggcagaagaagtttcaaatatcattccaggaacatcaaaaataaatattcctgaattaaatcactaaaaatgagaaaaaagaagactaaccagtccatcccaaaatccagacttctccaaaggagccaagatatcaacaggatcaacaagatcatactcatctatttcctgaggagctggcaatcgatatatgttaaactacggcaaagcagacgagctaaataaccaacatttctccagaaaaataaactaataaactataacactaacatgtcaaactcctacaatggtaatcacttgttacacgccagtagaacacctacttataaatcataaaaataacaaacagtgaaaaaataatctaacaggctcaaagagtattacataccatcagctgtagattcttcagatggaccagcacccacaacttcagatacaacctccttttctggctctttatcttgctcagacctgtagtacattgatatcaataccaactaagataagaaaaaataaaaacagcaagcagaccaaacagctaattaaaaaatgaattttcaccttattttgcgacacggcttagccccccctgttacattcaccagctcagcctccaattcttttttctaaaaaaataattatatatcagttattacttccaacttccaagaatcagggagtaacaaaaaaaattatatgtaatggcgtacataaaggaacttgccataccattgtatcccgcattttctcaaataatatagattttacagggtcttttccaatccatcgacaaagctcaagtgtaagtcctttagaagatgcacggacattttgatcttgatggtcaaaaagttcaggcaacatcttcaatatcctctttggaggcacaacttttgccccaaattcactatcaaaccatacatgcaaattagacaaagaagtacaaggaagaaggaacataagcatatttcccacgaaattaaactcaatgcaaaccttaaggcttgaaacatgacatcaattgcaggtacaacagctttagcaactttggcttttattgccttctccattgcatcctgcaacaaacacaccatactaaatatcacagaaaattatgcatataaaaagatgaagttatcagagaagcacaatgcaagttatgaaaacacattcaattatacaatacaccagcattactatatgaatgaaaagaaaagacagacaatacggaattgcataccaagaaaggctccactgcctccaattcaatccaaagcatgaaaatggcctgggccttctccacagtcttaggcctaccggtaaggcatttcgccacaaccgcatcacatacttctttgccatacctatacaaaacaaaacaccataagttacacaaccaaacagaccaaaaagaaaaagcaatccaacaaacaaaaattaaataaacttgaaaagcatttcaccttccagcatcagcatcagcggctcgtaagtaagcaatcaaagcatccaatgccttctcttgcactggcgcattagaatccaccacagtcttcctaaaaaaatgtcctgagaagaacaatcatcaacaacaacaaacaaattaacacctgaaaccctaagcaaaacctccaaagttcgaacttccaaaaaacacaaaaaataaacaagtatccctattatttaccaaattcacgaagacgagcatccttaggatcagtaatggagtcacaaagcgaggccaagtcgatattagcctcatttcgaaccttccaattcttatgaaagagacgatcctcccacggcaacttcttcgcctccttcaataatttctcttcctccgacgacattctttcacaaccctatcgatctaatgaactcagcacaaaccgattcgaacaacgataacggcaatggatcgggatccagaactcagatccacttcctccaacacagaatcaaaaattcaatcgaaactcattgattccacgaagaacaacagggttttctcggatagagaacccaaaaatccgaaccagaagagcgagaaagaaagaaagagacgcactattgttgttgttgggttataatgaaattgaagatacgttatagcttttcttcttcttcttccttttttcccccgatttatttaatttaatttaattttcaaaaaaaggattacggtgtaatgaaacgacaccgttttattggttctgagattaaacgacagtgttttattaattaaacgatgaaacgacagcgtttggtcccggtggttttatgttgctttgttgaggtgtcttgatctgagccattaatttcaaattaaaggccggctttgctgagatttcacgtaatgtggggcccgatttgaatttcaccgggtactggttaggcgcgtgcacagtccttgtctttgccactactattgtgtgtatattttttacaaataataaatatttttagtcaaatattgtatataaataaataaaaaataatataaagttttgttttaatttagtttattaatggtgtgtatttattttatttttcttgtaattaattatctggaacaaatgtattgtagggacccattcaatttgaatatttgtttggtttattcaaagaagagaaattttcttccatggctaataactctatcatttaaaggtcactttgtattgtcataaagaggtatagttatttgttttcttgaggtattgattttatatcaattatcattgacaattggttaagaatttttttttttaaaattggtatgtttttggagttaagtgaaagtatctttgaaagtatctttcactatactattttaagaatttttacaaattataattttttttatttagagtgtgtttggatgtcatggtttgattagtaggtcatatagtgttatttttcaaataaaagtctaatgtaaatgtacatggaattttgatcaagataagaactactaagggatccgatgtgcataatgtttattcaaaaagttagtttgataatgtggatactatttttgacacatggcacaaagaaaacaatcttagagccccgcatcctaagatagggcggtgttacctgtacactgggggtacccaggcaagcaccaaaatctagtaaaattgtttctaggtgttatccttcaaccaagaggtcacaatgaccctaaaacgatgaaccataaggttgagtatgtcacgtggacatcccagggcttaacctaggtcggcgcccaagttgacatcttatgcgctgactcgcattagttttgtttcttaataactttctatatgcaatcttctttgccattgcactatgatacatgatagatatgccttagccaagtttcagactttggagatgagtctataataaactgtacctgggctctccagaaccctaatgggcgtccaagttgacatatagtcgacctgggcaacacaatggctagggtttaggtttttgggaacttcattagacctcgattcctcaaatccaacaaagaacaatgccagaacatgagatttcatcaactacatcctaaagaagcccaagtcaaactatgtttattttgtaatggattttcaaaaaactcggtaaatattttagtgtttttattgaaagaagaacttatgaaataaatagagcttaagaaataaacaatttaaataaaaaaaccaagaattttatgtggttggggcgttaacgagccttagtccatgagtcaatattattagcttgaaaagctttgatgtattagacaagaataatgttcttgcctaagcttaagaaccttaacttcagtcttagtatctgagtaatgacttttttgacactttgcatgaagatacaatattctatttatatgttagggtttagattgttagggttggcgtatgaagctaggcccactaatggggtaaatacatttattattgacttttggccaattaggcaaggtccgatttataatataacgatcattcacctgtgcggggtccatttaatggtgacagttgtcgtgcgctgtcagatttatacaaggaatgtcggaggatatgttgctagacagaatccctaatttggtgggattttgtattaattgtatgttgtgtaagccttagcttttagatatctttttgacagtccttccgagaatatcccatgagggtatctgaatatgtcatattggaaatggcagacccatgatttaaagtgatgagggcaaaagtaatcttaaaaaaagtgatcttggtgggatttgaacccttaacctctatcatatatttaatctaacctagtcattacaccaaaactaatattatgtctacaaacactatcttttattataaatatatgtaataactaattaaaatgcatatatatttttccctaattttttcaggagggtagatgtgggtccgcccctgtatattgggcaagaacccttcccagactcagacggttagactttataatggatgagtctaatctattaataaacatggattctcaaactgacccacccatttggactcgagaatgggccctcttaaagtgaaacaaatattgaaagtacaagtatcaccttgccagaaagacggataacatttacccccaagcctttagggctcgagaattgcagaagcttgcaacttcactttatggattcattatggtagatgaaaccatgaataattttagtcctctggaattatgagacaatgtgtcacgaatagtaataaactctacgtttcatgtgagtggaatacacgtggcatcgacttcttgtaggctacacgtcttgggaaaatgcgcgaggtgcctaggtttgtgagataatggctaatcacatcaatgagtttctcgagatgaatatcagtattgttttgcctcgattctgcacaaggcattaaatgaaaacctcttcgcatgccttggctattagatcttgtcatgcttttctgaaataggatttgggtcgttggatttgaagcacacggatccccaacttatgtataaataaaactgtggtcgaacaattaccacttttcactattttcaatttttagttccaatttttttaaaagaaaatttcacccaaagccccaatattttagtgaatgttcaaaatcatcgaggatatctacaactatcttctttgactatgtttaggactattccctaatacaccctagttatcgaaatagattcctcaaagccacacagtcgttgaacttctaggcaaacatcaacaagttcaaagggcgatttgaagcttttcaagcgagccttaggcgtattgatcgtatacctgctatcacaccttcactctccatgtataagcacttatatctagagagattgaagtacgatgaccgaataccaggtctaacatcttcactaaccacacttaattgcttcactctactccttcattttcaatttacttggatgttgttaggtcttgtgtataagggcttctcatacaattttggacttttataccctttttggtttgcatgttttgttgcttgtggtagcgtttaggacaaaatctcgttagtggagcttttacatcgatgaagataggcacatttattttttgttgctttgttgtaaaaaaattaggttttgtgaaaactatctcttttttcctgaggtcgctattgaatttttaaacttagcaaagtgttaattgttgtaataaattcctttgtccaaaatccttgcagtgccagatgaattatttagcgagcctttcctccctttctttaattcctgatctaatcgtcctagagtaatattccctacgggcgttggtcccgaatgtagggtccggtggggacctttctaagcacttaaaggggaggactctcgtgtacccttgttatatttgttagtgtggggtactagcagcttggtttctgtatctgtttccagcttctaatatggttgacacaaaccattttgtagagggtgattgttgaccgtgaggaagaaacaattcaggaagaaagaggcggaaagccggtagcagcagtcaatccatctcataataagttccacaattacatgatattgtgatcttatgacgagaagcgatctccaaaacattcttgggctttcgctaaaaggagaattaccatgctcctgtatagatagttttggtgcttagagctgggcctatgttgaagtcggagcacacctcccacttcaaagttactttgctcgtttatgtgctaaaagttggtgtggctccatttcagcttatcttgcaagtgttcaagctgctggtggggtggtatgttttttgcaaggagcaaattgtagaggtcccatctcttgatgagttcttctactattataagttggagtcgaatcccatgtggaaggataaaattaaggatagcttttattcactgaagaaacaacgtgatgtcatatgtctgacgatttcatgcaaacatacacattgtagggttgttcatcaaacctctcaaaccgcccgcactgttaaaaaaatgcactttgaaattctttgcggtcgtagtttgaatttttcctaaatcgcacggtgcggttttgaattgttaatatgcggttcaaaccgcaccgcaccgcacattataaaaatatcaattttttatatttatttaggtccaatatgtgaatgtccagcccaaagcccactaattattgtattgctgaaacttaatttttttaatatttattttaaagccttatggtatatttttttttagtttgcggtatgggtgcagtttgggaaattagaaaaactgcatgtgcgggttggtttgaaaaaatagtcaaaaaccacaccacccacactgcgaagatcccattgtaatgccctaattgaaggaacaccacgtgccgtgattactctatgctgatctcgttaattgggatctactaagccaaatggatttaaataaaatagttgataaattaaactaacttgtaataacttataactttaaaccaaaataatattacatattcgggatcccgtatttttttttaaaaaaatattacaagttatttacacaaaagccaatctaagcagcaaaatgagatttctaaggtagacccaactcttgtggtctagtttggtcgcaacatgtataatcacctgccataacagagattcggtatatattatagatgttaaggccactagcttcatgtcattattaacatttgttttggctactgcttccatcatcatatgaatgtaattcttgaggctttctcctatgtgttgcttgacgttggtcagagaactgaccttcatattagtcctttaccgttatgaatcgtttcttaaacatagattgtagacccttccagcttcgaatggattcgagagataaccttttccaccaattttcagcggattttgttaaagttaatggaaaacaaaggtatttcacattatcacttactttttccacttgcgtcaatctattgtattcggatagaccagccttgaggttcgttctaccctcatataactctacttgtggcattctaaagcttttagggcaagtgtttctattattcttctaacacatggttatgaaacctccttttctgaattagatacaatcccactttgtttttagatcagacaatctgtgagcttagttaatgcaactatctgatctttcagccacctagtatgccaatccagcaactcgttcatggatctatcgttgatgttgttcttaaggtcgcctccatgaggtttttccctttcacctttggctctatctcttttgacatttaagcatttttggaggtcggatattgacatactatcttttaggtagatgatttctactctttcgcgttggttaacataatcactagggcggttttttccatccccaaacggtaggcctcggtagttgagtaccatgcatatcgtttcgcacaactctacctcgtggatcaataaggtagctttgctttagggcataggcgaccttctttctctgtaatggttggttggctatgttcttattgtcccgtggagcatcaggagcagtttttttcgcaggttcctccatgacacctttttcttagtctttagtgggagcaggaagtctaaaatctataaggttagccttaatgtggtggtattttcttctagagttggccttttcatgagtgttttcctcaggatcgatccaggcttgttaccatgccattattttttgcatttgacgtgagaattcctcttatgctgtcaatttttatttggtctcgacgagttcctgagccatccgaattacctcgggatctggttcataataatactcttcattgtttttattatttccattgtcttcaagatcatcgtcatgttcttcttagtcttcttcgtcaatgggatcctcatcaacgtatttctcatgttgctggttctttttggcaggtcgactactcacttctgatgtctctccatctctaacaatatccatcttggcgcgtataatgggaggcagatcaccatcatccatgatagtgtccctattgcgagcggcaaaattggtgacgttggcttcaaatctttctttaactctcaatgaaagtaccaatatatttattgaaatttttagaaattgatttaaatgaaattaacgctaaagaaataaatgaaatataaatattgaaatgaggatttttacgtggtttgggtattagcaaattctagttcacgagtcaatattatttggctagaaaaaccttcgagtatcacataagtattttttgtctagtttatgaaacctaactcttttgccttaactttccaaaaagaaaatcgatcatttgcatgcaagtatcacgctatatttataggctagggtttcatgtaaacttagcccactaataaagtaaatacaagtaatatatttacattggacctattaggtgaggccctgcccatgagtcgatggttgtttgtacacgtggagacctctagcggtaacaagtggcaagtgtgcgtcgtctttgcatataattttgctagagtaatggctattggaaaattagagcatgtttgtaaacgtgattttagaccgtctttcatactctaatttaaatcaacttgatatggaatttttaatttgaattagagtcatttatcatacattacttagagagtttgacaatattttttgcttaaatattgaattctcgaatccttttacaattagggatggacctagaattaaaatttagggtgggcaacttttaaaattttaaggaggcacgtaaataaaaaataaaattataagaataatttaagcatataaaatggtattttaaagaaattacaagagcaaaatgaaggttgatcattttttagggtgggtaactgcactatcttactttggtgtaagtttgtccttgtttacagtgaaaatagtgttcttattcatagaaaaaataggaatggaccttgcaaaacttcaactaatacaaatttgccaaacatgctggctgaacacaaaaagccaaaaaagtaaaaacttaattctggaaaatcttacaaaaccaacctctatctttcttactatttttttttatatctattttatacaatttcactattattatactttgaaatttttgtacaatgtaaggaatggtatacataatttgatttcataccgcctcatttttcactcttcatatcatatgtactgttgtattagtaaacaatatagatattttttctcatcctagaattcttgcttctccttatccattttagagtattagccaacatatattgattagatttaatctacaaccatctgagtagctcttgagtgatacccctatagtagcaacattaaaaaaagatggacatgtgtttcaatagcattttcacatatcagacatctatcttcaacagtgattccaaatcaaacaagtcgatctctagtttataacctccccaagtagccatccaagcaataattagtgttttggctcactcaatctattccatataatggcatttcacttctttttctctttaggccacattgaataaatggaccttgttaaagaagggcatttgctagaaaagttgacttaaatgtggcttttctagggtgttctccccttcttgtggaggggttttccctctattgggccttcagtctaagcacaaatcaggtagtagatgcatgtggacaagacctgtccactgattatgtgataggtgagggtatgccataaaaggtagtggggaaattacaaagattatttactttatggaaaactcgctttgccgttggtatggaagggacaagctatagtccttttccctttatatgcatcgactgatggggaccacctatctcggatattatcacgcaacctgatagggtattaaaagttgtcactaatatcatccaaattttggagcaacaatacattctagcaataaaggcaacccattatgtccaacacaatccaaaattcaccgaaaaccaaattgtctacacctgcccaaactcgtccaaactcggtcactaagtgggggtttagtaatgaaatatctaaaacctaaaatttgtagtcaaaacaaaacctgcccaaatgtgcaaccctatcaacctctattcttacttattacatgttagaatcgctaggaaaagcctccatgaaaattaatataatattaaagaaaatttaaattttcaagttcaatgagagtttaacatattattaccaaatacaaaatcaaagatttgtagtagatttaaagtctataaaaagggtcatgagaagtgtcttacttattctttagcacgagaaattttagaaatattgtctgcctaaaaatttagagaaattatcccatatattatttatttattttttttaaaatttacggtttgggttgctccaatggtttctatgtggattgctatgtaaattttagttgcgatttaggttgttccgttagttgctatgagagtttttatgtggaattctgtaaaaatgtaaaaaaaaaaactactttaaagtgtaaaaataaaaaaagcccccaaaagttatagtcattcattattaatgaataagaatattgttttttgaatggtaaaaccatcaaattctgctaccaacaatggtaacaaatcagttggctcagacgccaaactgaaaatacaatcaaaatagagtaaagaagctctagcaaaactataagctactttattcgctgatcgctttacaaaatagacacaaacatctctaaacttaggaaacaaaactttacaatcattaattacattaccaaataacaaatatctctagaatctctatttcttagtaatgtgagaaacttccataaaaaataaaaattaattacttgtagaaaaaagaataaaaaaaatattctaagtaatctagcacgaaattactaaatacaaaactaaagtagtttatatggttaggaccgttaatttggcgggaaattggcgcgtaatatcttcttaatctctaccacacacatcttattctccgttaaaacaaaatttgaaaatttaaaatagtccaaacacaactatagtctaaaatactttaaatcattacataaaataaaatttatagttcaaaatattaagaattattcaagataataaaaagaatgaagaataaaacataaaaaatagaataattttttttgtttggcaactacaaggttaacactacccacattcggtgtttggctagaattcgttaatttaagttgagataaaagttaaagttattcattaaaaaaatgttaaaattaatagaaatccaaatttttgaaaaaaaaatgttaatgaaatttcgattatcaaactatataataaatttctttgttactaaaatatattaacttatttatcatatgttattaaaaaaataaaataatactataataaataaataatatatatttttaagtttgtaaaaaaatattttatatttattgaatattttatattattattattttcataaatttgtgttaggaaactataaattaaagttttttttccttaacaacctagagtttcttttatacttatattttgtttcttacatgtgataaaaaataatttaaaaaaaccaaaatttaatcgacaaaaaaattaataaataaggacataaaaaataaaaattctaaataacataaatttatatatatatatttaatcataatgaatgaagctataatataattatcattataatagaaccaataatttataacactttaaaatttataatttaatggtctctctgttttattaaataatagtagaccatgtatttttctaaatggtaaaaataagacactgactttaatttttgatatttatataatcaacttgaaaataattcgtagcacgaacataatcagttttgtcataacacctcttaattgagttattagtaaattttattttgacaaaattgacaaaaaattagttcacggttttatttgtaccattttgaaaaatacaagatttattttatcatttaataaaacagataatccaatcaataatttttgtagaacacagagttcaaaatagtatttaaccaataataaatgagaatcgctaaaaagtctaacctcatactactaatgtaattaaatatcgagtcccatataatttaaaaaaataactttaagggctcgtttggaacgccgtattaggtcgtattg

SEQ ID NO: 378693 - DNA, 1065 bp, Cannabis indica
gtgggttagagagatagatgcggtggtagtggccgcgatggtgggttgttgtgggtcgtggccgcagtagtggtctgttcagagagcgagagacaaaagagaggaagagaaagacaggtattgacaaatggaaaaagtatttttagatttaataaaaaattaacatattctacaaattttttattcataaaaaatatattctacaaattttgatacacttatgtttaacaaatcaattttggcccaataaatgaataacaaatcaaatttccctttgaatattatacatattcattaaaagatccccaaaatatttccaaggccactcttataaataaatgttatccatttcttatgtgtgtgtggaggaaagttgtgtgtttgtatccgtaaattgatgaagaaagatttttgtcattaggtaatatagacaacctcatttaatgcatggagctgtaaatagttgaaatcttttaaagactggtttccaaaaaaaaaaattcttttaaagactactcctcactaaacctttatatatactttcttttttctaataaaataagtgattgatcaaaaatttcaatgggttaaagaattaagaaagtaggggcaccttcattaagtttcttccatttaatgtgagcttgacttgagcttaatattttagtgggtctacaacttctacttgagccaaaatttgcatactgaaaatataaaaaataaaaagtagtgtcaacttcaactcttgaaaccaaatcaacacacatccctatctcttttgtagaaaaacgtttgaatgttccttgctgagcaattaaaccttaatatgtcatatcaacccaactaataaactttatcaaaattttcttacttatgttttactctttttgacacacataaatccactataatacactcttatcccatttgaaggaacaagtgatactaagagtaaataattaaagaaatttttacataataggccacaattttaaaatagttacaaaaatacgttagtattaagaagattttattttatggtttgaactttttattttaaaaaag

SEQ ID NO: 378694 - DNA, 5629 bp, Cannabis indica
ttcatagacttagttctcaccaaatgcttcatgagagaaaatggggaaaaacagtttggagaagttgcttaacatcaaaaatcaaagaattcggatgacttctagctttggtgtgacactgaacgttcatgagaaattactacgagagaagaccatattaggttttgtctcaaaaatggtgtgtacaagtaagaaagatggggtgacttttcacagttattttggaggccctttcacttgggtgttgtggcacaagatgataagagtatttggtatacagtggtgtatgcctcatacttgcagacatatgttgttgtgaaaagtgaaaggggtaggagaatttcttcacagtggacagaagccactcacactattgtcatggtagtttggctagaaagaaatggcagaatctttgaagacggtgaatgaagcagaaggcctgagggagaagaaaaaattctgggttgcaacttgggtctacaaggttaaaggatttaaggaactctccatcctagatctcagtagagattagggaaattttctgcactaagcagtatttgtctagtcattttattttacactgttatattataactgtaacggatcatatatgatctcttcactttgtatttcctgcaatattaatacaaagttgtttcttttcaaacatatatatattaagcaaaatactattactatatatagggaaattttaacaaatgaacagagttaaataggaaacacatgacatatcctacagaaaaaagaaattatgccgttcaacaatattgtacttgtgcacaactacaaagtgacataaacatcacaaatatcttactgtagcaaatgataagaaatgaaaatgtaaattgagcaagggtagaatgaagtcaagtttagactgggaaataaaccagcaagaccaaaatgaatgccacaagttgtctttatgaacaattatgttgccttagttgttctgcaattgcaacatattgcgtaggaaatttaaaatatgtaccttcatatcaggctgagtgttgaagaggcgaagcatagccagctcagctgatatagtttttccacttccagtgggagctcctaatagaacattattatctgtgtggtatagaacatgaaaagcctgccgattcccaaaaaaaaatattacacgctatttccatataatatatatatataagatatataaacaaaataaccatcaaatattgtagggttggtcagggattctagtttcaaaaaagcaaaaaaagaaagaacctgagtttgtattggattaaaatgtgaaaatttgtacaaggcttcataggtactgtttccaagtgcagtcacaggaagaggtttcaaatctagtagttctgtgtgggaagtgcgggcctgtaaaaagcagagatttatatcagacagaccctaaatgtacaattaattatcaataacattgattgtatctgataagttgaaggggacagaaaaaaaaggagatggggtgtggggggagagactacctcaggaagtgcaaggtttgagaaagatatggtatagaaagcctctgcttgcaaccaagaatcagaaacagcacgaatgtagtattgtggtggatgtggttcaaatataggcactgtgaatgaaagcttctgtggttccccttttgacattcgctttgttagggtaaaaagctccgagtgatagatatgatcattttccgtatcctgtttcgagttattcaattaaaaatctcataatcatgaaaacttgcaaccttctcattctttctcaggaaacaaacacattagtgaaaagacattagctaaaggcaagaacaacaaagtcaactaataattacaatgaagctttttttttttcttaacaagaagaaatgaaagataaatatgtaagaacaagtcctgtgaacaataacagttgcattttaactaaactttgtgtttctaataaaacaaaatacaccatatctcaacaaatatatgaatttcactctttcgacacattaagtgagaaaagaatgttgtctcaaaatgcactttctatcttgggttcacattacactttatactagggtgtaaaggtcggtttggtataaattttttcagtaaacatacaaaaagcaacttaattatgaaaaaaaaaaattgtgcagaaattaacatctaaaattggtacaacctaacctgagacttttaacatatataaaaatctataaatattttatatatttactaatttattatatagattattttatttcaaataatagcaatatttgaaataaataaatattaataaaataattataaactaaattgtaaaaatatttaaatgtttaacatttttaattttattctaaaaatattttattaaatattttaaaatgttctcatattttagtagttttataacaacagaccactctaattatatagtttatgaaacattataatattactttagcatcttgcactactttcaaataataatttaccaaatacacaatagttttatgatgcaaccgttttcttcccactgcacagccaaagctgattgataagtgaattaggactctaccaaattgactcgaagcgcatttttgaataaattcttactcttatggttaatttgacttttgtcagaaggctcacattagtatataaagtataaactgaaatcacaaagtatatttttgtcattctcagacacaagataaagaaagtacaatatagcaaaaatacaaggagcatttttgtataacaacaatagcatctacaaccaaaacataatatggaaagttactaagaaaaggtaatcatatcagcacctcaacaagaatccaccaacgttgtgcagtaccatgaaaacggtctttccatatgaaatctggtgctatgagtaaaaccacctgttcatggaagttgattatcatagcaaaggaatggagggaaaaaaattaaaaaaaaataaaataaaataaaaaataaccctgattctatttgacatgatttgataaataaacaaatatgaaaaccagccttataaaatcttgaaggtaaattatgatttccaatcaagtagctaccttcaaaacagttctggttattggacttatagttgctgataactggatccatgggaaatatcctaaatattgcttaaccacctacaatcaagccaataataaaaaagaaaggttaaatggtaaatattgtatttctcgcatggtaacagcatctacttgatggttcaatggaaaaagaaaaggttacttttcctccaggtgaataacgaacaagtgccccaatatctttttcttgcatatcttgcaagcgatataaatcagctcctctatcctccagctttcgcagtacctggacaaatgaagaaacacaatgaaaaactattcagtgttagtaaaggtcacacaaatcattaagcattatgctgacaaacctctgacgaaatatctctctcaaattgtctgagtggatgcagatggggccaaatttgacgatccacggccttgcaatattccaacatgaacaaggtcatctcacaccaacctttgcgtaaacaaatttcaaatagagcccgcataatacgagccaagcttgcacttatataagcagcatcggaaaccaaagaaaagctatcaattgagccacgagatatgtatagctgcaagtcacataaccaacgtataaattacaaaatatcaattttccattcacattttatctacaaatcaattacttgaaaaatgtaacaaattcagagctgaagtaacctggatgagaatagcaattttcccatatttattcgaaggaccacccttaatctctaacggacaggatgtacgtgccaacgtttccagctcgttctgttcctcttctcgaacaacaatattctcaaattcagaagaatgggcaaccatgtcaatcacctaaaccagaagcaagaattattgttaggccacatattctagcgataagcaattagagtttgttaatttagtgatgcctagctgtcattatgtaagtattttgtttggctattagggatctgaattgtaaggagttttgttgctaagttgtgtgcagcctagggagcaattaagagaggtcagagggttgagtataaataaactcaggagcctcatatgaggctgatcatttctgtattttggaaaagttaaactcttttttaaagatctccaagtgtctcaaaaactaggaaatttgtaactctgttttgacatcaaaaaagattaatctctagagttctagtttctatcagttatactaccaacattacaaaaccttagtatttagaagagaaaaaaataaggtaagagaattaatttcctaaaactaaatgcccaagacaaaagatcacttatcaccagataggggatcagaatttctttacaacaagatagtcttgatactagaataataaagtaataacactgaaacattttgaagaaaatcttgaaaaagtaagcatcgtggtaataaacagagcacgtcagagttaacctcgctgtcactcatatgtcttcttagcatttcattgtaagtttcaacactagaatattgaatgtaaaagtgactagcaatgcggcccagctccgtacagtaaaagttgccacttttttcatcaaatcgcatcattttcgctttgtcaagagcacgtgcagcatctgttacaagagctctttgctttaagctcaaagttggatcggccatgacctaccaaaaagcaatgcaataggccctttttagaagaatccatgctacaaatacagcatgcatcaaacaacctaaaggaaaacctcacaaaatatttcccataacatagcagttatgtcatactccaaaggaccataatactgcatcaaaaatgaaataccaatgaatgtgcaatacctcatcccagccaataccatatgccaaaggattctgtctcatcctaataaaaaggtaagtatacccaagccacgcacaagcttccttgacatttgtcacagtgcccagtgctacttctgcatttaaattgtcttttaaggagctaataaactgcaacaccaaaaagggcacactttagtattgaaaatcaaaaccaccacacctacaaccccaaaaaagaaacaccaaactaaaagattaagaagactaaagaatctatagatcaccaggcaaaagttccttccaatttttttaaggaatcagacttacattggtaataataaattgaaaggggacaaaaagaagagacccacatttcaattctttaccactctcaaacaactttatcaatacaatcttcaaaatcctgatattcgttcctaactaaagtgcccaaagtgttgccaagactataaaagtaatgtctaaccaagtaaatgatatgatattttaatttagattgatgactgttttctaattgatggttttgtgtaacatgtttactgccagtcttccaggcaaaaactttagctcttttggtaggattgagatggacccaatatgttggaatacctattacagagatcttcttttttttttttggaaaagggaatagacccacatatcgagggatcttc

SEQ ID NO: 378695 - DNA, 4950 bp, Cannabis indica
tcagttgggtttctacaaaatattaaaaaattaaatatgctttatatatcatctatctaaaaaaaatagtgttttatcaatttttgtaaaatgcaaaatgttcacatttttgctacaattattctacaaaatatagaatatattttctttaaaatattttaacttaattcatctttcgtttcctcattcttttgtataatatttaagaagctaatgtgagtggtataaattaggcaaaaagagcaattatatatgagtgttactaagttgaattttatacgattgaaaatgttatgattaatcaatttataatgtagtctcacactttacttgcacgataatataattgctgaataaaaaatgacgggaaattgtaatattgttgggcatatattcccacaaacaacgaaatgattaccaatcaaaactttggagtctgtattcaaagaacaaatatcttctgcattaaggaagaatttatataaattaaactaaagaaataaattaaggccattatttcaaatatatatactatttttctcttttcagatattattaaacaactaaattaataaaggctgctgaaggatcggaccgatacccttcctacatttgccattttaaagctaatttcgtagaatttttattataattctttaattcaaataaatgttttttaatgaggaaaagaaaaaccatactaattgattgattgaaactcattcattcaatgtaatgattaggaaaaacttgtttaaaacattttctttttcaagattagaaaaaaaaaaaaaaaattagctaagcatttagagataaatccgaaaatcgaacaacacacctgggagaaaatcatattcaaatgagaattcattcagaaagaagaagaaaaaatatacaggaacatgtacaactgagttgtgtgctattagaattgagaataaatacaaacaaatagtgtacattatgttatttttgctgtatatttaaaaaaagtccttaatgttacagaaaagaaaatgtccgattcaaatttattacctcataataacacaatttgtagtatcataattttatatcatgcttgatgatgattattgttaatttagttagtgttatttacttttctttgtaccgcagtatatttgatgatgagagtaattctccaaacttacgtaaacaaaaaaaaaaaaaaaaaactacaaccccacacatccactttcaaatgatttgagtgagtattcatattaaattataaataaatattcttttgttgttgtaaataaatgtatttttttggaaaagaaaatacaaaaagtcaattgaacaatatatatgacattgtttttttgaaaggaaatgcacttattgttgatgttaacatgtttgacaactggcaaactcatccataaaatagataatacagaaaataagataacctcaaattatataaatcaatccacttatatcccaattaaaaaccatactatataactatacaattcttttgctgctgagtcacaatctcattataggtccatggtcccacttttgcatgctgatgtgtcatcttcatctcttggtttgttcattgttgtgtagcatatatatgtttgtagtcatatgtagactgtagtgtaggttgctgtaaattactttttctattaatacacatgaattaatcttaagataatcaaacacatcaattatcactaaagttgaagtaataggcctaaacctgggcatgtaccataatatataggtcaacaaataggaacatacaatcaatgatttttcttttttttttagaaaatgcaatgaaaagttagtttataactttctatgttcaaaagactctagtctctagtcctatcttttggtattattagcaattaattgttgagcaacaattaatacatatagcaaatatctttacaaacacaatggataaggcaaaatttgaggactcataccatcacacacacacacacatatatatataaacatgtattggattgtgtagggacgtcaccacagatagcctatagttttgtgatattggtgtcttctcttctctaagaatatatgtgtggcaattcaatcctcaaaaagaagataacgtgaccctttttcccccactcaaatactcttattttccctttaaataaaataaatatttttaaaaatcccatattgttagttaattagtttccttgcacttcaatgcgaagctatccaattctgcaaaggtttattgttattgggaaacttaataaagaaaaataagataattgggcctatccctttatcctctacagttgggcaacatttagtttgaaaacacatggctttgagaaaatggataactcataaccgattcatatacacaaacacatgcaactataagctccttacaagagaaagaggtcgttttctttctcttattcttttaattgtggttatggataagctttcaaagtctcataactcatatatatatatctgtccccaaaataagatttgtccttgctgataagaaattattacaagaataatgtgattagcccctcaactagtttaataatttgcgagatagtattaacaaatgggtttcttttttttttctttctaataaaaactttatttataatgatagtgaaaggcatgcatgcatatatgcccttttggagaatttgaaaggttagagaagccactcgtatatatcatctttgagacgtggaggtggaccccatttccgattgatgctcccaaatgacaatgactcatatatggttcgacccctttgcaccaattccatagaagaagtggaaatttcaagatgtcaatttcatagctgaacatttcttttttggggtaatataataacatgggtttggccccatatatattggtaaggattttactttaattagtgcataatgtaaataaataataataatgggattgaattctaagttagcaaacttcattattcaaagcattcaaattttaaaaaatatatcttcgacttgaagagaaactcaaaacaaaaatgtgttggttacgaactaataaaaaagtaaaaatggtgaaatataatttcagcattatgttatccaaactgtgttttttattcttggtaattgtgttacacgtttagatgatgtcaacacaagaacatgattaacttcaatatttaaacacttaagtggcttattaggattgaaaatataagaatgaaaatgaccataagaataagaatagtaagggaatggaataaaatttaaaatatacataaaaaaaattaataaacaaaattattaaattttttctcaccgtgcattgaagaataatattctaatgctttaatatgcaaccaaacaaaagaatagaataaaaattgttttattttttttcattccattttattacctccaaccaaacgtcaggaaaacaaaaacaagatacttaagtgcctagttattaatactttactgtaatgagtaagatgtcagcagggaaaatctaaattttcctacctttaatcaagttagaagaaaaatgcctaccttaactttttttttttttgataactaaatacctacctaactttgattcttcatcttcttctcttttttcaacattagtttttagaggatcatgtttttgaatgtttaaattaaaaagaaaggatatttgcggtgaaaaaagtatttaattataaccttgtaatacaaattaattttttagaggagaaattaatcaaattattatattttggcactagtacaaagttatttttcttgttgtgaaagtactcaacacataaacagagtattaaaaataatttgagtacttaactattacaaatataataatatttgtatcggcaaaagaatgatctgaatagttaataattagggattattttataaatatacaaaaatataattatatggaattttaaatatttttatagtttttaagattttttttttatagaaaatatagttttttgatgtatgtttatattgtatttttattattttattattttgttatttgtatatttatttttatgttgtttagatatttatgtgattttatttcattaataaaattttactaaaaatagtaatttatgtaatttttcttaatatttataaacgaagtaattttacttcaccactaaaaagacaacgtaaatacttaaattcaacaaaggtaataaataactaatgtaactttgccgtaaatacgtggaatttttgtaaagttatttgctgataaatttgaaaaaagtaaaatgaaaacacaacaaagtagccaagcaggccttgaaggcccaaatgtaggaccagaccacactgtagagcgatatatggcagcagtacttggactacgtcagggataaggcccacaaaatccacttattcgactattcgagacgtggacagctggggcttattttttgttaagctttttccttttcttcacaaaattatgttattttaacgaaaataaagtgtgtgatagagagtatatggacacatgattattagaatttttgataaatttttatttaaagacaataataaagagtaacccaactttactctcttttttcaaatatatattaatcaaataatcattaaaaaaaaaaactgtaggtttctttattttttgaaatatgaatgctatgtgtttgttcaatggtcctatcctatcctactattagagctcatcagctgacgtgtcacgttcatctcttctctatttataattgggcttgtttggaacgctgtattaggtcgtattgtattgtatcgtataatattgaattggattatatatcatattttatataatattatgttaaattttaatttatactaaaatattacatatttaggtgtccataaaagttaataccacatatagttttacata

SEQ ID NO: 378696 - DNA, 3891 bp, Cannabis indica
aataacaaattcttatttcgagctcaaatcaatcccaaacttggtaaaactctcaagaatacttaaacaaggtctaataaacaaattccaatcaataaaatcatacaaaactcataatctcaaaattcaccattgttgagtcaagtttgagttcttaaactcacacttgctcaactccacacacaaccagcaaatcaatctcaaactagcttcaaataacttaaatacaactcaaagaaataaccaatacaaaacctagcttggacagaatctgattcaaaaaatttaatgattaactcaaactaaaaacttccaaaaactcaaataaaagaggtttaggatttgccttgatttacttatttgatttctactaaattatcatagaattttatgaagaaaattggttgaatctcctaattcttagggccgaagcaaggagaagaggaggatgaagagattttttttattttttgttttactttaaacttatttggataatgattatctaatgcttttactatattaataaaattataattatatacattattccataatccactaaatccgagtaaactctcttaggcaaagttctaaaattaccccttacttaaagttttagccaacacaaggcttagggtaaaatgatccaatagtgtaacaatgcctaatctcgatatcaaatactatttataatttttccaataaaacaaaggttctaaaccaatttatttgattctaatggccaaactatcatattttcattgttaccgagccaaaaatcataaaaaaaatataaattttcacaaatagcataaacaatacacttagagtttaataaaatctctaaaattaagaaattataatcctaatgcgtatatcttgaaaataagggtcacaatatttataatcacatatgatcataaaatataaataaataatgctaattaccctactaatccctattctaagtatgcattcattacataaattttgcatagcctcctcaaaagtctcaagctgttttgtcatcaactctgtggctgaatagaaaacataaacgatgatgtcatcccatatgttcagactaatcttgttgactggtctcgactctcttctctgtctgtctcgtgccaattggtagcccactaggttcgtctcaactcctacttgagtttagctgctccttccacaacttgttcatctattggttccacctaaactaaacactctcttctatcagctttcgaagtatactttgagctttgttccacctaaacaatatcatgatttcctttctattttctcatgtcatctgatggttcatttctttcattatatcctacactttggttagtaccacaaggaaaatcatgctcattaaatatcacatctctactaattatgatttcaatcccttcttttgttttatcccataatctatatcttttcaacccttgtagagatccaaggaaaacacatttatttgatcttggttccaattttcttatgctttgatgtgcaaatataacacatccaaaaactcttaaatgacatagatctggagctttacctgaccaaacatcctttggagttttaagatttatggaacttgaagggcatctattcaccaagtatgctattgtcattatggcttttccccaaaatcattttggcatgtttgagcttagaagcatgcacctcgctttctctgagagagtcctattcatcctctcggccacaccattcgagtgtggtgtgtgtctcagagtcatgtgcctatcgacctcatcattacagaattctaaactattatctgttctaagatgttttatcctcttattggttgcactttcagtcaaattcttctaattcttaaaagcctttaatgcatcggttttatatttcaacaaatgagcccatactttcttagaaaaattatcaatactggaaggaaaatatgcaaacccaaaaggtaaacaccttttctaatccccacaaatgaacatggaactattctaaaatttgtttaaatttatgaatacccgttttgaatctaacctatgttgcttcccatgatgtaattctcacaaaatagcatagcactatccttaccaaataaattctatttatgaagaatttacaaacttttatcactgatatggccaagcctacaataccataaatcaaccttcagctctctctgtccaaattaaactaatgcgtcttctacttcaggtagtgcaatccaccttgattttcacctttgagaatgactgatgaaccattgcatatcttcaaggtccctaagttttctttgaactcatatcttgcatcatcaattatgcttagagaaatcaaattcctagctagtttaggaacatacctcacatcgttgatttcttgaaaggttccatcatgcatcttgaacctcacattcccaactccttctatgggacatgtatgaccattacaaaagaaaaccttgtcatttcatggttcctcaaatctttaatccaatccttattgtttttcatgtgtgcaacttaattgattatccactcattcttctaagatgacctagtcgcaactagcgcttctggtgatgaatcttccatgaacacttcaaaacctttacactcttcaccataatttgtagagttctcttgataatcattcgttcttcctcctttaggccttcttcataacttataacaatatttcttgatatgacaaatcttaccatagtggtaacattttctattagtctttgggcctcttgtaagagtgattccctcaagtttgatctctttctattgagtaataagcctatgaatttctcttctgcaatctccctattttctttaacaatagctccttttgagtagatcaaaccaattatctcatcaaaagtcaaagtgtccttcgagtagataatagtgtctttgaattgttcatattggaacggtaatgaattcaacaagtaaatagatttgtctttctcctcgatcttcacctctaagctgctgagatcagaaagaaatttataaaattcatttaaatgttcatctaaaggcttactctcatcaatcttgaaactatagaacttttgtttcaagtatacttggctgggaaggcttttcatttggtcaatcttcgaccacataccatgcataatcttctttgaccccatttcttaaaacttcatcttctaaacacaagatgattgtgtttcgagccttcttgaggatattctcctaatacttctactcaattccttttagtttctttgcatcatccagccttagatttcctagatgtgccctcatcttctctctccacaggcataaattgttcttgctactaaaattcttaaaattgactttgataaaagtaatcttcttgatccttgaatcaattcctcttcgaatcttgttcttttttcttttgttcgaatccaattcttgatgtactaacaccttgagattgattcttagtctgaacccaactctgataccacttttggagattcaatccagcaccaacctcaaattcttacacacacaaacaaaataaaccaaaaagtgcaacacaaacacaagaacaaaacaatacacaatttgaaccaaatcaaagaaataacacaaccgaattatagaggttttattttccttcaacaatagttggaaagcatattcctctcttctgaactcccaataatggattcagattcttgcactaatcaattcaagttagaagttataaaccaaggcatgcaaacaatggtccttaaaaaacttttgtgtacaaatgcaactatataagtctgacattcatctcacaccaacagtagccactcatgttagataaattaacaattaacccaagatc

SEQ ID NO: 378697 - DNA, 1827 bp, Cannabis indica
aaactcaaaacttcaacggatatttatttcctcaagctctccaaaacaacccataaatgatgttacattactcattgcttctgatgagttgcagagatgtactagcctaaccactcttaggaaactccatgccaagatattctcctatgggctttaccacaccagtttatggactaaaattgctgctttgtatgtttcgtttgaaagggttgatgctgcaaagtttgcttttgaatttttgagtaacccaagtagttacttatggaatattttgataaggggttatgccactcatggtttctttggccaaagtttgatactttattgggaaatgatgcaaaagggtctgaagcctgacaagtttactttcccttttgctcttaaatgttgtgctggattgtctgatttgaatgtgggtaggttggttcatcagcatttggtgtgctgtggatgcagccatgatgtgttcgttactgctgctttgcttgatatgtacgctaaatgtggccacactgaagctgcacggttggtgtttgataaaatgtctgtgagagatgtggtctgttggacatcaatgatttctgggtatgcccacaatggttgtaacagcgagacaatggtgttcttcgatttgatgcgagcttcaggtgttcaatccaaccgggtaagtattttgagtgttcttttagcttgtggcaatttaggagctttgagaaaaggtgaatggcttcatagttatgttatccaaactggatttgagtatgatattcttgttgcaactgctgttatggatatgtataccaagtgtgggagtttagaattggctcgcaggttgtttgatgacacaccaggtaaagatgttgtttgttggagtgctatgattgctagttatggaattcacgggcaaggaagaaagtcacttgatgttttcaatgacatgttaagagcaaaagtgaaaccaaatcatgtgaccttcacctgtattctctcatcttgcagccactcaggattactagaacaaggcaagaaatgtttcgagtcaatggcaaaggatttcgggatttcaccacagctcaacaattacgcgtgcatggttgatcttctcagccgttcagggcaactatccgaagcagaggagctgatacagaacatgccagtagaagctgatgctagcatttggggttctttgcttggtgcttgcagaatctatggtaatctagatttagcagaacgaatagcagaccgcatatttgaactcgacccctttcatgccggttatcatgttctgctgtccaacatctacgcagcgaaatcaagatggaaagaggttgaaagagtaagaaggatgatggttcgaagaggaaccaacaaagttcaaggcttgagtttaattgagtttaacaatgttgttcataagtttggggtgagagacaggtctcatcctcagtcagataaaatctatgatcttctcgacgaactagttggtccaatgaaacggttggggtatgtaccattgacagactttgttcttcatgacattgaagaggaagcaaaagaggaagctcttctttaccatagtgaaaaactagccattgcttttggcctcatcaacactcctccaggtaccccaattcgtgtgactaaaaatttgaggatatgtggggattgccataatgccattaagatcatctcaagaattgttaataggattatcattgtaagagacatgcataggtttcaccattttgaggatggtcattgctcttgtggtgattactggtaagaaaccaaatatttgtttaacattgcattattattattattatt

SEQ ID NO: 378698 - DNA, 3114 bp, Cannabis indica
tttttttttaatattaagattttaatatctagtttttcaggagtatttctggatgcccttatgataaacaataaactattataaatagaagaaaatgattcattagttgcataactttattactttgttattttaatttgtatcggtttcttttaattaaaaaaaaaggcaatgcttgaaatgaaagttgtatttgctaaccaatctaaactaatttcaatccaaactaaattaattaatttaaattttatttttataataatacatcggaataataatgactcatattgttagagtatgtgtattttattatataaaaccatgtccacaagcacaagcattttgttggggaggtaggttaaaatgaagttcggttgcttgataatgaagcactccaaacattctaaactctcaatcgataaactaataggaaactaaaattaaaagataagggcaaattagggaaattcatattgattttattgaatttgagaaagatgaatctatgagcgtagaggagttcaagatagaaagtaaaaaacaccaataattgccaaacttactaaactatggattttttattgagagaatatgctcaaaactcaagggatattcctgtaattttaaaatattggcccaccaacttactaaaactgctcaactaatagaactacaacacacacatcaccacctaacactccaaacaccaacaccaacaccaacaccaacaccatagtctatttttcttttgatgtaatatataaataaaatcaagaaactcttatattttcatagcaataaataatttaaaaaaactacaaaaaaaaatgtagagaacatgattataatttgttgttggaaaaatttagacaacactaaatttatacgagtattcaaataaaattagaatatttaaaaacagatgtgcgagtactcaccaagaatagcgagtactcaagatataagctactaaatagacaaaaacaaaagcaaaaataaagaagagacaaaaaaattatagtggttcagtgagagcttgagctacttagttcacttttggtaataatttcagcttagtttatttgatttggatcacttctttatatagaaagcaagtgtcctttaggattacataactgatcggcttagaaccgtttttacaataaatgccagtatttaatcaaaataaacatttaaggaataaatgaagaaaaatttcatcaattcttaaattaagtgcaacaacgtatgcgacttaataagctgcgagttgtctattcatattccaacacacgagctcgtagactctatggtgtttgtactcccaggatggccttcaggcctatcgtttgaatgtctgcattcatctttgattgcatagttggaccttccatgtgtttgacaacgtggaacatgtgagtccctaacaagtcgtcgaacacattagtcatgcggaccgaacctatgtaaagaaacggtctttacttgtcgcagggaagatatacttggtcatcgcatataaccagtatatgcgtgactaggatcaacttctcttgatcttgcttatcctttaactatgtggggcatcacatcttctcacaagttcatatcaagcaaggttagctctacttgagctattttattgacacgtcatccttatctatcgggaatcgggtccacgtgtcagctatttacgagactgtactcgtatttctaagcgaaaaaaatcacactataacacatgtccctagttttgtgatgacaactgtttgtcaaatagcaaaactattcatgagggataagcgagttattctgtcacattgcggtggcccttgattgtcttattgagtgttttgaaaagacagccatatttattattttactttttccaagatgccatgtcattgaacccttcggggttcgtacaggcgtggtatgatattactgttagattgggtgacctttggtttgtgaatgccacatgtccagatcataacggatgggtttggttcataattaaacccccgggatacgaattgatttactttattttccctctcattttttattttcattaaaactattttctctaaaaatccaagagaaaccttttttttcaagatttcaatctccttttgttgaagattatttcgtatttcaaacagttttctaaagtgataatcgagtttagaagaacaagcctttggactaaaggttggtttttcctaaaaactttctccgtttaatgtgttttctttaagtaatcgcgcgccatctgggtttttcggggtagaatttgcatgaaaatagtaggataagttttggtaaggcaaaaaggggaatttcttggaatttttttcctatatctcgaatacttgcatattgtttatcatgaacttcgaatgctcaaacttttagctagaacacattgagtatttgcatatttcgatgatatcacattatgatcgtaaactactcgagtttgaagtggttgggtgtttcatagtgatttaatgtttatttacccgtataaaccttaagacattgtgaaacaccgaaccactatgtattaccttggtgttagttttgttgtttttgttcaatctaaatttgttatccgtgtgagagcactcctccctaaattgcactcacaatacgctgaaaagattttctatctttcaaatgagtgatctctcggacaacagccaaatatttgcatatgagggtgggatatttgcggacgaaccttagaagagcgactgttttatccccacatcacggttagaagatgagattccagcaagagtagaccaacatgactcgtggtctactgcagagataggtcacatggtccaagagttagaggcaccgattgctatcgagatacgaggaagtgagtccactatgtctgctcaagggagtttttgttggattttgtgccctaaataaaactcatttcaatataatcagatttactaattaataaagatcagaaatcgcattttatgttgcatggtacacatgatttattttatgattatatttaatttataaattctattaagtccaaaacatatgtatttgttcatgattatagtgttgtcagcacatgga

SEQ ID NO: 378699 - DNA, 653 bp, Cannabis indica
atagaagtacctgtcaattctaactccgtcaaggaaggagcgtagcaacaagataagataatttattagtaggaaaatgggaaacaaattaacaagataaggactgaattctttactttctgttctcttttgaattctttaattcatcgcccattttgattgaatagaattaacttgtataaaaaacgaataagtttgactttgtcaagtttatttgtttgcatttatattttctcaatcttttcttttcaattctttaactttctatagttataataataataataataacaacaacaataataataataataataataataataataataatgtcatgcaagtttatcattgagtatgttaataggttatggataattttgagaaggttatggctcatagtggcggcccaatataagggctaagtcttaaccataaaatatgtatcatgttatattcctgttttctaccatatatggtattatagtgttgttaaagttacatagtcaaaagagagctaatattagtttttataacatttagacatttatgagaatatattcatatataatcgaaaacttacaaaaatattatgagcatgtttggtattgttttctgttttttgttttcaaaaaattatttttagaaatgag

SEQ ID NO: 378700 - DNA, 3301 bp, Cannabis indica
tatttacttatttggaaatgaattccaccaaagcaaattaaagatttggttagggttatatatttagttaacattaacatttagattttgatatgtccaaaaataaaaatagtatgaaaaatactaattaataaatatggaataattaattatctcttaaaaaagaaaattgggagcaaataaatataaattattaaatatgaaattatcccttaattaatctttctctccaaattgttcaaaaaaaatctatttataaatagatttttatttataaaaaaggctgaaaattgactaaaacttgacgtggaaaagcatatctggaccattatcatttcacctctaacaccatttacctacttttttttcactctttttttttattattattaaaaaaagaaaaaaaaacgaaccgtacaaaagagtggtagtttgggatctataaatacttaggttccccctcctcattcatatattcgtaaaaacatatatagactataggatctgtctttgatgatattatatatataatttttcttcatcttcttctttttatttttccaaaaataattataatggaagataataataagaagaaggttttgggtttgttgttatgtattgtttgttgtttaaaccttaattatgaagatggagttgaagcctctcacatatattaccctatcgattctaatgtggaggctgttcaagtcaggcaaactcacagaactggataccatttccaacctcccaaacattggattaacggtaatacttacttactattatatatatatatatatttatatcatgttcatatcctcatctttatatatttgcatgcaacatttttttttatatatataaaaggaagttgtagttttttttttttttggttgatcgatcgatcttttttcttttgaaagggtacacatttctgaatgaaaattatgatcattgatctaattatatatatatatatattgacacccatacatataaatatagaatatttcgtgatattactgttactaaataaatttaactatatatatattaattttaaaaatattaagttattatattttgatccaataacgaataataaaagaaaatttttagtatatatacttactttaattagctacttaattaaaaaaaatatttttttttactctatatcaaaaatatgtttatctatagaaaatatttaaatcaaactcaatttttttttaatttttttttttactgaaaaatattttttcttaattttttttcaatagaaactcaatccatataatgtaaaaatgagagattaaattaattagataaaaaaattaagcttaaatactaaaatttaccaaagtaatgcccattaagtgaagataactaattaacatgaagagcaaatttttttgacaaaaacaataataattatgataatatgaatagcaatttttgaactatttatgcgatgtatgcataatatgaatagcaattaatgtacataatgatgtgatactattaaactatgcataaaataataatttattttgaaaaaatgtttgactgatttttattttttttaaatggaatatttgactgatttaagatgcataataaaattgagtgtgtgtgtatgatccgcttccatatatattgtgattttcttttaaatgggagtacatggtgggctcatatgtatgttacatatagttggaaaatctccaaagataagattgtaaaatcttgaccacatactatggggaataatgatgatacataaatgtcaggtcaattgatttttcgacctattttttcattttgtgttttattgtttcttttgtccaattttacttacttttttaaatcagaaaacatccaatttgttttgtgttatatatttggtatacattattgcgattcagacgtggaaaacttttgaagtaccagttctaatcattttttttaaaaaaaaatatattctgcctatatatgagcgacaagccttggaacttgaggctttttggctagcttattaaacatttaaacctaaagttgggtatataatatatgtttgttacatcttagatggactgattatttatatttattttataggaaaatgtagattttttgtttgtgtgtgtttgtgctggcattaatgtatttttatctatatctttttatacatgcatgatttttttggtagcatttcctcatatagaatagaagaatataattttgagtagtggaagtattcatttttacacattagttttgaattgattgaaaaagacatgtgtggcgacgggtttaggaataagactcttcctttaatttgcagtcccccggaaattattaatacataactatttttatgaatatattttttgtcactatatattaattaatgataacaatatatgatatctataatctattttttctgtaacaagcttaaaaaaaaataaaataaaataaaaaataagtgacttttttttttaataataatgcacgcatgcacatagttcttctagcataataaacaatatttgaagtttggaacaattagtaagattacataacattccaccaaatagtagtttaggaattaattttacttttatgtgtaaagttagggttactgtgtctttatttatttggatggttttttctttttctttttttttcattttaattaattatttttcattgttttgtcaacttcaataataaacaaaagtagtagagacgtacacatcgatcaacctttaaatccctttaataattatattgtactcattttgcatgatcagtatgtggtcacaagagagaccatgcaccatggtttgtccacccttatactattttacatttttattatttttatttttcatggtgcattttacattattacctttcttaatcataaactttgaatttcgccaacaaaaaaaaaaataatgaggttttaacggctaaacctttttaattgtcaatttacttgtatttaattttttaagttcaaattttggtagttaaatcctactcaactagtagcaaatttaaggttttatctagtcaactgtcactatgagtttcttatgtgtacacttttgtacacctcatatatttatattggtacctaatattattatttaaaaattattttcaaaattaaataaaattataaaaattaaaattaaaatattttaaaaattaaaaatattataaatttaaaataatttatatttttaaataataatatttagataactaatataaatttgatacatgt

SEQ ID NO: 378701 - DNA, 6674 bp, Cannabis indica
tttttgcttttctggtactgcttgaggatctggtttgtgttttttgtgttaaagaactttgatggttaagtttggttctttatgaaaagaattcgattgcttgaagctaaaaaaatcttgactttgttttcttatccgactattatcatgctgctgggatttggcttcattttcactccaaaatttttctaagaaacaaaatttgtcccttatgaatatgatttggttttgatgcgacaaatttgcctttgcgtgaggataatcttataattgaaacgtgatagctagaaatgctttatagcacttgtctaaatatagaacaatcaatttattttctcccttgatttatgaacgagggaggatctattactttggactatcaatgattgtgaactgttcacatctcatgctttggactgaagcggaaattagtatggttgtttttagagtactcaaaaactcaaatgtttgaaaattttgtacagtcaccaagaatgttctaaactcctcacttgtacattgaaaaaaagtatttgaattcagcaataacagtggtatatgttcaatgatagtgtgctataagacttgtgtagataggcttgtttgcatttatgtagcaggttattttactttctgaatggaagtaatgagcaagataggcaagttcaaagttgatatatatatatattgcttgtgtctgctgaaagagtttttatttttcctagctcactacgaatggtgaagaaaatgctaaacttttgagatcatacaggtttttgttgcttcaagattgaatgttcccggagcatggcagatgcctcaggtgatatattatagaaggatatatatgtatacaactgatgagcaaactcactttgcattggtttaacacactcaactcaatttcccaccttagctaatcttttatactgatttttcgtcattttggataatgtagggaggaattgaagagggtgaagaacctaagttggcagctattagagaactgcgagaagaaactgggattgtatcagctgaaatcattgctgaggtttgtgcaaagtatctttgttgtggctggaagctgtgtcagtcttgcaatggatatatttcaacaatgttaaactctctctgtctcaccattagatttacacttaaagcatttaatgatttactttgatttcaaaactctttaggtttatgacgaattcgatgaaacttaaattaatcaaccactctagagaattttagtcttatggaaggttgttgaaatttggaatccatgcttccattccactcaagtaggtgactgtttcaaaaactcgttagaaacagattagaaaagaaggaagtcagcaagatgatgattaacctcaatggtgattggtctattaaattctgacagactaagttttgaactatatggttgagttgaagttgtataaatttgctgctgaatgataaaaaatcccttggacagtgtttttgaaatgccatcgaaaatatgtacgaatttgcctgtattttacccaactgaggagagtatcaatgaattattagctcataattgaggttgcaaattgacaggttccaaattggttgacttatgacttccctccagctgtggtgaagaccaaagtcaatcgtctctggggaggcgaatggcatggacaagcacaaaagtggtaagtctttcttctaaaataagaaatggaaattcatatattcagttcatagagtgctagtttgctacatcgtatgcattgattattgatttttcttgttttattactgtgaaacccttctgattataacccagaataatggaaaagcggtttgtattacagacttagcatcaattttttgtttgtttaggtctcttcagctcacatagttatattcagatgaaagggaatcaggctatgtgactagatctagttgtattagatattaatggaaaacctgaacttgggagcttctgtgatcaacttctaggttattgacccttaaaagactgtttcgatacgagtctgtgtgcaatagatgtaattttttgaagtttccctttcaaaagtgccttcttctccattttcatttgatacacaaggttccttgcttcctctaccgaatataaaacaggtttgacatagaaattaaccgaaaaggttctcttattagccttgctgcttgtctgttagaaatggattttgcattattgtgaagcttaatgataaaccctcattactacattaagtaattatcgaaaattcaggttgccttaatcagctaagactaactatacttctttcaaggttcacactcattaagattactaaggtcatttcttttggttatcatctatgcgcttgaaattcctattaatcttttactctaaatatgccaaatgtttctttgatttcccataataattgagtccattatcttcaatgttgtgtaacttctctcacataaagtcttatgtaaccttcttaagtaaatataatttgctttctttttcttatactagatttacatggcctcattctactaaagatcatgtatttgaactgtaactaggtttcttatgagattaacaaaagatgagagtgaggtgaacttagctactggtgaagcagaaccagaattttcagagtggaaatgggcaaccccagaagaagttatcgagcaagtaatttatttgcggaaattttgttcaaaacaattgaatattttggtataatttgttcgagtgaatttctgattcacgagttaaattgtttcacaggcagtggactacaagaggccaacatatgaggaagttatgaaacatttcaagccttacttcataaatgaacaatcggctaaatgtaaatcaacaaaatggtgaatgttgttgtgagtgtttgttgttgttgttgttgttgttagtttattttgcccattaagtttggtttcaatggagctagctctgcttcttgtaaatggatatatgacgaaacttcaaattagtggttgctttgttacaagacaataaatcctttttttgcacaaaaagaaaatcattggtttcttaaattccattccaacaaaatagttgttttcctctccttccaagaaatgttttcacattcagtctcatttgtccccaatatccaattcagtcacaaaatttatttagagaaaatattatctttaatgatcattcacaagcaataattagcagctgtacaacactgtcactattcactaactctgactcatatgggagttgtaaattatacgcaagaataatgaactcttgttttcatagccaaaataacaactaaaagtaacaacaaaaatatagttgtgtgacatttttacatatttttactattgtggtccaaatgaataattatatacaaaatttaatgtcatttaatgcacttataataatttattgaaaatataaaataataataatacaaagtaaatataaattaaataatataataataataattatataaatcatcatttaatacaaattaatatattaactaaaatttaataataaaatataataataataattatataaatcatcatttaatacaaagtaatatattaactaaaatttaattataaaatattaaaatggcacaataataaatataaaaacattatatttattatgatgtaaattttacttcatgctatattgtaatctaaatttagattgttatgtgataaatttgtaatataatttagcatattattagagcagatttttcaaaaggtaaattatattttatagttgcattacttaatttacaatactctagttccacacattttgcttatgatttttcatttatttatttttggagaaaaatagagaaaacatacttatccattaatagacaaaatagataaagtccactatatgattatatagttagtaaagcaaactcaataataattggcttacaaaaccgtttacaataaaaagaaagaaaatcttaataacaacttaactaaagattcaataagccaccaaatatggacatctgacaaagttcacctactaatgactatcagtcaataatcttccaaaaaaaattagaaaataacaacttcattattcaaataataaataaaaaaaataataagatcaatcatattctgacactcattcacaaaagcccgacgcacataacacagggctaatagactaatctgaaagataaaaagagtaagcatgactcctttgttaagattttatgcccaaaataatattctatttcaacgaaatcttatttactacaaataaggatcagaatcatatcttgatcatgtcatatgctttattcacatatttattttatgattatatgtttaatatataagttatattatatcctaaatatagtgaaaaataattgtggttatatgcttcaaattatttagctctgctatttatcagtgcactagatttacactggcatgataatcaacgatgtggtttacttacacttggataaatacaatgccattttcagggcattagcaaagtaaacttgtatcaaatgtattgattatacaatggactggatcgatattaaaagtgaaaaaataccataaacttactattatatcttttctaactcaatataacttagttgatcataaatcaattgatctcaatcctgagatagttaagcttttaatttaattgtattgctcgagttctttgacttgttgttaccagcttacgtcttgggaactcgcggtagtgcaattaagtgagagtgttaatcatagaaattgacatatatagcttttatgttttattaaaagttaaacgatggtttcctttgagcttggctaaaggcaataaatggttaggataaaatacattgaaggataaaacagtaattttgtccctacttgattgcaagtgtctatagagaatcattgattgttgtcattaaaataataaataattatagtgtatctatattggatatataaagtgttctatgtagtcaatagtgcaattttaaatctataatggagtcaagaaaaattaataagtcaaaaaatttatttggtaaatctcacatccacttattaggagattgattacataggtccatgattcccacattgtataagataatatcatcttgtatactcaattaattgatttatttcattaattataattcgaaaaattaattatgttaaattttaaaattttcactaaattagactaaattgagaagataaagagagatatatactttacggcttattaattatttttcacttaagaaatttatactcctttatcttttaaaaaaaatatatattttataaatttaaatattttgatatttttaaaataaggtaaaatatttaaaaaaaattacatttgatttatacaattttgtttttacttttaatcttgtggtttaataattatttttcacttaataaatttatacttttctatctttaaaaagaatattttataaatttaaatattttgatgttttttaaaaataaattgaaataataaaaacaataattaccctttatttgttacaattaaaaaaataatacattgcattttgtttactattaattttatattatgttatttaattacattaaacaaaatcaataaaattatataaaaaatatcttcataaaataatgtagcaaggtggcatactgaacttgactttgtgaatgtgagcccatctttaatcttcctttggactagcccatgattctgaatccatagcagcactgacagcacctaacccggactatgaaggcctaagaattgatgtttagggctgaaaaacaggggcaccctgtaaaaagccagccattttttcattatgctctccactatttgccacatcccttttgttaaaaaaagaaaaagaaaagaaaatataacttgaagcctgcttcctcagttatcaaaatcagcttaatagaagtcccaagctcaggaaaatagtcaataattcagtctaattagaataatagtaatgagattttgtaacaaaaataattataatattatcgtcattggtgatttagtatctgaaatcaaattaaaatcgttgaagacaaaagataatgaagaaaaagaatgtaatgcgggtttgtgaagaaaattggagtataaaaggtttaaaaatcctttaatacaggcaatggttccaaattcatagcagcccaaaaagcacattacccgtactatgttgatgtttagggccctttttttcaaaaaaagaaagtagaagagaaaagcaacaataataaatgacgctataatatgaaatactttatgcctgctccctcagttattaaaacccaagcctttaatcagcttatttattgagttccagtgagtgagtgtactccaagctcaggaaaatggtcaatatttcagtgctctcttgtcaacaaaaacatttgtaatcgcccaactaattagtttattttgtgacccattatactataataaaaaacaaaattaaaattgttgaacagaaaagataataaccaaaaaattaaagaaaatgtaatgacgattggaggcgggttcgtgaaggaaaacatttgggaagtgaaaaaggaacattggagtataaaaggtttaaaaaccttaa

SEQ ID NO: 378702 - DNA, 4320 bp, Cannabis indica
ctattcgcagtggtgacattagggaaataatactgaaatgcattgtacgcgcgcattctctgcttctccctaacgtctgaattgaactttattagtgtacgaactacgttgtgatagtgatacagaaactctttcatgggtatctctcgttcctgggttcgagctctgtcagctcggaagaaaaatgcaactttcgctttgttcaattggaaaaccactcgaatatctcataatttcactagcttagttcctaacacctgcaaagaggcacccagaaactctttttgttcaatttcaactcttcacagctgtgattcttctactgctagttttggtaaataatcaactcaggcaaacctcctgtctctgcgtattttgtattgtattatatgtaacgtagtgtgtttggttttggtctgtgtgctatgtaatgtttgctagaatggttttgcgtagaacgtgtttgatgaaatgcctgtttcaggattattgcttaatagagcctgtttacacggcgttggaatcccatctcggggttgggagttggactgctgtagttccatttctggccttcctcattgttttgttaagggttctagacaattttgctcgctacccagtaatgaaccgttagattctgattcctccaatggtacatctacaagtggtgattttgtatcttcctcaggatcccatgttaaggttgatgatttcacagctgggaaggttgaggtaaagtaccaaaagcctatagattttaccacggtgaacaagaatcttcttccaactgttgttcttgttggacgcccaaatgtgggcaagtcagcgctatttaatcggtttgtatttttattatctgtagttaatttgactcaagttatcattattatttataagtttaaattgtacctttcatttatttctatcaatatagtttaattcggaggagggaggctctagtcttcaacactcctgaagatcatgttaccagggacttcagagaaggcattgcaaagttgggtgatttacgatttagagtactcgactcagctggtttagaaactgcagcgacttcaggctccattcttgacagaactgcaggcatgacggcaaatgtgcttggaagatcacagtttgcaatattcttagtcgatgcaaggttatttaatgtgtgttaaatgttttcctcatgtaaaatatacaagttgaagaaaatatatgatgacagtacattttgaaaggaaaaatcataatatttcacgacggatattggctgatagattttatttttctttttcttttcagtgtaaaatagtgtaggaattattttattttacactagagagatttatctgctaatgctattctctaacaatgagttcattgctgtagcgaggaaaatactagaaaaaaattgtttgtttcatgctcttctttttcagcatgatctttaattctttccttggtgttatcttatgctactagaattggactgcacccccttgatctggaggttggaaagtggctacggaaacatgcacactaacatcaagcttgtagtagcattgaacaaatcagaatgtttttttgatggcgaataattctcttgtctctgtagctgccgaagcatacagattaggatttggagacccaatagctatatcagctgaaacaggattgggtttacaagatctttatgaggctctgaggcctaagcttgaggattatatgctcaaagtcttgaatggtatgatgcattttattattcttttaaatgattatgcctttcttagacttatgctcttatcaaatgataagttccatggattataattgtgctcaagcatttttaagatctcaacaaatgctgtagtgtgataaattgtggatattgactgtcatgagtactgatttcatatattagcgtgtgaagcatttctctgtgtcgacactgtacaacacacatgggaactggcaatctgtgtagaacacatcttaagttattagcgttggcttatttatttttatttttgtatttatggaatttgttgtttatttgaatttactgatatcagtgacaattgtagtgtcagtgtattgaagctgtcaacttgttctcaaaatggtttaggattacaatatactttatttctcaacatttgtaaaaacaaattgacagcttggagaacaaagttaattgttcaaatgatgtattgtttaaaataatacagataggggcttttggtagggttaatcttagtatgggaatgagaatctctaaacattgtcttgtttattacaagttctgttttttttttcttttagaaaaagtgaattctatggaatgatgtactttatcgtctaagggagtgatcttaaactcatctaacatgtgggttttggattctttctgttttatacatgtgggatccacatatattaactaaaagtaacaaattataacattcttatgtacaccccttggatcaggagatagaaatagtcgtatgctatatctctgatgagtatttcttttttcccatcaccctttcaaatctgaaatcattcgacattttacaactttgaagcttagctgatctagtatgaaataggcagtctgattcctgactccgaacattataggctttcatggtagtttccctatttttcactaacttaactttggctcctctattcatgggacataggatatgatatggctccttaatttgaacctgaaattctttgacactttgatagttcaaaattttgatgccttggtaagcttggatgacctagttgggtattggtagtcttactcctggcaatgtaggcttccatgatacttgtctacatttcaataagggacattagcatgatttataacttttattttatgcatgtgattcaataatttacattattttttttttgaaggaaataatttacaccaattttatattaaccattgaatgtgataagtaattttggtcatttttgttatggtttatgttttttcaaaagatttgtctcagcttgacagaactaggaaacacgggtacttcaactgtctaagaaagctacattgattagctagttataattataaaagtaatgcatgtattcacaatctacactacctgttgtttggtcatcatatgatacttgagttgatggactaggatacctttttacttattttaactgttaccataaacttttacttgtgctagatgaagatgctgagggaagtaatttgaatcacgagactcaggacagcagttcctctgaggttgaggagagtaagttgtcattacagttagcgattgtaggaaggcccaatgttgggaaatcaacattgttgaattcattgttacgagaagagcgagttttggtgggtccagaagctggattgacaagagattctatcagagctgaattcaaatttgaagagagaactatatacctggtaaataatttttttttttaaaaatattattatcctttcttaatcaagtttggacctctttctgattccagtaatatggatccttccattcatcaatattttcacattgtgatattatatagtgctttgaggtgttcaatttctcttacaaactgcctgaacccaagtaaaccacaagaaccaaaccaaaaaaaccgacaaaagatgaaattcaaaccggaataacccaacgaaaacccaaaccctccaatgctggttgcatattatcctaatccgcccaatacaaactgctaaagatgaaactttctaataccttcctttttgggaccccatgaatattctaacttagtagtatttaagcatccgtacatgaaattttgatgaatttgaaagaaattgtattgagaagtaatctgtaatgaatgcgcgaggcatcaatttgtgttaaagagtcctgaatattgaactgctcaagatatcatcttcacatctttgtggaaattgttcttctttttgttgttgtagatgtgaagaggaaaaagaattgggaaaacctaaataggaatcgatatatttgtataggtaggactatacagactaatctacataaatgttaaaataaaaatctaatcctgtaaataaggaaaatatgtacaaatagaaataaacatctaatatcaaatctcattacatttcctatctctcaacaaaatgacatcatcaagcaagctgatttagcaattttttaaaataaaaatcattgaatattatagggattatttcacaaatacacaaaaataacaaaaagaaattacaaaaatacggtttcacgggattttaaacatttttac

SEQ ID NO: 378703 - DNA, 1556 bp, Cannabis indica
tctttctctcttttctcaacaatctggctatggataataatactgatgtgatcaaaacttttattgatttctacgagaagcttttgggatctaaattgactcaaaggaagaaggttttctatggtgtgattaaagaagggcataataattaaagttttgtgtgctcacttaagaatgttcttccaagtattattgcaaataatcaaggtaggtttattcatgggcgatacattgggcataacatcctcgtccgtcaagatttagtcaaacagtatggtcggaagcataattcgcctccttgtatgattaagatggatcttaaaagcatatgatacggtggagtggggctctctcaaggagatgctcttggctttgaattttcctaatccttttcattagtattatggacattgtcccacatagaataaatggtagagaattaagccatatataagaacatgggcacaggtatgtctcatttggatattcaatttattattgatagctcggatatttctcaaagtaaccttccttttagatatttgggcatttccatttgtgcatcttggatttccaaagctgattgtgattattattgaaaaaatagttgctagaattcatctttggagtacaagacttatttcttatgttggcgggtataccttgataaattttatttttttttagcattttatacttgttgggttcaaattatgatttcgcctaaatatgtgcttgggaagattaatagtatttgtagtgctttcttgtagagatatgtacgtttgatccttcaagttcaagccaaattgtttggacatctgtgtgtcaatctaaaaattatggtggccttgactttaggaatattgaacattggaatgtagaggcgctaagtaagtatgggtggaatattgccacaaaacgataatctttagataagatgggtgaattcggtctttattaaagtcaagattagtggagttatgagactccgaaacattcaattaagttggtattggaagaaaaatgtctaagactagattttactaatttgaactttagcatttctagaatttgttctataatttgagcaatgtttctcattatttgggatcagacacaaatttataacttgattggcttgctgggatcgactttcgattatgctggttcagtctcataattaatcttaaataactgtctattttgtgggagtactatgaagagccatagtcatcttttctttgagtgcatttttgctaaaaaagtgcaagttgctatcacctcttgggcatatatgcatgtccttaataaggacctgaaacattgtgtgaaatggcttaaaattttcaagaagtctctcaatgtcgaaggagagcagtctatttagttttattgaatgcccttgtgcataatatttggaaggcccgaaataatgtactttggaatgatcaagtttatagtaaatagtatttgtaaggaccgtcggacaccatctatttctccattggaatgatattgtctgctttgggtcaagccctcacggatttattttt

SEQ ID NO: 378704 - DNA, 2188 bp, Cannabis indica
ttttagtaataatgttagtcgtattttttgtaagaaaatagatctctttatagtggatttgattatgactcgtaaagtggtttgatgagtattttgatcacgaatggtgaggtcacacacaccacttcttattatttttgtgaaataattatgaaataccactatcatcaatctttttcttcagtgttgttattttcattcaaaattaaattaatacaaacacctaaattaacaaaagttttaagtcttaattttgaccaaggaaaaaattgtacatgtatcatattcatatgcatgtgcacgcgttgagaaagtttttatatataatacatattttatatagaataaaattaatactgattagatcgattgcaagtatttattcaattaattaaaaaattcaaactatatctagtaatgtaagtaaattataatgctgctatatatatatcatcataaacgacactacaattaaatctaatttaatatttctggtactatagctataaagagcctagattagatatcacatgaaatcatataaatatatataatgctgtttttaagggatatgtatgtatatataagcaataaaacaaatatggaaaaacatgcaatacacgcttcaatataaaacaaactacgttatattatatatataaaaataagagaaatgctaattagatgctgaaatattttttttcaatttatttttgatatcggtattcattataattacagtttatttttgtaaatttttaaaaaattttaaaaatttataatgtcgaaaatagagtttctgcatgatactctagtttatcacgcgcgttgaaaaaatttcaaacgcatttttggcactgtaaactattcgaaatttttaaaaaatttagaaggataatattgtaagtataataaatacctatgtgaaaaaaaaatattctgacatgtattttcaagcgtgaaaattgactaagagatagtaatatgagattcacagtagcactcccaaataaataaatatgcaaacgtaattgaaaaagtattataaagagtttcacacacgtacctgtccaacatatccaagctcaacaaactctcacccggtccctcctcggacttggtccgaaccaccccaccaaaaaacggtgcaagcaaaacaaaacctcttatgcgaaccggttcggtccgaaccgacccggttccaacccggacagccaaatggtgagccatgttcccacctgaggaatcacccacaacaaaaaccctctcaaaatcaatcactttcctactcaaccaatattcctcatcactatcatgatcagcctctctcctcagccactccacaacccccacggcatcttctaccgcggcggggagtttgtgttccggggcaagcctgtagtctggggagactactagggctcccaggccagaggcaagcctgaggcaacagttatgacagttaggccaaaggcgggaaccgacacaaaagccgccgccgtggaagtaaatcactaagggaattttggttgtggttgtggttgatttgggcttgtacaaacggagtgagaggtcgagtttttggtcgtaaaccatgtctttgaagacgacggagttgtcctcgtagaatggtcggaatttaaaggccatgtcggagcagcggtggacggtgccgtcgctgtagagttggaggactcccatgcaatcttccacgatgtgaggaagagaacccattggtggaagaggttattataataataataataataattagaggaaaatgttttagtttgtgtctagtgtgtatactagtagtggtagtattaatatgttttgtatgtatttataggggaagataaaaaggaaaaggataaatttggtataagagaattgttggagggtaaatgtgtaaaattattggaatatgattgaaggtggtggcatatgcatgcatggccattggtttattatggggttggtttttaattaatatggaccatacatagaaccttgatgtggctatggtactactttttgttttggacggttgaaaattatttttattgtttggggttggacattttcaaggtatatattactctatgcaacaaatttttttttactataattttttttcttcataattttgataattaaataaatattataggggtttttttatttttac

SEQ ID NO: 378705 - DNA, 5079 bp, Cannabis indica
ttttttttttttgaaaagtcaataacatatcaattaagatgtaaatatgaaggtcacggatgaatatgaaataactgttttaacctcatcaacgatgattttcctttctaaagggtttaatggtgtgtttagatgtcagattagagaataataagaataaagaatgaaattcattaacttgtttacttctataattttgttaaggaatcataatgaaatatgtattctgattccaaaataatgataacacatcaatataaatgattcctacaagtcaaataaactaacgtattctaattccaatttatcaatccaattctgtcttaaacacactattatcaataaaataaattccatcttttcaatgtgtgcatatttccaagggctttgaatcaccaaaaacatgaagaattctatctttttagtgttagtgccattgatttaggtgtgatatgattccttctattaattattccatcagacatttattaaggagaactatgccacaaccactaactttccaacccttttaagctatacataaattgtaaccatatttctccacacgtgctcctgaatctggttaggaagtaaattaatcctccagattccagagaagggaaaaagaaataacacatttcaattttcaacacaaaaacttggtctaagcacatttgagaagcagggttaaatttatttagttggaaagagaacaaattgagtttaacaatttgctcaaattcttaattaaattacctttaatctttctcctctgtaaatagaaaacatgacattttctcatcacccaacacaatcaatcccccccaaccaatcaaataaataaaaagtaaaccgtgaaataaactcagcctagaattggtctcttgtgttcttcaaagttcaaacagtggttgcagttggcttgaaacaatcaatattgcataatctaacagatctgaccatgctgctaaagctgccaacataattcaaccactcaggataacccaatttaaatgcaagatatatattaaatgccacattggccaggtttgtattgaacaaagagaaaatatatagataataaatagaaagaaatttaaaattgaagtattaatcagtataaattgctaaccggtcaatgctgttccttgccttctctggttgatccaagttattcgttttctcagatcgatcaacgctttttcttgatctttccctcttatcagtgttgacacttgacttctcaccgcggtctgtactacatctaggcttttctctctggtcaacactcggtctagaattctctctccgatctgtgcttgatctagatttttctctaaaatctgtgctctttcgagcactttctgattgttctgtaaattttccggatccatttctcaaatgtggagatttttcaatgatcgctacgaatctcttgagatgctttatgtactccgggtaaagttctaaatcacagtgattccctcctttcacccacaatggctcatatttctccttacaaagttccgccagtcgcttgccgtgggagcaatccactacatcatcagcagttccctgtccaatggcaaagacaattaaaaagttgcatggaaattttttttcctaaaagttcctcaattattacatgaaccattaataaaagttgacatgacattcaattttgaaaggaatgccctttaccaattactacatgccaatgccaactgcattacagatatgactatttgcaccagaatcattctgttacctctagaatgtatataaaacagaaattccaaaaaagcaaaaaaagaaattaactttctgaacaatcaccaattgcaatagaggtcaagcaatgttgttcttaatgatcattatgtgcaaagtcaatcgagttcagggcccacatccacttaagattcttaaataaaaatatcatctttaaatcttgtgctacttggacattgcaaatctggcaagcacttcaataccatccacaaatgtccagtcaaatatcaaacataagtgagttaaatttggtgcattcaagaaaggaaatgtaagacagataaacaaatttaagccacttccaaaaacatagaaagattccttaaaataaatatatatagaaaacattcactttaaagagtaggattaggatacttacatgaattaccagaactggacaattaacaaggggtattttgtctatattctgcacaaaatacatggaagaatcattactaacattataatttatctaagcattttgtgcaaaacatgcataaatttttagcattttaagaaggaagaccttgtaaatgtcaaaccagtaggttcgcttgacaggatacatgactcggagaccagacaagatgggactatgtagaatcacagctctcaaacttggcaaccgcgtagccaaatctagagtgggtccactaccaactgactgcccatataagataacatcttcctccttgaccccatacttctccacaaggcaccggtaagctgcttcaatatcagcataagtgttctgttcactcggctgttttcagaatccgaaaagttatacaacaatctcaaaattccattatagttaagactaactgaacttgaaaggtagaaaagtttggaatctcagttttttagaatcatttcaggttctttggaaagcaaaaggcaaattccaaaatgggttattttcttactagtctcaactttttccagagaacaaaaccccaccagaatcaaaatctcaaagtccataaattggcagactctgatagagattttcgaaacgacatcaaaaacaacaattcaactagatgtttgctaagcattcaaatccaaatcacgtaccttccctgtagatttgccgtagccagaataatcataactattgagaaaagaaaagaaaagaaattgaattagattcaccaaataaggtaagatgggtattcaaatttcaaataaaaaacaaaataaatgaagagagagagagagagagagagatgaactactaaccccaacaagttgactcggagaataacactgagttcagcaaacaactcgtacatctgacccagatcagcggcgttaccatgagagtaaaggagggttagggaagcagaagggttcttaatataaaccgcaacgatgtcgtttcctctcttggtaggaagcttcaaaacgtcgacgttttccttcctagccgccgacgcaactcctgtcatcctcagcttcccactactttcctccacctccaatccatacgacggcgggtttggcgggaagaacgcgaacttcgccgccatcgatgacgtcacagctcccatattacaccccagaataaaaattaacaaaagaaaaacaaacaatcccccaaaaagcacacaactcaatcaatctgatcatatcaaaaccaaacccaattaaattctcaactcgatgagggaaagaaaacgactttctcgaattagaaattacaatattttttgtttctatatttgtgtgttttttgttttggtacagtgagaaaacaataagagaaagttgatcttgttaactattttttagggttgggattttgctgtctcagcttcccgagatgagattagcagttggcaaggcaaacggggtttttgagtttttagagagagagagagagaagagagagaggagagagagagggttttccggcgtagaaaaggaaggcagcacgtgtgaaatgattaaagctttaagcttgggaaagaaaagaaaatgtaataaaagagaaagaaaaaattcaaaattaaaatagtattttggtgaagacgatgtatgaaaggacatttaagtacaggtggcactgtgatccggacacgtgtcctcttagggcaatgctgctctgttcatacgatgatcactatttttcttttttaaatatttattccctaactccatgttttcctaatataatatatatatgttatttttttttttctatttgcaaattctatatccaaaattattgtagtacaaaaaaaatagtccaaataattttttgagctctttctacttttacatttattaatccgcatattttgggatcgtgtaatatatttggaattggataattttatccatattctttaagttaataaattgggataattacattaaattttgtttcacaaatactgcatatcacgaattttatatatatatatatatatatatttttaagggaattagtttaaatgacttgttttttacttggccaaaaaaaagtttcgttttttataatcaccgaaagtgacaatacttatgtaaaaagcactcacttccacgactttttaaagtcaaatttcattttatttttttttcttgaaagggacatattgttttttaaaagatgaaattctaccatttaaaaaaaaatatatatatgtacaagtaatcggtcctgatataagtataacaaaaaaaaaacctcatttattagcaaattttaattttacaaatttattaactatttatatttttatatataatggttattaggagtgattaaaaaaaaaggttattaggaatttaggagagagccgttggcacttgccagcttctttgtgtatattttcaatttttgaaaaactgtcattatatttggttttagtgtaatattttattttacgacagactatagtttttgtttggttattgtaatttttttaattttttaaaaaatatatatataaatatacatatttatatgtagacaggtccgccgcacacagccagacagactagtttttgtagctttgtaaatttacttaattttcaattaggatccgaatcaaatcatctttgattttgagtacaataaatcgttagtaattagttacaaaacaaaagggaaatttcaatttttgaccctaataaaatacctcatttcaaaatatataccctccactaatttatacaaattaattccactattactcatttgtacccaaaatacccctcaaatttaattttcctattcacactctctttccgtctttccctctctttcactctctctctctc

SEQ ID NO: 378706 - DNA, 1861 bp, Cannabis indica
aaaatgaacatcagcattgccttctcatggaacattcaaacttactaataagaacaagcccagtaaagagtagcttagaagtagcatggtttagaatcggaagagaccgagttgcttccgcaaagctaggcaaaccagatgacgtaatctcaaggaaagattgtcgaacccaagtatgtatttcgttgaatacattattattcacatccctcaaaacaccctaaccacaaattcaatacaaaataatatacacatatcagttgatattccattggccaaaaacaaacatgaaatacaaacagaacagtaaaaaaaaccttgatagaagaatcgattttggaccaaacagaatgaaaagctttgtgggagtcaaattgggagttgttggaaggttttgacggagagagatcgatcctcctggctgccgccgattttcgactggaatttttcgatgatgatgctttgtgaagaagataaaaaggctgtcaaatttcgaatcaaacagtaaggactctaccacattggattaaaagaaaagtgatcatcattaacagttgaaagccaaaatgaaaaaaaaaatagagagtaacctgaatgttgtcatttgcagaggtatctgtggctgccgatggaggcggtgaagctgaagatgcagtcatggcttctgcaactgactctctctctctctctctctcactcaggagtgtcgggagtagggtagggttccatttttgcggtatttttgtttttggcgggaaatggtaactaaatggacagttttccatcaggtttgcgtatggtacttttcgtaaagttcggtctgtgtgcttcgcacggggaaaacatccattttttggattatttttttttttaaaaaaaaaacacattaaattttaaatatttttatttacataaaatacgttcttttaatatatttttagagtaatttaccgtataaatacttaagttcaatttataattattgtagttttttttaatgttttgatgtatctacttaatattttttaacaataaataaatatacatgtgtggttggattttaattttgaaaaaacatttaggatgttgttttattagattttatcacaattaaattaaattattatattaatttttttagtacaattaaccataattttgtttccaaattattgagaccgatgtaattatataactaaccaacgatgtggaatctcatggagagttcgattctggatcataatgaacgctggcggcatgcttaacacatgcaagtcggacgagaagtggtgtttccagtgacggacggatgagtaacgcgaagaacctgcccttgggaggggaacaacagctgtaaacgactactaataccccgtaagttgaggagcaaaggaaggtggatgataatttaaaaattatcttctatccgcaccattgccattcctactcgaatgtagcttattattctaaataagtatagatatctattattcactaacctttgtttagtagaggaatgaattaaaggctatggatttgattggttaatttttagtttttatttgtttggtaagtgaaatgagaaggttgtgaattgccaatgaaagtaggctttactaaaaattatatttccttaaaaaaataaaagggtcattcggccaattagttctaaaaagaacatttaaagtaaaagtaatagacgtggaatataggaggtaaagctatatgttaataattatatttagggtaaatactattttcaattttgtgttttgtaaaaattattaattgataagaccctaaactcaatttttaataatttatttttttaatataattaactttaagacaaattctaaca

SEQ ID NO: 378707 - DNA, 4209 bp, Cannabis indica
ctttccatgtgtctttagtcttttctgttcacccatcaaacaaacttttgttttgcaaataaactccattattatttaagtatttccttttcaagttttggctagtctaaaaccttatagtacactaatcttgaaatatacctgagacaagtaatttaacttttctttgtattttataggctttgtttattgtctgggttttgaagtaggaagtaaattgggaaggttgagtcattgttgttttattatatatatatatataccagtttttagtttggtttatcctttgtatatatcttttcttcctttctttgatgtacatatactaatctttttaaaaagatcagatcttttaagagttggttcagtaaatctaagttatgcctcacctcatagccttactcaagtcttgtgatgtggtttgcagatacaacagtttttgaaagagttggatggcgaattcttacaggtaccacatctaagcatcaatgaagaattttagctgagaaatgagtcaattaaaactgaggatttgaattccactgtctaatccaaatccatctaatagcctcctcacccctcccattccttccacatcatcctctttcttgacatacttttatagttactcaaagtggatgacagataggttttgtacaaatataaaaaatattcttttaaatcttagttcctcaaaactgaggagaacaagtagcaaaatatgtgtattggttaggaaaacagataatttactttcttaaattgctaataatatccttttctctttctttcttaatctcattgcattagattattctttgcaccgaagacatgattactcgttcactctgggaggctataaatacaaagcagcccaatctgaaggaagtgaaggtaatttcattaattactgtgatatcagtggctttaatctgcttctgaagttctttaaagcttttcaaacatttcatgtacatttatgcaaaatggatttttcgggatgatgctcactcacatgttgagcttgattatgctttgtaataacagatagccaagtcactgccacgcatttgctttttctctggtctcagtggagaggagatgataatgttcattgatgcttttccagaggctggtatacatttatattgatttgtatgattgttatgtttcattttatcatatactttttcacctctccatagaaaattggcctaaaattggtttaaaaattgaaaccctttttgacaatcacttcaatgctttcagcttataatggatggattttattacattctaaagatatatctgaaatcagagcctttaataatataagtactacagtacagcaatgaaaactgagttttgacttgttaaatcatatcacgtacaatgagtagttcatgtgtaattaaaaagggtcctggtttataggactagaaccagctatctttgcagcactagttccaaacagtgccgataaacctatgcaggaggtgatagaagagataatgggagaccatgaaatgatggtaagtctcttctgatttcctacataaatctatcatctctgaactatctttctcacctagaattacttatatttctccagaaatcaaaacaatgaacaagaaagctccaaatacatattccaagctccgaaggaaagaagttttgctccacggtttcccctgcagcttctgaaaatgctgacaagacctaggcttcatttgaggcaggcaatatttttctgtcgacctttgttagttgagatttattatatgtataaaaatagacctgaatatcaatattctcccaatatctccacagtgtaatccaaaattgtttgctgtagaaaagtaaatatgtaccaactatgacttggaggttcgttattcgcattcttatttgctgatcaagaaatacattccattcaggaagtacaaagaatgctattgtaatcataatgaaaataaagaggagagagagtttatcttattgcataatgccaattgaacagtaatgaaaactatatcagtaatttagcatacacgcaagcagtacatataatttgcagccagaacaagcaaaaaatttcaatgatccattccacggcattatgtacaatatgcaaattgcaaggcatattccaatgacccatattaatctgataggattatctgttgatgaaatactacactttgccagctggtgatacagggagaacatgcaagacgcctatagaaattaagaagcctgattcttcagtataattcaactggagtcatcacagtatcaagcagccaaagcattttgcataatacaagttaaacaatgtcaaggccatctaaattaaccttggacaactttgagaaacaatttgagagcataccccattctcgaatataaaagtaaatttcaaataatggtaaacccttataagagctacccttctccaagatgaaaggtaagcttgaatccaaatccaatgaactcaaacaaatgaaagatacgcttttgaataaaatgttagcatgtaaatgatttttttaatacccaataatgccgatatttaaccaatgctgcattgactgcaactgaattctatattctctccatccattaattcatacctctgttccacacttaaaatgatttcttttatctcctaaacttctaaccaagcctaagaaggaaacccactgtatcatcttccagcattacccaactcaaactcgatgctaaaagagtttaatcaaataaagaaagttaataacttcatgaggcaaagcccagtaatttgattaaccccatatcaagagcaactccacctgttgacatcagtcatcctcatcaccactctcatcgctgaagtaactaatcttcttcaacttcttcttcttctcttcctcaccacaaccaccatcaccgccgcttgcttctctcaacaacctctcgtccgcgccactatctaccaccgacgcccaattatcatcctcaaacacttccccagctccatcagaccaccccgcttcgttatcctcctcgtcttccctcttcaaattctcgccacccctcctcaatttcttcggcggaggtcgctctctcggcccgagctggttcttcggacactcgtaagataggtgaccttcggcaccacactcgtagcaccgactcttgtccctgtaaaccctcttgcggatgaactctgaggctcggccattatctgcggcgatcgaagccgttagggttctcccgttgaggaccttcccgtgcatctggcgggctgccgagacggcgtcgttccgcgatacgaactggacgaaggccacgccacggctgaggcgggtctggcggtccttgaggacagagacgcgagcgactttgccaaaggtggagaagagtgtgtggagatcggaattagtgagggagtaatcgatgttggagacgtaaagggtcgatttagaaggagctagggcacctgaaccggagctggagggtttggtcccagaggcggaggtccgtgacagttggttggcggggggagtaggagccgaagcgtaacggtaatagaaggtttcgtcatcgtcttcatcactatcgggtctcctctttttgttgttcttcttcgccattgattcgattctcaaaagactcaataacttttgtaatttattttgaacaatttttaatgctatcttaaaattccatttatcaatttcttattttttttttagcgtaatagtattaatttaatagtttaaaggtcctaagatggaatatatcatctttcctttttttctcatccctcactcacctaagctagcttttagtggctttataatataactctgaagaccttacagggaaaaaacaaaacgaaactctagaaaaacgacatcaattataaacgacattattctggaaaaacgacatcttcattatagagataggcaattttttaaaaacataattaaggataaataacattttggactctgtgttttacaaaagttaccgattggactctcttttttattaaataacaaaatggacctgtaatttccaaaatattaaaaataagatcctgagcttaatttttgacaattttttttaaaataatcaacttaaaaacaattcctaatacgaaccgatacaaaaaatgtaaacaattttgtcataacacttttagatcgattatataaattt

SEQ ID NO: 378708 - DNA, 5315 bp, Cannabis indica
tttttatttttaaggttccttgtgtatgttggattttctttttcttgtttataagtgtttttctttaaataattgtacagggctcagttagagtttgaatcttgaagctgcttaaggataagatggaattagaaagaaaggaaaaacgttgtgtggtaactcaaatcagtattggcggatttgaccgcaatgtcaaagcaaaagacctagtcaatttcttagaagatgaagttgggcttgttttcaggtgtaggttgaaaacttctttgacgcctgcagagtctcatccaaattttgaggtcattgatactgcaaatcttgagagagctgacaataacagtgtagtaccccatgcttttgtccattttgcctcacctgattcagcaactgatgctttaatgattgcagaatctggcaatcttatgttggatggcaatccactaaaggtaagtttgggacctgagaatccatatagcatgaaccagaggaggagaactattagtccgaggaagatacctgatgtgcttcttgagattggaactttagtcaaacgagatgagttctttagtgcttggagtggagctcctagaggggttgattttgttgttgatcctttcaattggacgtgcaaattttgtttcaccaaggatactgttttctcatttaaaggcatggccaagctctcaacgatgaaatgtgattttaaggtggagtttttggttagggacattaatgaaataaaaacttacactgatacatcatatttggtagttctgttgcatctggcttcatctccgcgagtttggtatagaactgctgatgatgatatcgatatacctgctccatttgatatgttggatgatgatgatccttggatacgaacaacagattttactcctagtggggcagttgggcgatgcaattattatagaatttcagttccacctcgtcatggggcaaagttgaaaaaggccatggaatatcttcgacaacagagggtgcatgagagcaacttaagatcacctcttaggatccggaaggaacctgattatggggtgtctatgtcagatcctttcttctgcattcactacaagaaagatatttcatttgagattatgttcttattgaatgttgtcatgcataaaggagtatttaatcagtaccagttttctgatgatttatttgatctactcagaagccagccattagaagtcaatgtgtctgctttgaagtacataatgtgttccatcaagcgcccggtttataatgcatatgaaaaactaaaacatgtccaagaatggttgttgagggaacctaaactcttgaagattcctagacagttggatgacattgctgaagttagaaggttggttatcaccccaactagagcctattgtctgcctccagaagctgaactctccaatagggttcttagacactttaaagaagttgctgatcgattcttaagagttacctttatggatgaaggaatgcaaaccataaatttgaatgttcttacttattttgttgctcctattgtaaaggaactcacaaataattctttcccccagaaaacaaaagtattcaatagggtcaagaacattctgactgaagggttttatttatgtggtcgcaagtactcttttttagccttttcttccaatcaattgagggatcgttcggcctggtttttcgctgaaaatggaatagtatctgtccttcacatcaaacgttggatggggaaattcaccaacagaaatgttgccaagtgtgctgctaggatgggccagtgtttttcttctacatatgctactgtagaagttccattgacagaggttaattttgaccttccagatattgagaggaatggttataatttttctgatgggattggcattattactcgtgatcttgcaatagaagttgctgagaaattaaagcttgatatagacgcaccgtcagcttatcaaattagatatgctggctgcaaaggtgttgtttcttgctggccatcaaagggtgatgggatcagactttctttgagggctagtatgaacaagtttaattctagccacactatattggaaatttgttcttggactagatttcagcctggttttctgaatagacagattataactttgttatcgacattaaaagttcctgatgaaatattctggaaaatgcaagagaccatggtttctaagttaaaccaaatgcttacagatgcagatgtggcttttaacgttcttactgcgtcctgtgctgagcaagggaatgtaccagcaatgatgttaagtgcaggtttcaagcccgattcagaacctcatttacgaggtatgttaacttgtgtaagagctgcacaactttggggccttagggaaaaggcaaggatatttgttccatctgggagatggcttatgggttgcctagatgagctaggggtgcttaaaggaggccaatgctttattcaagtctctacaccatcacttgaacactgtttctcaaaccatggttctagattcagcaagagaaggaataatcttgaagtaattaagggttttgtagtgatagcaaaaaacccttgtttgcaccctggagatgtaaggattttggaagcagttgatgcccctggtttgcaccatttgtatgactgtcttgtttttcctcaaaatggtgatcggcctcatacaaacgaagcttctggaagtgatctcgacggggacctctactttgttacatgggatgataatcttgttcccccaagcaaaaaaagctgcactcctatgcaatatgatccagcgcaagcgaagactttgccacgcgatgtcactcaaagggtaatcatctaccacttctttatcctatatttatggagtgtgagagatttcaaattgctaaatctcattgtggatattattggtaaactgttttcaaaagattacaatcattttaatttctttcataacatgacgtgcttatgaagtttctgccatcaactttgtcataaaatatcacattgtgccataatagtactttgatgaataagatttttatgaatttaattatgaaattttccaattcattgattctcacttaactactatttttttatcacttaattctctgtttattctgcaggacataatagatttcttttcaagaaatatggtgaatgagaaccttggggcaatttgcaatgctcatgtggttcatgctgacaaaagtgagcatggtgcattggatgaaaaatgcatcaaactagctgagttagcagcaacagctgttgattttccaaaaactggaattattgtagcaatgcctccacatttgaagccaagagagtaccctgattttatgggaaaagaagcatatcaatcctacccttcacctaaaattcttgggagactttaccgagtgattagagatgcgtatgatgaagatgtgtcagcatcttctgctctgaattttgcacccaaggagatcccgtacaatgcagacctcgaggtttcaggagcagacaatttcattgacgatgcatgggatctcaaaatctcttacgatgggcaactgaaaggtctgatggaacaatataaagtgaggagggaagaggagattgtaacagggcaaatttggtccatgccaaagcacaatagcaggaagcaaggggacctcaaggagagactgaagcattcttacaattcattgagaaaagaatttagacaaatgtttgagaagatggaccctgattttgagaaactcactgatgacgagaagaatatattgtatgaaaagaaggcatcagcatggtaccaggttacctaccatcctaaatgggtgacgaaaacacttgacatgttagagttggattcagctgaaaacacagtgttgctaagcttcccatggattgcagtcgattacctcacttgcatcaagattaagaagtgtggagttgaaaatgttgacactaccaaaccgatcagctcattggcaaagtaccttgttgatcggatttgacccccccaaggtttgtggtgacaaggccattctgccaattgtttttcctttcgaaagtaataattctgctgcattctgacaatgctgttagggttggaattcagtccaatttatcttcattttggaggtgaatctatgtcagagttagagagaagggcaagtgtggtagcatattaatcttagtaattttgtgtgatatattagcatgagcagtaatgatatgtcactctggaaagttatgctttctcagccccattctttcaatacaaaaaacagtgtactgagtaggcataacatgacatgttgagtttagagtaaatattgtgtgctcatattgtattattatcttaagagaaacagcttagcctcattacaaacccctcaaaaataagaataagtgaggctctgtcaaactcaattggtgtttaccaaagcttcatagcattgttaagacttgatttttacctcagttgtgttattgataatagtatcatttatgtttgtaaaaagttttctcattatgattatgatggcatagacttattatattacagctgaagccaattctcaatgattttgcttggtcttctttgccctctcttgagctttctttttcgactctcaatgaggagaagaaatagtaccaaataaatatcattagattaggacactattaaaactttacattataaaaatcattacatacaatagtaatatgtttcacaactactcctaacctaaagagagaaaaccaaaaaagggaggttgctgttgattttgtttatattaatatttttagttttttttttcacaatctaccaaaggaatattgaaaacaaaataaattcttctcctatatgtagattttccttttttttttcaaaggaaaaattagatttcttttaaaaaaaatttactaacaaattatgcaatattatatcaatagatgtgttggtatactattggattaaatattaaatactaaaattattaatttaaaacccattttaatattttttaacaaaataaatttaagatattaaataataattgatttttttaaaaaagtaaaaaaacaacaaaacccaaactatatattaaaaaattacatggttcagattaattagaatttatttaaaaagaaaaaaataacatggttgagaataatcagactgcaacaataatgtactgtttaagtattttgttgccaaattttttaaatggggaattaactgtaattttataaaagcataaagattagaggttttgctgtgattttttttttttttgggtcaaaa

SEQ ID NO: 378709 - DNA, 4528 bp, Cannabis indica
atatatatatatatatgtgttagcacattggtgaagacctttccttaagcatttataggacaaggggaggggcattgcctcataaaataaaaatgattatctatacaatatgaaattgtgaaatcaaccatgttattgtgcaatttgttcaggattattacttggctccctctgaaatttgtttcacatgtgccgctggccttaagtatacctattagatctctaattatgattcttatcgtgaaagatgaaaatgcataagctagctatgcaactattaaattgctcaaacatattctttcccttaccagtgaaccagacaaggcaacatccaaaacttctgaatctgtggtgaataagctagaaaaagcaccaaacccaagaaataatataatggccaggcctgttcccatcactaagcctatctgctccaaatcaaatcatggtaacgttgatgttttaggtcagccaagaaaaaaaaacccatgtagaaaggaggaagtagatcagattgcaaaaagaaattgtggaatctgttaacctggagaatgctgtaaatcacccggcgggactgttcataatttctttcagaataaccacttgcaagaagcgtctgagaaaaacaccatgcagtaattagaatttgcaatcttacaaccttgattagaatttgaaatgcttctgacagtctaccattcatcgaatattacagcccttccacttagatattatgtgccagaaaaagcttacttctctcccaataaagtctcattgtaaactcaaagctctagtttagttgcttattttataactgctaggatatttttttagaaattttttaacttgctctcaagaatttaataagaatttttttctctagttgatagtttaagagatatgtagaaaatacaacacctgaccagcaagtgccaaagcatcagtaagcagagatattgccaaccaaacttcagtgcatatttggtaaccagccatatttacgggaccttctcgggctgccatggatgtagctagtgttataggcgtaagcactgctatggttctaccaacaagaagaccgcctgcagaaaacaataaacgaatctataagttatcaagaaaatgcatatgtaacaaacactttggtatagataggcactgaatcatcaataagattctttcctggaccattatcataatgaactatgatttatttaagtatactagtccaagtgtcaaagtgatcaaatccccatttcttgtaacatataagtctacattgaacattctcatgacattctaaatcgtaattatacattctctttgatctgtttagacatagtcccatactctcaattcaattaattcagtaaatattgaaataatccttcgtgtgatcagatctacatattatatggtcattgacataatctctactgcatgcattggtatgaccaaaaagtaattgaaactattttttcaaccccatgagacagtatttaacctccgcctgaagatataaaatagacatttgtgagaagatgcaaaggtctataacggtctacttcatatttaaatacaatttttacatatacatgtacatatgttgtatatgatataattgagctggttttgcgtcatcaacgaataaagtttttacccaatctagattcagaagaacagtcaaatccttatattcaagaaaatcagctgtcacataagtgaacactaaactgttccattctagctcgttctatttttaaaattgaaaagagacttgtatttataaataaaaagacaagttatagaaaatgacaaggaaatcatccttacattctagctcagtaatcatcaatcattacatttatgaagttaatgaggggataattttcttccacaaacacaacccctttgtccttcagtcatttaaaattttcactgtaccttttccttgtataattttcataccacaagtaccgttttttattagatgaaaaacaatataaaccacgcatatgtaggtggcaaataacataccagatgtgagatacttgaaaattcttctcccatcgatgttagcagggattaacaacatttctccgctcaatttccaaagaagaataaaagcaatcaaatatctggtgaaaaacacatgaaagtgtctcaggaaaaaaaggcataacaatttgaagacagatatcaagttaaaattatgttaattaaataaagtttaccacatcacttgacgtactcagaaatcacagtagaaattgctgcaccctcaatccctagtccaaaactgaagatcaaaattggatccaatatagcattaagcaggttgccagcaactgatattccagaaaaaacacgtgtcactgacataattaatctatacttctgaaaagaaatgtcaatgcagaaccaaaacaatagaagaacaagagtaaaaggagataataaatgaggatttctggtcttaaacaattccaaaactcaaaccaattaaaatacggcatatttagtaggtagtctaaaaaatgctaatttatgctacaaattaaacaaaaactaaaaatgaataatactactctgaaaacagaaactggacaaaagaagacacaatgcctaagtaatgctccataaacatgagtctgtccttaggctatcactacaaacaccatcaactgtgtgatctatatcgctatttcttttataatatatttccagaatgctttgaaatattaatttctcaacaagaactattcgttggctaaacacaactggaaggaaataatttgcaatgcgtaatttacaacttcacgttcaaaattggacagaaactttaggatccatgtaggtggttaacagtaaagttcagtgacattgaaaatctacagttatattgttggaattcacaaccacataagcataggaggaggtgcagaaacacttgcctattgcataaagaggagtcttggtatccttaaatccacgaaatgtgccttgtgcagcaagtgcaattacaattggtggagcaccaaaggctcttaaggtaagaaacttttgagcaggtatccacattggtgaatcctatattcaaacacacaaaaaaactccttataatggaatacataccattaaatgaatcaacattcaaaaatgaaaatgaaaatacaagcatacaaaactaaaagctacagttgctttccataagaaaatagttcaagtttaagtaaacttgtaaaacggctaagtttgacatacaactggtacacccatgatattcataatgaagcccgacccaaggaagagagcgacagcttcagcaatgccaataatagcagctagtgataacgaagttgatactgatggaaggtatgtcttgctctggcgttcgccctggaaatctttcacaaccataaaccaaatcaaccatcaacaacactactgccgactcaaacagagaacacactaaagtgtcacaaagtccctagatttcattaccataaccaatttgggataaattttcattgctcttgttagcagatgcctgctcttcagcaacgaaagatgttgtgacattgagcaacggaacattaaagaacttagcaattacattgaacaccgtaacagacaccccaaccgcagccaattcagcagaccctaagacagtaatagttaacaaaacaagaaaattaacacataattcgctaaagcacgctagtatatatatagctataccaggatccatacctatatggccaacaaatcctgtatcaaccaacgatgtaatgggatcagcagcaagagccaaagcagcaggcaaagcaattgacattatctccggaaagagtccctcaaacttaaaaatcccatcactgtaagcacagcacacaagaaatgagttctttgaatagctcaatacatgaaaatgagggttttttaagagaaagcaaacctgaaacgacgaaggctagagacaccggaatcggaaatcgacagtcgaggcggcgtttcatccccgggagtgatttcgagttcaggctctttcgaagtggtcgagttcttctgaggcgatgatttgagcagcgaacgattccggaaacgaactgagcagatagggtttcggacgatggattgggatttagaaagtggattggttttgtgagtgtgtactgtgtgtaaacagaggagtttctgggagaaattcaacgccattgttgaattttcaccgagaaaaaatatgataagaaaatattaaaggcagtgaatctgtttgggtactgagaaagtgaagagaaaatgtaagaaaagaatcttagatgaatctaagcgtgtggcaacgataattttttaattttttaattattaattattaattttgatatcctaacgaatttaacggtttagatttcccggaactcgaaatatctcctattgggcctaaagattagtcttagagaaatttacatggtatactaacttttgttatttttttacaaaaatactgtcaggcggtatttttactttt

SEQ ID NO: 378710 - DNA, 5929 bp, Cannabis indica
ctgcttcacctagactttacacacagatgctaagcccattacattgatcaccaacacatgggctaacacagcaaagactatccaaatcaacccaagttttaataaaaaccaaattaaaatttaaatgtaagaccccaaaataaaaaagtctaaacatattatacatagacaaaataaaaatatatcaatctaagaataataatattataccaacaatctacaccaactcataaaaaattgacataacttttcaaattaattttttttttttaacaaatctaatatagatttaccataatagttaagtaatttacttctaaattctaaaaaaaatatattgattttttttatgtggccactacaaaaaatttcacttttagtcacaacaaaacttgtaactaattataaattcattcttatgttgtgactaaaaggtccatgactaaatgtattagtcacaataattacaatttattgtaacaaaatatatttttagtcacaatacttgtgactaaaactaaattagggacaacttgtatctaaatattatgttttagtcacaagtaacattttgttgtgactaaagccacatttagtcaaaaaaaaattatgttgtgactaaaaagttgtctaacagttttttgtgatgggcaaaaaaaagatatatataataaatagtctaaaatggtcatttctctaccagttttaaaatgaggacatccactaatttgctataattttcaaaaaaataaatcttcataaattctaaaataagcaaaattttagaatcatgtatattgggaccataagagtttatctttctttttctccaagtgctaagtgtatatttcctaatatgaacatttattatatatattatacattatacaaaaatatttattatattatatatatatgtggatgataaaaaatggagcattttaatataggtttaatatagagggtcttgtgcaatagcccaagttgccatatacttgggtccttgtgcaatggcccaagttaccatatacttggatcggccctttgagtaatccttaggagcaaatacggtacattgtaagctcgcaggtgttaaagtgcaaatgatagcggtgttgaggtagtggtgttcggatgttaagtgtacatgaaaaatactagtaatgctaccacaattttactttattgtacatccactactagtttggtgtagatctcatggtcgtacccttaacccctttagtttgaacgtaccttttatgtcagtatatctagtaactgaacacttattattcatcttttattagcgtgtttggatgtaaacttgtttactcttttgattcactttgttctatgtcttcttgtattcttttatgttttgatgagcatagtagagaacatctcgagttagattattgatgttgttccgtaaaattaaattagtaaaatgtgcatataggatatgatgaaaattgaaaatattgactgctagttttagtatttaattattattgaagaaataaaagaaagtaaagtatgaaagagataataatacacagttttttatgtggttaaaattctaaaataatcctagtatttgagtcactatattaaagtttgagatttttttttttttgcaacaatagtttgtgaattttggcaacttttaagcttaatcaaattcaaatccttttcaagagttatttggttgttcatccccatgccttagagccttctcgtggtgtgagatgcgaggctcatccccgagccttggagcctactcctagtgcgccattggggattcttctggggacttgagatgcaaggcttatccttgagccttggtgcaccattgggaagcgttttcgcattgcaagatgggaggcttgtcctcaagccttagagccttctcgtggtgcgccattagggagccttcttatggtgcaagatgggagactcttccccgagccttggagcctcctcgacaaattagattacatctctggccatgtttctcccgttcttcctcaaattgaaggatctagtttcctatgttttaacaatgtcattgtgttcacttttacaaaccctacacagcttatcaaaatagtattatcacatccaaagcctattttgcaattaaatttaaataaagcttctcgacagttcaattggaaagacaattacaggatttatagacacttcagttctcaaattacaacataatttacagggttctcaatgaaacagtttacaccctatccgttcatcagatcagaacttcaaaatctcataaccattttctccctttccaattgtaacagtcgagaaattagttgtttatccaatttgaatcctgccagctctgcttccttgcagatatccttacacttagccaacctcccagaagccatgtaaagtttaatcaagtccttgtaaacatcatatgtgggtgagaaacctgattcttttaaccttgcaaagtatcttgaagcccttgagacatcattcagagcaacaaaaagtctgatcacaacacgataagctggaagatcaaagagagaatttgattcctccatttcccaaaccacagctaatgcctccctatactttttctctaaacagcggctatgaatcagcgttgtatacataactatacttaggtcattccctgattgtttataccattcatataggctctcagcaatttcaaatttcccaagtctaatgcatactttcattatagatgtacagtcctgctggctcaaagttaagtcctgtctatctccgagctcatttaataagctctccacaagagcatatctttcaggattctttccaagctctataattactttagcatatgcgctggaatctaacatcatatcattatcttttgccaatgataatatcttccaagcaagatgcaagctacctcctttggtgaatcctcttaccattgcctcaatcacacttccactagccgaagccgatccaacaaacctcctcaaatcaaatggaactttcaatgcatggttcctagccagcacctcaacggtagaagctaaaatccggtcatctgggtacagatgaggttgtttctgaacccaacagaacgtctgcaaagctctttcaggaagatttagatgacccagttctcgaactgtcattgacaaggaccccttttgcagaaactttgaacacttgttgagaactaaggacacatctttttccgcaggaagattctttatctctcgagctaggccaattagaacaccagggctcttgtaaacttgcttggatagaggagcacgagaaaacattgtttcaggggtacctgccctttttacatgtttcttcggtgtaggaagccccaaaggtcgaagcatgtgaggaattgggagtggaagggatctctctctacccaacttcccaggcttttgaggtattctcccttggaaaagcgatgtaatagcctcaatttcatctggaccccaaacaatctcattaccatcttcacttccatttttttcttcaccctcttcatcagtcctatctgggggacatgtttcctttacagttttcttattcttcaaaaacaaattcgtcccaaggttgggaggaagcctagaacgcattggatattgaaggttctttgttagttttctccttgttttgggatatcccatcaaaatcactctgctatgccttgcacaattcccatatggaattgaatacgagccagcagtcaataacctacaatccattcccaagaattaagaattaggcttaggaattaggttaccaagcaagctgagttttcaacgtatttgtcatctaccaatatcatggaatacttggcatgcaacaaatccagattctaattctagtttcaaagcagactcccaaccatgattttgatgaggtgagtaccccgaaactcaatggctcaatcaatcagtcattagtaagataaaatttgtctgataagatgtgtgatggatcggtatggatggtcggatagtggaagtttaaaagcagcgaggtggtggttaccaagaatgaaataggaggctaagagtgagtgagtggtggtgcaagtgatactccagctctaaccgtactgttacgcatgatcaactacacagaataatatcaccacaacgctcctgtcctgcacatgagataagtcactgtacgtaattcagacccgacaattcttgacaccacatcaattataagactagaaaacacacaaaaataaatatgaataaaagatcataataacaaggcatgtaaaaactaatagaaattgggtttcaaacacgcgattatagtccataatcagcctctggagcctgattagcaatgtctgttcaagtcactagatagcaaactctgaatgatttagtgactatacttgagtaattgttcttaaaatccttaaattctctagaaattcgggcagcataatgtcccaacaaattataaacctataaaaaataaacacacatacaataatcccagagcagacaaataatttcagaagaaactccgactatcacagcaaacatacaagaacaataaagtactgcaagagataaagcattaacactaagcagaaaattccaacagcattccagataacagtcatacaaaccttatctcttcttttcctcttgcaataggatgtaaagcgtctctattataaactgagaaaaatggtatttctctcgctcctgaatgaatattagaatcacaatcacaaagtcatcagtaaaaggctcaaatattcatagatgcccaaaatgacaatcactaacttaagagtttcgggttttggagtgtaggggtctcgattttgggcttggcttggaccgaggatggccggggacggcggtgtggtctgggcagagggctgccacgcgagtgagggaacaagagagagggagagagcgtgagagaagagagagagaatttattttgtttcttgttttaattttaactgtttattttagttattttaatgaatttattgtttcaaaattgttagcaaatttaagatctgctcagtcattataagtgttttttttggtaggttgtatcatgtggtattatattaatagggatatgattttgtcccgttattgtactttcacggattgtaatccgtgatgtacggcagccgtcagataagagagttatttgatctgacagctgagattgatttaggggtaattagggttaaaaagtagaaacgtaccctgacactcatttaatgtactctgagacccatctaatgtaccacagaatacattccgtgaaagtacatcacgggacaaaatcgtatccctatattaatattagaaatgctaaaaggtatcagtggtgccaagtactatcctacgtgtcaatatcgctattgttctaatgaagtagcgggttccatatagtttaatataatagcttttagagagtatcgctagccaatcgcaaggcgagacgtcttaagagttttaggcaccattggtacccaatagcaatgctctattaatatatcaatatatgtagaaattttttatggtaggtacccttattttgtcctatatatatatcaatatatagaaaaaatttatggtaggtatccttgttttgtcctataaaagtgtcatatatatataaaggagaagtattaggcggtgacatgacgttctaaaattacttaaaaattatttttcttttttctccttaattttttcaattttttttaattttttaagtatcaggcgatgacatgacgctctaaaattacttgaaacacttaggtcgaactatgcttgtagagggtgaaatctacaatacggaatttgggcaccagcaacctgtcaagaacaaagagagagacaaaagttcaattgggagcaccggt

SEQ ID NO: 378711 - DNA, 2941 bp, Cannabis indica
taggaaagcacccgaggtattttaattctttatcttaacactaactacaacgacataatataataataaaattggaattacttatattcactacaccaaaatttggaagctatcaaaaatgaatttagatattggcttggatgcttactgaattagcttcgatcgaggtctcccaaagagtgatgtgtggtgaattattaattttttgtaactcattattattatttgttagaatttatgtacatcttttctactaagcttttttttactaatcaatattcttttactctaaaactagctagtgtaattatgaaacgcagggactaggttttattaataaagttgtcacacaattttttactctaataattttacatatctgattagcatttaagattagtaattaaaactaaaaaaggttaagatacactaccacacgcaaagattctgttaatactcattttttttttgttataattttaatttacttttaacgtattatattgtattttcagtttcagaggttgtacaatatccaccagtactcaatgttcacacatgagaatgaagaaaaaatcattgcaactctaaggaatcggcccatgattattggggtagaattcgagaaaccttttacgttattgttgggagactggagcatttacgatccgccttacgaatataccttaaacccagagaccaaccagtatgaaatatactatcaaaagtatgtattacttctggttggttatggtactgaagttataactcatcgggttcaaaaaatgataaatgggcgactggaagaccacgtttatactgaaaacaagccatactggattgttaggagctcgttgggaactgagtggggaataggtgggtatggacggattccgagagatacattaccattacaactagaggttccagactttgcacagccggaatttgatgcagaatcagaactacactgcctgagacacagccaaaggttcaaggaactacactgcctgagacacagccaaaggtgtttggaactacacaagttgatttgaatttgttgaagaggaatatgttgctgaagtagaagttgaaaggcaagagtatgggccaaccgaccctaatacttggttgggtagtgtgcttgaattgagagtagatgatggggatgagtagcaaaatggggttgaagatgcagaagatttgagaagtgttcatagcgaagaagaagaaccaagtggttacaagttggaatataatccaactcagaaaatagaagacttcaagtttgctttggaaatgaaatttgcaaatataacacaacttctctcaaagaatatttcatttacatggataaagagtatgttttgctggccaatgacaataagaagtttagggccaaatgcaaagcaaatgggagaccatggcttgttcatgctcatgtccaagaagataagaggacatttaaggtgacatctaacaaggaaactcacaattgtggaatagcattggataatagacacattagttccaaatggttgtccaagtatttcttagaccagtttaggatgcacccaaacatggacttcaaatccttcaaggagatgacactagacaacaagttctcaaaaatgactgagtcgcaatttatagggctaagaattatgctagggctcagttagagggatcagtagctcaacaagatgcaaaattggaggattattacaatcaggtgctagctacaaatcctggtagcacagctatgtttgagtccctatggccggtaatgcaacaaatttcgctctttacgtactcataattgtttgtgtgtgtacaaaagtatcaattctctattaaaaaaacaatgatacatgaaaataccatcactgttgagctatgtgattagatcatcatagaacatatactaatcactgtgtcgttcttaaaccagccttcattataagagttgctttgtcaagaagaagatgaattcggatttgatcacccaatgggaggtctcacaattccttgcaaggagaatgtcttcttcgatttactttcttacttgagaggagtcacttatagatgaccatttgctaacttaaatctcattattacaatttctcattatatggcaagtaaatatttttccttgagaatgatacaattaatactagtacaattacttgtgttgatgtttaataagacatttcatttttcttaactgtatttttatcatatatcaaagatagatattctaatcacattcaagagttctgatctcaatttttaaatagtagtttgaatgatggtatgactttatgtgtgtttaaactcttgagttcttccatttttttcaacctcatattttcaaaacccaattcaatcatccttttgtatatattttctcaattttcaatgctaactctttctatgattagaccaggtttaggtttacagattaagacattcccaacagctcaaaaatatatgaaactaaatagatgcatagtgtaatctcttatagtcaacacacattagcaattatatatccacacttgcaaatatttttgcatatcattttcctttgccaagatttcagttctttttctccacaacacaattaaggggtgctatttatttgcttatcttaaaatcaaaccaaaatttttatggcaaacattaatgccaacacagtgtacatatgctttgattttaagttgtattaataattttgtataagggtcaagtggaaaaagaaaataaaatggtaaaggagtcattgcatgtagattattgagttttgtttgagattgagagtagtgtgttgatgagttgtcctgttgaagattagtactgtttagatttagacttggcaattatactgaccattttgtgatcccttttaggggtgttcactaagtatccgatccaatccaat

SEQ ID NO: 378712 - DNA, 4284 bp, Cannabis indica
aggtcgcatcatctcgcgagtttcagtcaagcgaggtcaacactcagagagtcgttaattaacaactcacccaaggattggatccacgtgtcaatttcataggagactgatctcgagtgtctatggaaaaaaatttcactgtaacacatgtccttagttttgcgactaacaactatgtcattagggaaactattagagagagaggcacgcaagttattatcacgagatggtgacctttggttgtcttgtcgaggttttcgaaaagacgaatgtaattattactttatttctttgagatgccacttcctcaaaacccttcggggtatgtgcaggcgtgttctctagagaccgttggatttgaagaccttaggcattctttttccatgtgtctatattccaaagaatgaggagtatcaatatttaatcgccacaaatttaaaacaatcctcactcatttttccctctcttttcttacttttcccctttacccaaaatttcaaactttttggaattttctagagtttcaaattcttgctaattgaagacgattttaaaggcttgatcatctgcaagagcatcttagaaagaattacattgaaggttagtgagtttcttccctgtagtaattttcttttccttaaatatttgcatacattctgggatttagggatagaaaatgtatgaaacgaatagggtccataaagagaataaaatttttaggcagaatatggtattttctctgaaaaatacttgcctaaaatttgaatactcgtaaatttttatgatgaactcttgaattctcagatctctatgatatgcccttctaaatatttgcatttttgaaattagttgacatagagtaatggtctcacgttgtctcagagttttaactcttaggccatatgtaaccagttttgcttaacttcgggattttagtctatatgcacttcagttgttgtgaaaactatttgagttctcaaaatggtgggtgtttccctctaagttaatgttcatacagccgcatgccccttaggatattggaaaacaccatactatttcttgagacatgcggtcaattttttttcctgcattttgatttgaaattttattattcgggtgagaacactttctgttcgaattgcacttgcaccacgctgaaaagttcttctatctttcagattagcaatctatcggatagctagaggtacgattctggagagggcgcctttggtaatgaatctcataagagtgatagcttcatacccacctcactatctgagaaagagattcttgatggtatgactcgagaaggctcactatctactagggagatagatctcatggtacaggaattagcagagccagacaccttagaggtgcaggatagcgaatccacaatgtctgctcaaggtaatttcgcttatccacaaattgccctagacgtggaagtcgaaaagatcaaaaaggatttcaaatttcctgatcacgaggtaaaagatgatgcagatggtgaaggtagtgaaaaagatactgtggacaatgcccaactagatgagcctttttcctgtgaggacttagtctcgcgagttaaaaagtttgatctatcggcatttgaaagactaaatttaattcacattgccacttgaaaaccgatgtcaatgcagtgacctcatcttctgtttactaaccctgcatttatcccaacccaaaacgttgtggttttaattcccattcttcgttgtggagagatgcttcctttccatccttttgtaaaggttatcctaacgcactacgacgtttctcctttctaacttactcccaacagttatcgcataatccttggattctatgcaatgtatgtggaatacacgcgaggagaacccacagtcgaggattttagctatttttacgatattaaaagtgtttgtcataataatggcttctactgctttagcaaatgggccaattttgagataaatggggtagaaggcacagtttccaatatgggagattggaagtcaaagtgattttacgtatttaagatgtcagggatcaggatagactttaattgtcgacctcgtacgtcgcctattttaacacttaaccattatttttgtcattttacagaggttaacatttatctatgttcgcagatagatcggctcgatctgtgctagacaaaaattatgtggaaatcattgaggttttgagcagccttccagttcaagatcggtattggcgtctactgtgtacttttgcaaagctacgagaaaataaattaatttcggctgacgctaagcttcagcaagaagcaatatacaaaaagccttcggagaagcaaaaggaaaagatagacaagcgcctctccaaacagacctcaagacaagtatcaggtaatgtaacttaacgattactgataatactatcttaatttctcaaattcttagttctgtgtacctgttcgcagatatgactttcttgaagcaagcttcctcttttaactgtaaactgaaggtcaacattgcgagtgcctctattgcaatgccagaaaagaggaagagttaagtcaaccactactcctggggtggatctgtcaaagaaacacttgaaggtcacccaagacaaagggaagaatgtcatgatggatcctacaaccaaggcttgtgacttcatggtcttacaggagaagttcgtgagcaaaaactttgtcgccaaagtcgaggggactcctaccgaagatcttttttctcgttcagccaaacttatctcctaattgatgattgtgtactcaggggcctttgttgcaggttttaaggatctcgaccttgaaaagaaacaaaactcaactcttcaagaaggtttgaagaaatcaaagttggacgttgtttccaaagacaaagaatttaaggaccttggcaaggccagagatcaggtagaggagagggccaagaagtcaaaggaaaagaccaagaagttagaggaagagaatacaaatctcacttgtgatttggggaatgagaaggagaatgcaaagaaggcttatgaccaagctatttctgattacatctatactaccttgaccaagctactagacttcgatttcgtagttttcggactagaggccgttgaaatggctaatatttttcgcaccatgtcccctactgagactcaaggattaggtgggaaccttttccctgaggatgctaaggatacaaacactgatgaagtcacggatggcaccagcaaagtcgcagaagatcccaatgcccctgctacttaatttatttccctttcttcgaactatttatttgagcagtacacgagtactcgcactttgtattaggtatctttaagaaacttataattatctttttatgttgctctgcacgaataatgtatccttcagggataccttttcttctaagtacttatatttaccatgaatgttttatgcatttacaattgtaacttgatgcctttaaacacgtatttatctggtcgttgtttttatctatatagccatccttcacagcttggtgtgatgacatatgaacatttcaattttcatattcaatagtgaaaaaattcacaaaaattctaagtatgtaattgtgaaaatatatgaaaaaacttcaaaattcaaaagttttgaaaatttaaagattgacaaattcattggataatcaataatacaatggcacaaggtatggatataccccctatacttagataatttagagcacatataaattgactaagtatatacatttgagtactactgataataatacttcaagtgttctttattctagactctatcgaagactgagtcattgagatcagataaccggtaagttgcgttaccaatcttttcagtgattaggtaaggaccttcccaattgtcgctaaaaaccccatgcgcagagttgcatgtgttgggtatgacattacgcaatactaagtcttctactcataaacttctttctttaaccttggagttaaaatagcgtgttgtacactgttgatagtgtaatcccataatgtatagggacgccacatgtgtgattttataaactagtttaatactaatagattaattaattattagaaaccgtgataatattaaaaacttgtctgaaataaaatactaaaaactgacattataatgacataaaaaacgtgttccaggaatccctattataacaacccaaaacaactcctagcaacccagcacgtaggtcgacgaggtcaatatgtacattgctggagaagactgtcacctca

SEQ ID NO: 378713 - DNA, 7095 bp, Cannabis indica
cttatcattgtcagaccagctatagcctgacggcctcccccaccacccccctttgccaccattgctcttaacaacgttaaaccagtcatccccatcgttatgcctcctgagtttagtctcaccagattcggccgagagccgcctccctgacctcaacaccctcgctccatctgcaccctttaccaccccaaacacccttgtggtccttctcatgccaaccgatggcattgccgcagggcccaggctcccaagtgccttgactcgtggacttactaccctatcgctggactcactgagccttcgagtcgacctgcgagtcaactcagcctcgaactcggacgcgtggacagacccaaaccaccctgaacccaaaagctcagcacgaacagacctcataatcggaaacgcaaatcaaccaagatgctctccagtccgtcattatcttgactaactagtcgaagctcataaagattgaatacgactcctatatacaaaaacttacttataacttacaaacaatctattattttcttttctttttcctataaaattcttttaggactttacaaactgaaagatacaacaataatcttagaaagactcgtatgaaaaacaagaagaagaaaggtctgtcctgaaaatatctacaaaagaaaaaaaaaattgagactaaagatctaacagggaaagagacacagataaaaataaagatagataaagatctacgatcggcgagcaatcgagactgacttacagattgtttggaaggagagaaagtgagtgagagtgaagaagatgagaaaaggagggaaaccgagtttctgtgaatcgcgcggctagggtttatgataaaaatccacagtgagaagttatggggtaactactcgccgacttatgagagccgttagatctttaaatttgacggtctagatcttgccttttccgaatattggttcgctccaaagcaagagagagaaagatagtattcagcttttctttttcctttttaattaattaattaattttgaaaaaaaaagagaggagcctgatattttattcgttcatgttttggagccaggaggtgaaaagacgataaagggcttcgacgtgacgtttgggagggttgttaaacggtgcaatataattgggggctttaaggtaatttactttatttgttgaactgacaccagaaaaggcggaattaaagtcggtaattcagtaaaattaagacttaatatttaagaaaatctattaaaattgaacaggtaaaagtaaaatcagaaagaacgcggtaatttgttaaaaattaaataaataagggtcaaaacttaaatttaggaaccattttaccgtattttctttttttaaccggaaaccgacttactttcttttttcttttatttatttatttgggaattatcaaaaaataaaagtaaaggaactaccatacatacaattattgaattaactcatagaaaaaaataggtttttttaaacaagccatatgaatatatgatgttaataaaccagacaagaagagtgagatatgaaggaagttggtattaaaaaaggaaaaaataaataacaaaagtcaaggccaagagaagaaacaatgtagcttataaaatgagtaagccttaaagaaaagctttgacaccctactatcatggaaatctctaccccatgtcacatccaacagagttctatacttatcctcagagatcttaaaccaaacttacacataataatggtgacaatatctcccccactcattttccgtgactaatactccaaaatcactagcaaaagttatataaaaatatatatcataaggggcaatcttaagcatcctcttacaatgtacttaaaccccagttgacccagccaagcccacactcaatattctaatactggtttcaatggataatcaccaaaacagtgcacttatataaagtatatgctcaacccaattataatacgttcacgtataaagtaatcatatacaaagaatatgattgtttggtactagttcaaacaattggaaatagttatgcactagttatagctaagaaacaaacatatgatgtaggcattacagtgttgattcacatggagattagaacagggctttacagatgcataattaacaatagaaatagaatgccacttcaagtacttaaactaaggggcaatcagtaaagttcgattactgtgatacctaacttataataacaaaaaagtaaatggaggaaagcatgaaactaagaatttttaaaacaatttgattagaactctactctacgtaagtataatcatttatcattcatcatgaattgtttttcaatattcttgaccattagggggaagaagagtatgtccttataccattacagctgcagttcacttccttaacataaaatttcaagattaaaaattcagactgctatggtaagatggaatatatcttaagatgtatgaataaaagggagtgaagaactagcaaataaataccaaagtaatgtgatgtttaatgcaaagtttaaggcaaattatggataaagtgttaagtgtaaagcaaagatataaacagcaaataccatcgtaaaatagaagaggagcatcaaatagtatgggagtctggtccagtcatgtcacaatgactatgactggactctcctccttttcaatcactaaaggtattcaatacttaccattttagtgtatgaatgtcaatagtctgagataagaattgagaaatccatttagagtccaaaagggatgtccaataatttaacctgtctccacaattattagcacaataatattgcaaagagatacttcttcaatacaaagagttagttaacttggagcggccagcagttcaaaggcaaacttcaaagtaggcccagatatataatgcttaagaaaaagtagatttagggcatttaaattccacatatatgaaccaaaagaatttaaaaagccaacttctcaaaaacttctcaagctatattgaaatagagaatgaaaaagagtaggaatacaatacaaaaagaatgaaataaaagtcagctttgtcatgaataattctcaagatcttaaaaaaaaaaaatcactttaatggataaattaattgcagttcaatatatagttgctataaacctgcagaattggattctccataagattatatatatatttattataagacttgggggccataaagattaagaatatacacacacacatatgaggcttcatataaaggaatggaaacaaatcattgaaagggcaccacgaataagtagccaaatttatactagttcatgtagttactttaagcactttataaaaggctgcaaacagaaccaacgccttttatccttggaactccagcttggtttcacaaaatcttccaaaatatattggaacttggaatgattatatcctaatgtgaaactgtccaaatgatcttccgcaagtggactaatcatcatgtcaaatcttttgctaacacaatttcaccccacacatagcctagtactgatgaatttaagaaccaccatagctaatactaaaattcacatcacactttagaaaatcaaataacacgatcagattgcaataatttaagtaaagatttaactgagtagggaggtacattcatctagatccagtgcttgtatttctcatttaacaccgaaagtgcttgtatattcaatatgacaagaacagatttccttatttacaaacagaaggatcaaatgctgaattacaaactcaaatattatcccaaatgactataaaatcacccatcttgcaattcattgttaccttctcaacttcaagcaaaacagaagtttatatatccatctttaagcaaaacatgaaagaaagacctaaccttttctcttttcttttagactgtgctatccactagacgatcccatatgttcaagatcaaacaaacgtaaaaaattcttccaggattactacaatagatgggaaaaaagaaagaagcagaactcaaattaatactttattatcatataaataaattttagatttgcctcggtaactatctatgaatgttgaggatgatagaatgaaagattcatgtcctttctatcctttttgtcattcatttaaagtttcagcacaaaatgctaataactcacatttttcttacatatagggaaacccaaaatgctgtttcttctaattttttttttcaagacttccttggacaatctcttgcttttgagcatatcagcagaaaattagtaagtacacacttttgacaatctcttgcttctattaaaccacagatgacaaaagcaatgactaagcaagcaaagcaattaagcaaaatgaccgtattaaataatggaaaggtcagacacataaccgttgtatgatcaacaactattaaaggcaacaacgagcaaaagaaagacctcaaatacaccagctaatcattttcttccaccttcccttttttggcagttagaccctatttttagccaaaagactctcttgctaccacgtatttgattcttacaactttcaagcaataaggaactcgcgagaaatgctaaaaggcaccaagtgtcatacgatacaattaagtattggatctcatacatatgttttaatttaataattaatataaaataacgctaatcattactaagccgctagtgctggtggtgcctaatagcaattgtaggaactaaccaatgatagattcatggcatacttgaactgaccagttctgctctctaaaataaccataaaaaacaatgtatattcctcaaactagaaaaatccattactatcttctgaaaatacaggctactactctagctcgaattaaaagatcattaaaacataattgaacagtcctatcaactatatctagtttttaacaagttatacaatatacatatcaagtatgaataaaattataccacctcaaacttttgggacataaatgatgataatccaaaaacaatttgccaataaatgatgaaattcaaaaaatctctacaacatgagtaatttgattagacagtttgaacctagtaaacataaattaagcacaaaccctagcatacttccacattcaaatatttcaaaaaaaaaagaaaaaccacaacagccatcgaatgtgaggattcatcatcaatacaaaagcacaaaaaatcactacagtaaaaaggacatgacatgagagataaccaataccatcaatgaacccaacccagccctgttcccaaaaacgaaaaacgaaaaacaaaaaagaaagcaaagacttttatcgttagaaatccaaaagaatgaacttaattgtttcattagatgctaacaatgaattgaagagagctgcataagaattagaggtgtgagtgaatatggaaaaagttgaaagatagagagatataaagaaataatttgaattggagaattgaggattgaggattgagaattgagaatgaagaagttgagaaagaatgaagacctaaattaggcagagagagatggagagaatccccaattgagaatgaggggagagagaagcgaaaagaggaggcgcaaagaagaggaggtcttcctttgcttcttctatgttctcatttctctcgtataagcaaaagagaccgatttttctaaccttgttgcttaaatttcgtacggggtctattaatagttacccttctctttcttaccctcaagtaattaataatggtttatgttaagtaaaccaacatttggatcttatgttccatcaaatcatacttgtttaatttggtaatgtaatgctatgatttattatttaaacaaaaaaaactagtagtctaattaggattttaccttttaactctgatatttatcaatcacactttaaattttggaccgttaaaaaatttctctgaactattaacatttattaaagacttttgtccaattttattaatgatagtctaacgtatgtccaaaacgacatcccgaagacctgggatgggcacctaacgcccaggttggtgtatggcctgatgcgttgggttctaactatccgattatagtttgtcttaagtatctgactaaatttttgtattaaacgagagttacaaattgtgacaagtcaaattcacactttggtatttcaccttttgacaaaatgaaatatcaacaaattagtcctcaattgagaagtttcgagtctactcgatttcgcaaaaaaaaagtgacatctccgaaaaatagtgaacgacttaaccaaaactaagaaattgactaagtggtgtcaaaatatcactaaagcatcaaaaaatacaagtttggcacgtttttcactcatacagcatctaggttgatgtgaggatgtcaacatgggcgctagatgtcaacctgggcgctgatgagtccatatttatcttctaaatatgactaatttatgtaataatattcttaaagtgattctttaaattattaattagtttgattataatttgttaggctattttaaagactaatcatgcatttagagtcatttagaaggatgttagtatattttggtagaaaatagtagaagtcaacgagctcggttttacaaggcgacttaattgtaaattttgacaaccatagaaacagaattggacttagaggtcagcatgaaatttgtagatctcgttcttaactttttggaacatcttgaatcgtccaattttaagttaaatggaagaagttatgaccaaaatactaatctgaacatgtggtagaaatttttttggcaacaagttgtcgttgcggcaaggggattcgtggttgcaacgggagcacgaattctgccagattttgaattactatctttttttaaaactaagatatttttaggggtatttataggactcttagaattcatttttagcaacttttaagctacaaaattgagagagaaacttagagaaagagcaaggaagagatggagatcgcggtttcgaagtgttcatcattatagttcttttcttctccttaaactcttactatttattatgattatcgttataatgtctagttctgagtagttttctt

SEQ ID NO: 378714 - DNA, 609 bp, Cannabis indica
tgaggccttgctttctcacccttagcttattctcgttttacattttgatggtcccttacgttcgctatggacatgttgtatatcggatatagatcctccccatgaatgctatggttaacaaaatcagtggggcagtttttccatcccaaaatgttaggccattttacctgagtacctaacccatcgtttagcacaactgccccgtgaattgattggttggcctagccttggggcttgagcgaccctttctttctacttgggttggcaaggtgctcttatgatgttccatggagcattgtgtgtgggtttttgcggagggtctctaattacactttcctttttcactgggtgaggcaaacgacccagctctaggatggttaaaatttttagcaggaggaatttcttaagggaggttagcttgtggttatagccgtgcaagagcttcttgcatttgaatacgaaacttcctcttaatatgctaaccacttttaggtattcgcaagctcttgctacagtcgtactattttagggtcttactcttagtactcttattcataatccttgttgtggtttttattgttaggttttatgccctaaataaaactcttt

SEQ ID NO: 378715 - DNA, 3507 bp, Cannabis indica
aacaacgttctatattataaatcactacaaaaaactgctacctttagtgataattttttagtcacaatataatttttttgtgactaaatgtgacttttagtcacaacaaaatattacttgtgactatacatagtttttagatacaagttgtccctaatttagttttaatcacaacatgtattgtgactaaaaatacatttagtcacaataaattgtaatttttgtgactaatacttttgtcacggacctttagtcacaacataagaataataatttataattagccacaactttttcactttgaatcataaattttgttgtgacaaaagtaaaattttttgtaataattattaaaactacagaaatatatattatatattaataaaaataatggtagaatttctccatcttgaagttttgcacatttaatatatacagaataaaaggattttaccaatttatatattaaaaatgttaaactagctattagattttcattattttttaaattttatttaaaaattaagcgtaaaaattcaaattttttaaataacatacccattcactacaaaagtcttacttttagtcataagaaaacttgtgactaaaactaaaaatgttgtgattaattaattataaatcattattcttatgttgttgttaaaatgtccgtgcttaaaaatattagtaaaaaaaattacaattttttgtgactaaatatatttttagtcacaatatctgttatgactaaaattaaattaataaaaacttatatctgaatattatattctagtcacaagcaacttgttgttactcacatttagtcagattaaatttatatttttactaaaatgttgttactaattaaatatagtaattttttttgttgttcacccagatatatattatatttatattattcaaaaaatatatataaataaatcccgtcaaataacataaatgtcacaccttacatagttattagcaataaatcgaaagaaataatattactgaaaatagaaaaaatatatatggttatatttgataaattaattagtcaattatttgtggaaactgataattaaatggaaaatattaattaaagtacagaattttaggagaattgaattaattaagtagctaggaaggcaacaacaacaacaagaacaataattagtaatttgtattgtgatggagttggagggtggaatcgatattgaggttggtcatgtgtagagattggtcttaaatgcgtgtatgaagaaaggagaagtaggaggatttgggaggcattaaagtgatatctacttctcaccttaaatgcttggcctagctactgctcctccatttaaatgccttcgatcaacccaattgaagaaccttcataagtaccttcaaactaatattactcctcctcctcctccttctactataattctctctatttcatttctcaacactacctagctcgagattttctctactacataatacaatctcaacctcaaccccagccaagtcctacattcatttcaattaatatcaatatttatattatatagttttacgagtttgtaaacataactatatacatagataggtggatggaatttccagagttgtcgttggctccaacgcaggcttttgttcataaaaacggcaacaacaatattggtttgtcgttggaatcagatcatagcagcgcttcaagaaaaaggaagctctttcaagatcatcatcattttctcatgaatactactaataataatattgatcatcatcatcatcaacaaccactcagcgttgatcttcaactgaaagatcctctacctttggattgggagcagtgtctcgatctcgaagtaattaaaactctcacgctatcattttcttttttctttatatagaaaaatacaattaattaatatatatatatatttttttttgtggggtgtttggcagtcgggaaaaatgtattacttgaacagaaaaacgctgagaaagagctggaactggccgattccgatggaacaagcggcagccgcggcgctagacctagagctaaacatgtcatctctctctgatcaggatcatcatcatcataacaggacgataaatgggttctctgatcagatgttcatgaagagacaaagttcctctgcgggtgggagcactaacaacaacaacaacaacaacatggttgctttggcttgtctcaattgtcatcttcttgttatactctctaagtcttctccttcatgccctaattgcaagtatgtccactcactcccttccgtcagccaccacaacggttctccggcgccgtccaaagtcgcttccgttaagtctttgaacactttaagcctcctcaattaattactaataaatatttatgatcatgtcattatattatatgtatgtcattagagaattaatgtgtaaaataggaagataatgatcaaattaattaccatgaatgaagtggtggtagtagtactgcaaaattaagcaagagaaattagatcagaaaaatcaagttatgacgtctatgtgtatcaattatatgtttggtcggttttctgatgagaataattatatatgtatgcacgttattgttgttatatatggatccaactacattgagtaagtaaatatatatgtatgtatggcgatgtaatttagttgttagatatgcatcttcgtttcgttgggatctatagtacaagtaattatgatttccaatattatatatatatgtacgtacataataaatatatgtgtatctaattttatttatttatgataattgtgacatctaacatccaacgaccctgtgtgaaacaatcaatacgtttccaaatagattaatttttacattttattagttgaaagatatcagaataatattaattacctcaaattataatagagtgatatgcattgcatgttatgcagccattcgtgtgaaaaacccgacgtccgggcactgtgtctagcctgagtaggtaggtaggactattaatcatcaccaatttccgaataaatttgggcaacacaattaaacaactatcagcatatcaacaataaattataatattataatttgaaattgaaatttatatgacagcattttggtcatagtaacaaaatttgttgatttaattgaggctcaccatactaaataatttatgtactatttcaaattataggtacaagtactatatattttaattatttattatttatttttattttaatttaagttttttttttttatagaagttttttttttatagaaaataaataaaatagtctagtctatttttaacccaaacacaggattacttttaacataatccaatctcgtctaatccagcccaatcatttccaatctaatccacactacaaatacttttagtgacaactttgtagtcacattataatattttcgtgactaaatgtgacttttagtcacaacaaaatgttacttgtgctaaaatatagtat

SEQ ID NO: 378716 - DNA, 2898 bp, Cannabis indica
gcataaaagtatttgttccaaaggggaatcctagacgcgcaaattttcaagggaaaaaagcttgttctattatgataatcatacacatctacaaatctaaaacgtatcataatatattatgtataagtaaagtgtaatgtctaaatgtcatgtctctcaccaatcatcgtttgagcctgtaggtgttgcatatagagcatcagcatttttccacctatctacgaatgccctgttggttggttcattcatcttgggtccagtaacacgtctgttatgcagaacaatgagtggccatttctttgaaggaaacttctgtcttatgccattagcaacagcattgatctacaaaattcatcaagaaagagaagaccaataattatcactaaattaatagaagaaaaacaaaataagttaactataatagcgtcctacgttttaaggccatcacataacttgccttggatggcctgaatatcttttggctgaaaagtccaacattagctccatcaatcactgcttcaaaaggaccataataatcaagccatttctgcaaatttaattttgttccatcatgatatgttaaatccattttcccaattagtatcaataagtactattaaaagacttgcatacttgaaatttctgaaagtttgaatgtttctctttctcaatggctattgaagcaactgattcagcaaagttttctgtttctttgggatcaaggtcaatagtaaccaatttctccccacaacatctgcacaaaccatcagcaccaatacttgtttgcaacacagaccactttcctcttcctagccagccctggccatgccagccaccccctccactctcaattgctttctttatttgcctttcatcccattttgttttccccactcttgaagctgctatgctattaaaccagttaataatcaaatctgcagttgagggtgagaccttccttacacttgcccttagtttatgcaacaaataatataccttatcccccttaccaactcctacactcaccctcaaaagagcctgtagttccggcgcttctggatacacgccatgttccaacatatgttgttcgacagcgaatgctttatcaatttcaccactactagagaaagcagacaaagctggaccataggaacgaagtctaggatttatccctaatgacttcatttgtttcaccatatcaaaagccatgtcaccattacccattgacattgccattctagccacagaggtcaatgcagcttcattcattgggatgttctcagaacacattttctcatagatctcaaatcccctctttcttgcatattgctttgcttcttcatctacccatatattcttatcttctttgttcttgcttccacctttcacatgtgcattttcatcttctccttcagtaggatgactgagtccatccaacacacgataatttcgcttaacaaatccgttacaaaaccagtttagtttctccctttcgttgaaattaccatccgaatcgtcgagcctattactagaacttaactcatcactctcaacaactccatcacttccactagtattaccatccaagtctcttgatttagccaagtccaaagaacttgacgcagaaacctcaccagaagagtccatagtatccaaagtcctagaagcactcccacttttagcagggcgaacaatacccacagctgcagaagaacagagatataatagtacagtataatgatactgcccaagcttgattccttctctttgagccaaatcaaacaactgaattgcactcatgacatctcctctctttgaacacatatctaatttaggtctaataggaacttcaagagtagtatcttcttctttactttttctggacttttttcccttctcttctcccacctgcttaccacttttgacactaccaactttactatccttatctctagatttcacagaagaattccccaccattcaattccctcacttttctcaatccctgatttcttctcctatttttgggtttgttgaagttattttcagtcttttcctctaaattaacatactttttccagaatttttaccaaccttatcaacatcatcatctatagaccttaaatgagaaaccccattactatttcgttttacagttctggaatgtatagtagtttttgtatatggtttttggtcagtggcattcaactttgcaacaacatgtctaacgttatctttaaatagaagaagttgagagaggtgagttatgtgtttgagaggtgagaaaatgagaaaacgagaagagtaatggaatttgaaaacatgaagggtagatgggtacttacagaaattaaggggcaaagtatgatgcttttgatgcagagagttgaaggcgaaggaggaggaagaagcggaggccatttgtggccgttggaagctcctagtcaagctgatatggatacgaatatataatagattataatcattctattctactgaggtaagtaccacagcacagtccttttttttttttttttaatatggaaattccatattaattaagatttttacatgtcttaaattatgctattgaaaaaaaaaatggttgttaattaaaaattttccttaaactgagcccctttggcacaatttttggaaaagctaaaagctgctttttgaaaaagctgtgataaaattgtgtttggcaaacagtcaaaaaacaactttttgaagaatttttggagaagctacagctaaaagctgaagctgctccaacccaacttttagaaaaagttgttttgattaaaagactataataatttttttttgtactaaaccatatttacttatttattacatattaaaagaataaaaaaaataaaataaactaattataat

SEQ ID NO: 378717 - DNA, 2555 bp, Cannabis indica
agagagagagagagatggaagaagcaaaagcattagcccaacaacaacaacaacaacaacatcaacaacagcaacaacaacaacaacaacaacaacaacatcaacatcaacaacaacaacatcagcagcttctgtatcaacaacagcaacaacagcagttacagcagcaacaacaacagtttctactactccaacagcaactccacaaacaacaagccatttctcgcttcccttctaacatcgatgcccacctccgccctctcactctccgtcccattaaccctaaccctaaccccattaataataaccctaatcccactcccaaccctaaccctaactcaacccccacgcctgctcccaatcccaatcccaattctaattccaatcagcaatcgcagcagaaaactatccgacccggaaaccaagcggagctccagatggcttaccaggacgcctggcgtgtttgccacccggacttcaagcgcccattttcctccctcgaagacgcctgtgagaggttcctttctttctttcttcattttcataacaacactttaataattgctatgatttgctgaaaatggtaaagctttatatgtaaagactgtccctttttgttatgggtattatttatttggtatttcaactttactgtcaatctggaggatgagatattggaattgggaactatgggcctctttgctctcattactatccatcataaacctcaatttttttcgcactagctctcaaatgattttaactcaaacagatgagggtgtttgtaaaaataggcaaaataactttataaaaaattttattagcaaaataactttgtattgttgtagaaactacgatgaattacagtgtgcgaccataaacaaccattatggttgtaaaatgacaatagatttgcactgatcttatggtcacatagaataaattaagtgaggttatgttggaaatgttagaatttgaaatatttagtttgacaaatttctcaacggttatgatactgctgtgtaataaatgtacactcactgagataaaatagtagggtgttatgttgttagcaaattgttataatgctgaatcttatgcagtttacgaaatcgaaaacatgtaatgggatccttgtcagttgtctgtgtcgtccatgttcatgttcatgtcattgcctttgcatcagtgttttgatacttttctgcttttatctgatcatttgttttgaaaattgtttgatgatgattttatgttttacacgataactcactcaaacagatgatacttgcatgtgtaataaatatacacccgcttagatgatgatattccacgaacaggttatgttgttgggaaatctttatgctactggaatcttatgcagtttatgaaattgaaaccatgtaattggatccttgtcagttgtctgtgtcatccatgttcatgtcattgccattaccttgtggttcgatacttttatgtttactcagctctaagcattatgtgcaggttattgccttatcatgtggtagctgattacgaggcggaggaagatgatagaatccttgactctgatacaacaggccaactgccatctcgctctcagcagtgggatcacaatatatctgtcaaagtcgcagagtttacagcaacatttgagaagcaggctctggccttcaacattatctctcgcaaacgggctgttggggagttcaggtctgaggagagaatgatgatagagcaagctttgtgccaagaggagaaacgggcgtatttggagttgaaaaatgagttggaatcaagagagaaagctggtcgggaggctcatgaagctaaaatgcgaatggctgcctttgttcaggcagagcaagcaagggccgagtcacaagctcacgctgaaatgatggctcgaggtccaataaggtcaaattcgcatagttcacagggcaatgatatttcaagtggtcataatatgggtgagcaggaacatggagtcaatacagacgagatgatcaatgggtggggaaacaattctcagagagatgagaaggagccttctgaagattttttgaatgatgaggagaccgataatggagaaacaggcacgcaggatgggtggcgggaagttggggagtttgatttaaactcaagataaaaactcttggttagttttagtaatgatatgagggagcaatgaagaatgaatctgctttgacattgtaactgtgaaaaccattcttcttttttgttttgtttgagagattcatccactagccaaaaaaaaaaaaagcatggcttggtccaacttaatagttactatttggacttaaggatgatgtagattgtatagttttagcttcgtaatcacaaaattacatggaattctatatgtttttttatatcaaaaagttctgatttaaaataaagatagatgatgagtgatgccttgcttcactattggtgaattgaattcatgcataagaacttggagaaaactaatttatgcgatgtggcctgcctcattttccttcccttgagattttctctctctctct

SEQ ID NO: 378718 - DNA, 2221 bp, Cannabis indica
gtatatgtaattatttttcaccaagactctctcaaattatagtaaattaatcatgaattaattttatattttataccaagaaattgtttgaggaaatctcaaagtcaattatgtttaaatattctgctaaaataacacaagatataagttctttttacattctcattcccaaaaaccaaaaaataaatttaaaaataagaactacacaattataaatattctgcttaaatcacacaaaacataacttcctttttacattctcattcccaaaaacccaccccctaattcttcatggaattgtgagtcgggcaattcaactatttaggtctctgttcactgttttctcatcacattagagaaatgctatcgagttccatttataatattatagaaaatcgctaaccaattataaaacgacatgatatgtaaatcgtagcaatgcttatcacattaagctctcctcattttcaaaatttgtttcttgttttctaaactagtggaaaaagatttgacaaacataaaactaaaaaaaaaaaaaaaaaaaaacttacactacaaaaatttcaattaataatcgaaggccggaagtgaatccaagcatttgctacgaagtttgattaaggtaaagtaattgtatatagtttagtcaataatttaactttcaaattaatcttcaacactcctgactaaactattttaaccaaaacagaaagaatcattaaaaaaagaaaaagaaaatagaaacacaagtgaacttaactccacaattattattttattcttttgagttttttaagaaattttgaaaataaattacataaataagtaaccattttatcctaaaaaaattatctacattcacaccctgttatgcctagttcatccgatcatggtgtttaaaagaaatttggcataaatcaacaaaattagattttttgaattatttgtaagctatttctaattttctattcaggaacatttacttcccttagaacttttgcagcatcctcagggaagacgaaattaatgtagcaaccacttccgatttcgaaccctcccacgccagttaattgcggtactatctgtaaaaaccagtgagaatgagaagtatctgaaacattaatctgaagtggggatgtctgaatcataagattgaatggaggattgtccaactgcaatgaaagtttcctgagcatgagtttcagcagcccaccaaggtcaagagcctgaaaagtgaacaccatggaggaatgtttagagcttctaaacttcattggtttttcagagattgatttcatgagacagttttgttataatcccattttgaactttatattttaataaaagcattttgataactatgtataatagtagtttttgaatatggaaccaaataaaaaatacttttccaaaatgcttttacttccacattcatataaaatgcttaaaatcacatatgcttgaaactagtttttataaatctatggagcagtggtaataccttctcatcatttatttcatgaaaatgaggagagtgatcacgaggaataatccatatctcaaaaggaaatgtggcagcgtaaggaacaaccgataaaaaatgggttgaagcgtcaaccaaaagatcctgtccgttgacttcacaaatcccgcattttcctgtctgattgaaatactccttcatgctttcgactcgagtggaaacggcaggaggaacaattggcagtgccagcatctggctatgagagtgactcatcgatgctcctgctgaagcaccatgattcttgaaaacctttagaaaacataaaatcaatgtcaacttatgctatcacacaaacgattttgtctttgaagaaagaaaaaatgctccatattcacaaaattcagaagtactgttagaactgaaaacttggtttagcatttacacgaggacaaccatgaagctacaaacaataaagatggctttaatgttagagcatctccaaggagctcatcaaatttggtgtcacactatcaccaaatttgatgttaaaaactatcttcactccaaccacaacaccaaaaattacactaaaaaaatattccttattattatattaattttttaataaaaaaaaactaaaaaatctgtcaaatgcgaaaacaagtaaaagtacatcaatatactacttttaaaaaaatacattataatttcataaattcaattaataatataaatata

SEQ ID NO: 378719 - DNA, 6068 bp, Cannabis indica
aatatttaaaaataataattaaacatatgtagcatacaaataaaatgatatactcttaacgcaaatatattagtctttttgtaattaatgcactacagaattaattacagtattttaaatattttttacgtgattttatagttaaaatcaacatattctacgagtgtattttattagagataataattagaatatagaatacaataatctcataaataatatttttttactttttctctctcaaatttgttgtctcttttactttggattcttttcctatttataggtgtatagggtgaccgttattctatttagatccaatcatttgtaactgttcatgaaacatggatatttctcacgttttatttttatgcacatgggataatatttaataaccacccaaccgccctttcgtcattatccttaagtagttatgctgactatgtcgatagctcctcgctaagtgtgagttgtccttctttactgtttttgtaagaaaaatgctaagtatagatacaacgctcctcgcagtcttcttttataataatgtattattaaggtggctacttcgatatataaagagcgagatgaatgaatgtatttattctatccacacacaaatatgtggatcaattagtttcaagctcatattctcatgtatgtgggtccatgagctacaagctcttattcctaagtatgtggggcaatgagctacaattttttggttctctcatcttaaacaacttttattatgtactctgtttatcccgagatggacttattgtcttgccaatctcaaccgataatagttattactctcatctcacatcttcttatgtgggaatgagttttaatatttctatcaaccataattctttaggcgatttatttaaattgcatttaataatacaattattaagctgattcatattccttttgaggtacatgtgtcagcttctgattgttaaccgaatttcaggtatgacaattactccctaaaaagtgttttttaataaaaaaagattttttaaatgtcttcaagggtactattgtattttattccatttaaaattttaatgcttagattcgacagttcaaaacttcaaggcacgttatttctttatttaatgctccatatgttcttttcttgtacaattcccatccgtttgattagatctcttttgatcgagcagtttccaccttttaggtgtaaattttaaactttacactattttcgctattttcaacccacgaaccttcaagcttcaaaaaattctcaaccatcttctcacctgaacttgcatgccttctctgtctttcacattttttctgcgagtttcatctgattgcattcatcttactcaaaatccagtttttttattattggaatttccatcgcgaagctcttcattacccagaatatctcatcaaaacactaagtgacactctctcttgttgatttttcctctgtgctttcgattttaatttcttggtatatgttttcttttctgcatcgttttgttgttttcggtttgaatgtttgagtaatttagggctcaaaaatttaaggttatgtgattcgcagattatgggctttgtttgtactctatttttccaagaatcgggcattattatctataatcatgtcccaatttatcctagaatttacaatcccagagctcttaaaatcagtttctcctcaattttctgccattgaatttaaactcaaggctagaggacctcaaaccatacttgaaataaatgatgcgaaaattaggaactacctcattaaatctggtcaagaagaaacctcttaccattataggcaattattacaagaggttattgagagtatgcgttattatttgcgagaagcatcttagcttgaatcttccaatttagttgatatccccttagcgaggtccatgtttttacctccagtcattgttactttttcactaggtgacttagactttgaacttgtggctcagaaagttcataaatcaaagacccctaggatcccactgtcacctttgaatccaagttgatagaatccaaagtcaggtccattggaccttatgttggggatttcttaaggtcatgcagcattaagaatgagcaggggtgttgcactaggtcttttgctcaggggggattcaggtattatccccctgaatttctagtcagagatgaaagccttccagaataggcccttggagccttgaacatataagagttggagcagtccttcctctcaaggagtactttaaagacttctgcaactaccttggcattgactcgtttcagttggcatcaaattcatataggatcctggtctgtttaaaatctctctaccatattatgaagtgggaatgtccgaccccacttgaaattctctacttttattatgtcaaagcttgtcctatgaggaagcgcagtgcaggaggcttatattaccacaggacccacactaatgatcacaagattattgtgaggttatccaacaaaaaggagttcaacgatgacttcttttggacctatggtcttttcccaatcaacacaaccaagtttcaaattataagtaagttaaaaacccttctcaaattcttggttatgagtttttcttcttgttttttatacactttctaattctgctatttgttgtgtttccagcgatcactaggagacctatccatactcctgagatcgagaagaggcacgtgattcttcttggtgttccctatggtctgtgagcggtaaattttttgctgcatgataataatttgaaggcttgcgcccttctcggcagagatcagtctaccaatgacttcaagatccccaaaattttagacaggcagcaagtcccaatgcctactgatgaggaggatcgagactacgtggctcacaaccatcatctgaggaatatatcccctttgggaagcagaagatgatgcttcccgaggtaataaatttagtgcttgtggaaggtccccaattattcttaggcctgagcgaacaacataagttcaatttagagatagccaatataacttctatatctggaaccgtgaagatctcatcactcataggtttgatagttggtaccctaaacatcatgtccagtcgagttgtaacagttcttattttgggatcgctagtcaatgcggcactaattttgatagggttggatgttcagattggaacttgtctccacttaatccctttggccttttaatgattatttgttctaggaaatttatagtaattattataggtcttcttcctcgtctgatgattatggtaatactcttaagtgggagattaactcacaatatttttcctttagttatataagttttgattttttattttatctcgcagatatggacttcgaaaatcttttgtccaacccctcaagttctaacaagaaaaacaaaaaaacatactgtcacgtcagacattgcctctgcttcaaaacaagagcctttgaaaaggattaaaaagtctaataataagaaacgtgcctcgactcaacttgtaattgagtaagaggagacctctgcgacttcctcagcacctgctactgtgagcactggtgaacaggctttagggtctattgatcaggttaaattcttaggatctcaacctgagatggtactcttggagccttcttgcccctgccatcttttacaggtattgaaggttcacaagtttggtcgtagtacgctaccacctgttggtgccattataagtctttcagcaagatgattggaatccgatcaacagagccgacttccaaagtttaacagcgaggagtgctgatcttttactcttatgtggctcagcaaaggggcctccatagtatcaaccagctaagcactaaaatttttatgtccaatgaataacacgaagtcgttgcaaagtaatggaacgactctcagttagagatttcttgattaaaaaagaaggatgaagaacaaggcactgttcgagagtcggatggagacagacgaggttgttgcttatcgagaggggtcatcatcagggatacacttggatgactagtggcactatcctcattaggattggggtaagactccccactatgaggcctactttggtcttgccttagcgggacattgtcccttctctctttttctctgggcaggccttgaaactggtcagccttgccatatgctctttcaagcacaatttgactgtcattggattgacaggatggcgaccttatttcagacgcatttggtccccctggccctgaggttacccatgatccctagggcattgagttccctccgggacatagggaccttttcctcgaaggggatcccatatgaggggtggctcttcaacctaagattcaactctctcattgaactgtctgatctggtcattagcctccttattttggttgttcagctctgcatgatgggcttggaggattgcgtcttgctgatccatccactcttagaattcgcatctctgctgggaaaaggcatctcccatagcatcatgtgtttcttgttgaacctgatgaaggaaatccgtgtgaccctatactcacgtgaggttcgtcaatactagggttgccaaccacaggtctagtctcaccagcataaacatgaggtccaacccccgtgtcaggaactttagtagtcagctcgacagtgggtccagtaggaggttggtcccctggtcggaacactatggtagaggtgtcagccggctggccagaacgtggtggctgggtagccatgtttgggttggtcacagtaggtggcacttggacatcgggatccgtggcgatagtgtcctgttgtttagtagaatttccacgtctcgtgacagccatgcagaatggaaattaagaaaaaaggtgaaagctttttgaataagaatttttggctctcaaagaaaataccaaaatattgattgtgaattaggccaattgacgcgaagtttgactatgatctaatttccattatgactatcccatgtggaatgacaatatatgtaaaagactaaaaaaaattatataggttcagcccctttgattaggtaatgatctactctccttttgttgtattcagtcttgagataataccatgcagattacaggctgaatgagaatgtgtgttagagacttgcaaagtgattagaagaaaagagagagtttaatgccttagtacttttgagctcttaagtgcattatagaatggatgaattcaggtctctctcacttagggttaagacattttatatagtgttagggttttacaagttattgttcaaaatacataacagatggaaaatatttgtgtaaaataagacatttacactctgacgaaactttcctactgttgtgggcaattcaagacgtttcgaagttgtaggagtgatgtggacgatttagaatcttctagaaggccgatgggaaaaacaagttgttagggcgtaatatatgtattgggtggcttgccatatctagaggctgcatggcacatgggttgtcctttttgaccgaccagctacaagttcgactaggatattgctaatacttgtgtatctctatctttgctgaagattctaatatcacgatgaacttgcttcagaaccttgaagatgtagattttgtaagtttccattctcttcgtgtttgagaccatcttgcaaccctgagatcttgaggggttgcacgacactaacttggtcggttagtactgacctgtctcccatgtgtctttcgcttttggccacgtggaggtgccacatcagataagtaaaaattgggataataattatattttcaaaatttgattgatgagttataaatctatattcagatttaaaacttccttatgttaaaacatgcttatgtaattaaacttgtaactcctcttaacttacgaaatacactttatctcataaaatataacttatgcacataatatataaggaaatttgaatttatttgcttacacttagggtatataaaaattttgaacacaaacttactaaaattaaatcaataagcacactttatattcata

SEQ ID NO: 378720 - DNA, 2405 bp, Cannabis indica
aaaaaccctaaaaagaatattaccggtcaagattggggaccgacgacaccgccgagtaggtcaagatcggaggccgacgacaccgccgagtaggacaagatcggagaccgacgacaccactgctactcggcggaggagaagattgtttcagagcagcgttgtagtgggcggcggaggagagatcagaccaagggttttttttttttttggatgaatgacataaagtcggtgttgttttgtaacgacaaagtgcttttcttgtcgttacttaatgtactagttttatcaaaaatttatttattaatataagttattatatttttacatataaaattcacaatatgtatattttttaagcattaatatattaatttgtgtagtgtagagactagaagccacatcatataaatttatgggtggcaaagcgagtttcgacacacaaattttacgaattatggtcgaaaaaattaagcgcgagtcgacacaaccttcacacaaaataaaaaatagtcagacatgacacagttcgcttaatacgaattttgtgagttttaatttttgtctcagaactgttaatgcagtggctgactctcttgttaattttgcattgaaagctactgctagtattgtctagtggctcggctatccatcttgtatttagaattctattttggctgatgctagttatcaatgaatctgttagctctcgacccccttgagtgatttgctcttgggtggtgtttcctgaagttattttttaaaaaaaattaaaaataaatatccaatcttaattagtaattagatcgtattggattagattttaaggtctaattggattgaatcggatgatgatttccaaatcacaatagaaaatcttgtcgtaacaaacagaaagcggaaatgaaagggacattgtagttcattctaataaaggtaatttatagggacatatgtgtgttatttggaaatatatattcaagtttggatccctagttcccagaaacaaaggaaacatgtcatgtgccctgatttgtgatttatagaaagaatgaaaaaaaaaatgacaaaagaaaacattaacaagaattacctagtgtccggagtgtggcctgagactgagagcaaacccaagattcttactgaaaaaaaaaagaagaataagaatgacgaacgaaatcggaaaaaaaaccctaaaaaagagaaagatattaccttcacggtggaggcgaggactcagaaatatgaaatatgaaaaaagaaaaagaaaaaaacctaaaaatattaccgatggttaaaattcgaggccgacgacaccaccggtactcggcggaggagaagatctgagagtgattcagtcggcgacggaggaatgagatcagaagatacaaatggttttttcttaattaatcgtatgttcaaattccaaataactgcttttgtcgttcccaaaagccttgatatattttataataataataataataatttaactatgtaaaaaaaaatatttttactcattcaatgttgagttaataaaaaataaaataatttaattttctttaaaaagaaatttaaaattttaaaaaataaaatttttattatatatatcattatctttatattaaaagtgactatctagtaacaatttttgatttaacaatcctttttttttttatatattcttataacgccgttgacctattattcttatgaagaaaaaaaaactataaaaatgtaaaagaactaaaaaaaacaacggtctcactactgcaataacaatggcctcacgaattcaaagaaattctcaaaatcaagatcgatcgatcctatcttcttttcaataacgaattcaaagaacgtctcaaaatctcaatcgagcaatcctctcttctttcgaagaaatcaaaatcggactgcaacaataatggtctcttccattcccactcccaatcccaatcgagcgattcattcgtggatgcccatgtagccactcgaacaacaatggcctcttccaaaacgtctcaaaatcccaatcaatcgaagacaaaagtatgatgatagccaattttcaagatctccgaacacctatcatcttcgacaacaaatactacgtcgatctcatgaatcgtcaggtactttttccctccgatcaagctcttcaaatgaatttttttagacatcaaatattgtgcaagctcaactagaaatgtcattggtcccttacacccacgtaatgatgactcttatacacgagtacgttacccaggttgcttcatggactgacgactagccctacagaccaacatgagtgtttccaacgtgctttgtcctcacatgcacacttcctgggaaaacttcccaggaggtcaccaatccagaaattacttcaggtcaagcacgcttaa

SEQ ID NO: 378721 - DNA, 4910 bp, Cannabis indica
aaaaaaaaaaaaaagtacgccataattaataacaagaacaataaactttctacctcagttaaaaagttgtaggattttctaagattcatttttgtaatgtgatgttcttgtcgatgagaatataaagggctaggcagattagcagattagcgtggtcagcgtctagaggcaaatagagtatttatacgcatacatatattaatatattaaaatataaatatctaatcaaggtgatctgggttggttattggccttagtaagttcaagaatccattccgtgctctcaagcagtagcctgtaaagtttccccatttttggcgggtttttcctatgaggtggaattttattaggaactccaccctatttttttcatcacatcctaattaagtaaaacagctctaatatcaaccaggttgacttatcttactcatgtattacaaatataatatacacaagacagagagtacctttgtcacatctgcaaaagcatctaaatttggagttggctttccattaacttcaacaatccactgaagagcatataggccatatctatgcactggactgccatgacaccacctgataatttctcaacttgttatcaccgttatttatttatttttaatttttttcgaaaaaaggacagaggtcaactgtctttgactgacatttgcctgaccaccaccaaagattgctattagaaccctcacacaaaggaagaggaacaccatagttacaaaaacttgggactcccaataaaagacaaaaacaaggtttctaaaattacaactgatcttagacaatcagtctgttgaaaagatgaaaacaaagcatgaacttaacatctatcatcattttgtacaaatgaaatagaatatagagtggcttacgaaatgcattcttacagaagaaaactaagaagatgcaagtagcctcaaaatctttattaaaacttacgagaaaaactgtggtctgaacataggtgtatctagtaaaaatagaaattaaaaaagattaacagaagaaatatactaatgacacgcatggccagtttaagtgtagttagctacccattattaacccagtctcaacggaacacagcatttatttcctataatgtcacttttcatgtttgagggcaaacacccaagagtcatcattattgcccctattaaacctgctgctggtatgatagcatcttcataaagaattttcaaaaaaccacatcttatatttcattctgcttattatctgcaagtgaagagaagtcttaccttgccacataaactccatgaccttcttctggaagaaatccaagagcacgaactgcaggatgaggatcctgaacaatacaaccacaccaatttattacacgagtggtgccacttccatctctaacatcagttcccacttgaagatcaatttcacgtccctgaaagcatgcaggtggaattataaacagtttaacacaactactggtcataggccaaagaaatccagaaaaccagtaccaagtaacaagtaatgtacaccacaaggtagctgatacaggatcgtacttctcttagctaatcacccatttacttctccccaaacaagaaaattatcaaaacaatttatgttgtatatagcagatttataatttctttattaaatttaaataagaaacaaaactagtataatcattatgggagaaactacacaggaaaaagggagagaaaacatctctcacccaaggaaacaaaaaaaacatacagcaagaaaaatatgagaaaatagtagctcacctgtctgaaaatggtaatgttaagtttcccttcattgttatcatacttgtccaaggcatgacatgcatcctcaatgtcttggaagcatgtaactggctccttgttgatagccaacaccatgtctccttgttctaattgattttcagcttttgatccagcaaaacaccctttaacacgtaaaacttgtcgtctgactggatctttcttaactagagcctgcaaaaaaattttacctaggtttagcaacaaagataacaaagcggagggtgggaggcaaattacggatgtagccattttgaagaagaaagttgttgccttcaaagttagactttgaaaaggaatatgaatgatagagtggaaattcatagattttgttcttaaaaagaactttgggctgaaatggaggtactagatcgtgggatgtttggaatcagtccattcaatattcatcaatgggaggccggatgggtaggtcaagggatataggggttgagacaaggtgatccctaatccactgttctctttagtttagaggtggacatcttaggtagatttgtggagaagacaaatgtagatatgttgcatgattttaggttactcatctgcaatttgtatatgatacactcggggctaaaagttaatttgaacaagagtagcttgctcaacgtggatgattcttcactttgttcgtacgctaatgcaaattgttgtgtcatgtgtgggagtttggcctttaaaacattttcgtcttcctttggatgataaacctaggaaattgctttattaggtttatgtgaggcttgaaggatggaagaatgcttgtgaaggaggagagttaggaagcgaacaccttgtctctatggagatgccaagctaaaaaataaagggggattaagccttgggaatctttgctaaagaaataaatcactactaatgaattggttgtggagctttcctccagaataaggtttattatgttgagttcttaaaaagattactttctttcttttttttttcgaaaaattgtcttacattgactcttcccaactatattagtgatcctcacctatgaggaggagcatggtaacaagaatagaaacaataaagcaaaatctaagccaaataagacttaaaatttacaatgtataatttattaaaagcagaatctaagccaaccctgagatggcacaaaaggcttcaactagcctaacaagaaaatggttataaaaaggcggtagaagactacagaagtagaggcaagagtggcttggtgttcaagatcgattttgagaagtggaatgggatttcctggatttggtcatgacaaaaaaaggatctggtgaaactttgaggaaatggattagaggatgtattttgaatacttcattctctattttcattaatggaaggccaagaggaaaattcaaaggatctccgggacttagacatggcgatcctcttttgctttttctccttactttggtggcagatgttcttgggaaaatggcagataaagcggtggattcaagcacattttcaggatttaggattggaaaagagaggattcttcaagtaagtcacttacaatttgctgatgatacacactatttttcataaacaatgaggactcccttcaaaagcttgttaggctagttgaagacttcggtgccatctcaagtttaaaagtgaacttgaataagagtccattgttgggtttatgcttgcaagatagtgtagtgacacaatgtgcttcttttactggttgtgaagtgggtagttggtcgttgaagtaccagggatgccattgggaggatcgcctaggaaaagggcatttggggatccggtaatggaaaaatgtgcaaagagacttgatggatgtgctccttcttatcaagagggggtagattgacacttgttcaattaatcctctcctctcttcccatctactttctttctctatttaaagctccaaagactataattaaatctttgaaaaaattggtaagagacttattatgggaaggcagtgacatagcgagaggaaatcatttggttgcttgggaggaggtttgcaaaccaatagatgagggagggttgggtataggaagattggatatgagaaataaagggctgctcatgaattggctatggagatttcctttagagccaaattcattatggctcaaggtgattgagagttgttatggtaaagcacaaaatttgtgggatactaaaaaggtgataggatttctctggtttgctttaaagcaaggaaaggatagaattcgcttttgggaatgtgtggataggtgaagttacccttttggaatcctattcgaatttagcagtattagccaaatcaaagaatgtttgtataagcgatgtggttgcagttgaggaaggaggttactaggttgctagatgagattttagcttcaagaggaatttgatggagagggaggttaggttgctaaatcaattagcatgtaaatctagtaagagtggtaagatcatgggggtccattctcatgcaaatcagcctttcaatggtctaccgctaattagaatgtaagagggttcgaatggactaaagtattatggaagagcaaggttccaataaaagtaaaagtgttcggctgattggtggctttgaagaaagcaaatgtacatgatattatgcaaaaagatagagacaatatatgtctttgtcccctagttggtgtgcttgttgcaagtctagtccagttgtttcacaaactgaacatctattcttggactgttcttacactcaaaatcaggtcttccttatataaggaattagagttggcttggaccctgcctcgttttatatcccaagtcatgatgagtaagctggagggtggaaaaagaagagctatactttggaggactgcaatattggccatgatttgggcagtgtggggtgaaaaagatagcagaatatttgaaggaattgaaaatttagggaggatctatgggagagaattagattttggacaattatgtgggtctttaaggctaaacattttgagaatttctcattccaagacttgtgtagggagtggaaaacactgatgtaataggttctaaagccaaatttgtttt

SEQ ID NO: 378722 - DNA, 2231 bp, Cannabis indica
  modified_base (2225)..(2225): a, c, t, g, unknown or other
acacacacacacaacaaaaaaaataaaaaaaaaaaaaaactactttccactctataaattaaataagatgatgttagaactgaaataaagcagtcacattatattcttttaagatcatttaattgcaacaacaattcatcagacaacagggttaggcacaatcataagagtactaaatgcattggtccttgtttcgcattaaattatagttctctatttaggattttcttaattatttgagagcttttctgcactatttagtgtgatcattgtaatttatcagaagccttctgcataaaacaatatttactatcaaggaaagatagtctcatttttgttatctgtctctatagattatctttctttcttctgtccctacttctctctttatttgttttcttctcctcacaatctttgcttctcttctccctagtcttttatccaactagttccttaggaagcctcatcatgaaatgatattacaatcatgattgacacactttttgatttcttcctgtttttcacaaggataagaccctttcctaatgaatcctaaaagtgcataattccaaatgttctactacataatccataaaatacaattgcacagtttaatgttaagttttccaggagtatactataacttgattccataacatcagctcttattgctttgtaaatatgtcattttagcttccttgcttggcgtagaagcctcaaacaacttgaaatataaaattccagaagccccgcctaatatttatgcattcaagatgtaaccatatgaaaggttactagaacttacttttcaacttgaatatacacgcttgcagcagcacggtatagatcaaaagccatttgctctctgccatcctcttcaagaatagaacaagcatcagcatatagttggatagcttcatcaggagcagcctcctccagagcactattaagagaaagaaaaacatttcaactggttctccacgatatatataaagagagatattctaaccagaacaacagacagaacaagcagtaggaagtttagtcccccaacaaataaggatgtggtcttttgaaggttgtaatatggaaatgtgagtatgcaatgataatgtaaatttaaaagaatgaaattgcccaggaacaattttgttaacaatatcagaaagatgaagatgggttgcagtaacatttaactctgctaatttcaactgacagtgcaatttatattgagctcaaacagtgagttagacaaaagcttagttaagttaattcgtgattactcatcttaaagtactaacaaaaattatttttgcaaatgagaaatcagttgataaggtggtaattgctattggtaataagcaacgaaaaaggaaaacaaaaagctacaaaaagtaaaaaaggtgaatcatgtcttacagagctccttttgcaagggcatctgatgaaggttgtgatctcccacactcaacatataactcagacgctcttctataaaagtcagctacttcattccatttgcctagctcctttgcaagagcagcagcagattccatatgcctagcggcatcccagggtctagtttagcagtaaaggttatagaaagatagaaattgtagaaattaaaaggaaaattaataaatacattattgagtatccacacaagacagaaaatgaggatacgaagagatcatctcttgtcctttagaagctttttcaaatgcttctttcgctttttcataatccttggcaactctaaatgcattagctgcagcaataacgctcactcaggagtcaagaaaaagaatgaaaaaaagaactttccaatttggactatatcacctcttgtataagtttacagtttatgaatgtacataccagcctgttcatatagaacagtagcgcttttccaatcagcactccatcttgttaggctaagtttggttctgagaaagagtgcaaagtagaacagtcaatacatcaaagtaatggcatttcttttaagaaagataaaaatagtaacatgctaggcagaaaatcgttttaaacattacttaaatacatttagctcacacattttgacaatggacaagtttttcacatacatttgaataaagaaaatccacacatactagcagtttttatccataaccacccacatagaaagcagttccaattcacgtttttttcttcgaattaagatgaaccggaaaaaaaaaaaaaanaaaaaa

SEQ ID NO: 378723 - DNA, 2391 bp, Cannabis indica
tttttttttttttgtattattttgaaattatcccccaaaaaattatagttttacacattgtataaaacctcgtaagatgtgtgatactgatatctacattacataaaaattgaataaaaattcatattctcctataaaataaaataaaaataaaattgaattttgtttggtgcagttatggcatgggctgtcaaagaccctagcagagaagacagcttgggctttggcaatggaccgaggagtgaatatggtgtccattaacgcgggcttgttaatgggcccccaattgacgatcaacaacccatatttgaaaggagcagcggagatgtacgaagacggagtattcgtgaccgttgatttggattacttagtggacgctcacatagccgtcttagaagatgtctcatcctacggtcgatatttatgcttcaaccacatcattaatcagacggaagatgctcttcaacttgctagaaaattagccccttccactccttccccacctcaaaggtttttttttcatctatttaatatttaatatttttaaaatattacatttttatacacaattttttaataaatatatttaatatttttaaaatattacattatgtatatatattttttgataaatatatttaacattttttttaaatattgcacttctatacccattttaatgaaaaatattaaaattgtttaaaatgttaattttgtacctaataaatgcacacttttgacatatttacacaaaacaaaatttgtgtaaaagtgtaacaatttgaaaatattaactatcaagcatatttaccatttaaaggtaaaaatattatgtattttgagtgcaattactcttattgtgtttggatcgataccgatcaactccgttccagagaacttattatgtaatgaccatgaagtctagttttatttaatatatttatacgcttatttttaaaaaaaatacttttttttttattgtaaacttttttattgtatttttttttaatttcaattaatttttttatattgcagccatgagcaagataagaggatcatccaagagaaaatcagcaacaaaaagttgaacaaaatgatggtagattttgagaagtagagagtgatgtacaattgtttataatcccattcttttggttccctagctaaactaagattattatttattaccaagtggatgagattttttgttgtagatctttaatttttttaaaaaaaattattagggagaatcagattagtaaccctcttacttctaattactatattttaaaattagaatagagggattttaaatacaaatggttcaacccaacctcactatctcaaaattatttatgtaatatgctttaatttcaacaaaaatgagaagaagaaaaacaaaagagagttattctattctttttatatatttatatttttattagttttttttcttgcctttcgcgaaatttgattttatataattgaaaattaggctgtcacaaaagtgtagttctcttaaaataaactcgctaacagagtattatttaagtgaaaacattaacttaaataatttctcataatataaaagaattttttagccatcttaaacccaatcattatattcattaatgaaactattataaaaaatattatgtaatttggcatgtacaaaaaattatcaaacaaattataaaggcatattcaatttttctcatataattaaaatctagtattttaattttttttcttttcttaagacgatctaatttatatggtactagctttgttaattaaagtttgattattaactaatacatgaactacttatttgcttctctaaacacaaaaaaaattccaacaacatatatttggaatatgagcaaatacaccatagtagatataatattaaaataaaaataaatactcactccataaaaaaaaaaaaaagtaaatttatattttatttaaaaaatttatttagtttatatgtgaaaagtgtgtgaaaaattatattgataataaataaatacttaattgtggtacaagagttcaaaaatgtataatcgttattagttataaaacaactacgtagattagaagcatatgttgttaataaaacaaatactattaattaattaatgtacatcaacacgtgttttgttaatataaatatatagagcaagactatggtagaacttagcataagttccctaccggtagggaactttttttgaccattgattttagatcatgtggttattaaaatgtaaggcttatatttttatgatagaactgtatgtatacaattaaaactttatacatattataataatatttaattatatttatctaaaaataaaataatattaataattaaaattttattaa

SEQ ID NO: 378724 - DNA, 2653 bp, Cannabis indica
tttgtgttgctatgtggattgttaaagcatttataatagttaaattttagaagatacttacttaggtggattgtttatttggtaaaatactatgatattatactattgaagttaaataggtactatcatagaaaattgtgttgatgctattacatcagattgatactatctctttaataaaagaataaaaaaataataaaaaaaaatagtacaacaatacttacaattaaaataaataatatattgaataataatatatcagatcataattataatatttttgaaaggtgttatactattactattggagtacttttagaattaagggtgccaaaaataatatagaagaaaaataaaatattatatttttaaataatataaaaaaatttaacacttttaaaaatatatcattagagatatttttatgccaatttgaattacaatttaaattatttttgatatgtgggttgttatttggtaaaaatatatatatataaaaaaaaaaaaaaaaaactgggaaaaaactcatatttattatttaaataagatttcggtgaaacctataaataaataggtgctacgtgtgttgatgaattttagtaaatataatcagaaagcaagtcttttcttttctagtcaaaccccttctatatctctcttcaaattcttgacattgacaacactctgctactaccacagataatcagaaacaatgggttgtttaataatgtaagtttttattaactttaatttaatttcagttccaattttcataggggtatgttctttgcatatacacgagactattgtcaaataatattgataatattgtttttgtttaaccctatgataaaaatttttgtgttgaattatattgacagtaatgaaccaaaaagttgtgacaagaactgaaaaataaaaaggtgaaaacctttgcgtgaatgaacaaaattgtaaataaatatattcggtaccattaattcactcaaagtagccctcattagagttcttaagcatcttattaaacagttcttaaaaccaattcccccctcatttattattattattattaatttttcattttttttcttgtttaagaaaaagaaaaatctcttttgggattctatttgatcggttagcaattagtatttagtggtagaagagtcgttttcaattttgaaataacagagtgacgcacacacctcattttgtaaaagcttgacaccaaaaattggaccgacacgtacgaagaaactatgcaaaagttggaatatactttgctctgttcttcaatatccttctctttctttctctttaatcgatttttttttattttttatttttggttttcgtcaacaaaatctctcattttttttaagctgaaactcgtcttctttttcttctctgtgcaaggatcatggagctttttcttgagttagtttccactgttgttcttactgctctgttctgttacattatcggtaagctaatttcttctcatagtggtgattccaatcatggtgatagcaaactgggtttttttgagtgtaagttctctgttcaatcggatattcgtggtttgaatagtgaggaggagcgagttgggtttgttgaaaaagtttgtgaggttgagaaatccgaaggtgggttggttgccgctgctcaggaatttgctgatcgtgattttgggtctgtagaattacgaaaccttttcgagactgaaggagaatatgagagtgttgttgaggaagaaagttatggaggtaatggtgggattaatgagagagcgggtgagttgtttgatggaagttctgagagggatataattgaagagattgaggagtgtacgggcaccaatgagaaagagggtctggctaaatgtgatgaaattgaggtggctgaatttgatgaagtggacaattatggaggtggtgatgatgcaaaggggggctgtttgatgaagatgatgattgggtgggaatagaaagaactgagttggagaggctgttcggtgcagcaatggggtatgttggttcctctagtaatgtggatagagtttcagctcttgataatgatgtgaagatgatgttatatgggctttacaagattgctactcaaggaccttgccttgatcctcaaccaatggcattgaattttttcgcaagagcaaaatggtagttcttaacttcactttacccttctttagttgactgtctcttttagtattttaagcttgtcaattgaatttaatatctgtcaataaacctttatgctgcattaatgacattttaaactatttaccaggtaaacatcatctgttatagagtctagtgggaaagaacaaaaagttgaattgtctcattcaattacttaaaggataaattgattgttttaaatttctggggttagttgtataagagaaaagatgggtgggaggggatatattttactgaactgacaagtaaaagttgatatattcaatttgtacatgcttctcttagagttaactcatctttatattcctccggtcctcccccactgtcggtggtattaaatgcttttgtgtcaaactaattgtgaagcagacttagcagcaaccttgtatgtaagaaattcaatgacttttaattatgctatgaaggatttaaggaac

SEQ ID NO: 378725 - DNA, 4470 bp, Cannabis indica
cgccaaaactccattcccatctcaagctcttccaaaaacattcaatacccatttcgtgccaagtctcaaagtttcgttttccgtgttccgggtcgcgggttggaggaggctacgcgtttcttgcggtttgatcgaaccggacggtgggaagctcgtagagctcttcgttgatgagtctctaaggagagaaaagaagaaagaaggtctggacttgcccagaatcaagctctcccggatcgatctccaatgggtccatgtactcagcgaaggttgggccagccctcttcgtgggttcatgagagaatccgagttcctccaaacgcttcatttcaactcgctccgactcgatgacgggtcggcagtgaacatgtcggtgccgattgttttggccatcgatgattctcagaaacgccgtattggcgagtcgacccgggtcgctcttgttgactcggacgatcaacttgtggcgattctcaacgagtaagtcgtttatgtctcatttaaagttttcatttttattacacaagttttaaacaattcgtatatgtcaaagaacaattcgtttatgtctcatatgatgtttttttaaattaagttttaacctttttgtcatgattcatgaagttgttggagagattcatttcgaagaaatttatagaattagttttttggtcttgttgttttggttaattttggtgatgtcagattggtatatacttatattgaattttatgtgagtaaatactgcaaattatgaggctcaggttttgatgataagaacttgaattttgtttttatctatgatatgctagtctaaatcttagtcttacagtacattaaacgtgcacggttgttaatagtgagtctcaatttatagcttggttaagaatcgttgtataatgttgaagattcaatataacgggtgtctattgtttgaagtttagttgaaagatactaagaaaaagtagggagcgtttgagtctttctacatgggtcattttcaaatatgattttgtgttctttatatctggacttctgtatggtggggtataaaatgtttgaaactgtaatgactttttccacatactttcacaattcaataattggtatttaatatatactgtataggtaatacgtatatctatataaatattttttaacttctctgattatcattaattcattatgctttacttactggggctattttatgttcttaaatacctatttcctggattatttagtttcattttgttttcgactgacaacatggtttgattatttgatcatctcagtattgagatctacaagcacaataaagaagaacggatagcaagaacttggggaactactgcccctggcttgccttacgttgatcaggctattaccaacgttgggaattggttaattggcggtgatcttgaggttttagaacccatcaagtaccatgacggcctcgatcgatttcggttgtctcctgctgaactacgtgaggaattcacaaagcgcaatgctgatgctgtgtttgctttccagcttcgtaatcctgtgcacaatggccatgctttgctgatgactgatacccgtcgccgacttcttgagatgggttacaagaatcctatcctcttgctccatccattgggagggtatactaaggcagatgatgttccacttagttggcgtatgaagcaacatgaaaaggtttgctttttgtcaactatgttatttctcttgaattagcgcgtcctgagattttaacattcaaatttacctatggtattttcttagtctgcatcaatctgaatgttagtgtagttgatttttgttctgatcaaatatgcattcaggttttggaggatggtgttcttgatccagaaacgactgtggtgtccatattcccctctccaatgcactatgctggcccaacggaagtgcaatggcatgcaaaggccaggatcaatgcaggtgcgaacttttacattgtaggtcgtgatcctgcaggtatgggacatccaattgagaaaagagatctatatgatgctgaccatggaaagaaagtattgagcatggcgcctggactggagcggcttaacattcttcccttcaaggtgaacatctaataccaatgccatgatatatttaaaatatttttcacttctcacaatttcaaatcctctacaatcactaatctgctgccattgcaggttgctgcatatgacaaaactcaaggtaaaatggccttcttcgatccatcaagacatcaggactttatctttatatctggcaccaaggtactttgttcttaaaactgttattttagccaattctattgtttactcggttagtcatggaaaaaacattagcagcatattatgcaactatggtgatttttctgtatgaaagttgtattgcttctgaaaatggatttgcgtatctacagatgcggacacttgcgaagaacaaagagaatccaccagaaggtttcatgtgtcccggtggttggcaggtgctggttgaatactacgatagtttggctgctccggcagagaacggcaaagtcatcccgcaagctgttccagcttagatatctttgttgcaacataatatgtaatgccatctgattgggagaaaccttaattgctaatattctccttttgtgtaattcaggttgttgccacaagttttgtgtccagattttcttaataaaataagcatgtgaggctctggtacagaaacaatactttgcctcatctgtaattagtgcctaaaaattgcatcttgcactctagtgcatttctgcatgagggcgcattgtatcatatattggggtttgcttttcatggaaaaacgattgattgtgcagcaatttcttttatttcaatatggaatgctcaatcaattgattctgttcataagggtgtgtaatgtggtctacatcaatcaagacttactactaaaatgcaaatgttccaccaactattttttttaataaattgtttaagctcctttccaaataaaattttggggtttttttgaaggagaaaaagttgacgctgttttttgtcaacgaatttaagaagattgtaatcaagcaagattaacagaagcaatcgttaatcaaagtaaaccggtttgtttaaagaaaatttgacaaagatgaacacgagaattttatcatggttcacctccttttgttggtaataggctagttcacttgggttcttattgatctcaacgctagttcacttgggttgatattgatctcaatgcttaaagagagttctctagagttatgtttttcaagagttagtcctcaagtgagtttttagaatgagagtgagggtttgtgagaatgagttgtccctctttaccatcgatatcacctttatataggttttcatctaggactttcttagagtttaaaatctcttaaccccaaatgcacattcctttaattatggtcggggttaggtttttaaatagaaaatgataacaacaatcatatttcaaaataaatacctagaaaaatgataaaagttgaagatatcttctatccacacgtgtagcttcttttcgtcacgaggaacacatgctgagatcatgtggtaagtgcgtgaagcacgtgctgaggtgaggcactccccactttgggccaagatgagacattgaggccatctgggtcgagatgatgcgtgctctggcccttaaggctgagatgatggatgccaaggcctctaaggtcaagttgaggttgaggcccctagggccgagatgattggtagagtgagcagctcctcacttaggatcgagaccaaatagggcttaggtgatggtgtttgttacccacctttggctgagaaggccaagtagggcctaggtgatggtgttggtcactcacttagggtcgagatgatgatgcacaagactctaagtaaggtccctaaaagggtgttgaaacgattcgacctttcctgtatccaaagaaaaattaacaccgttatctttcaatttttcgagaaataacatttgcccctcaagtttatcataatattactttattacgatggactcgtagaagaaaaatgactcccgcgtttttaacgtcatatttgtgaaacacctattttgccgggaactaccatataaaaataatatttctatgctctatgaaaaatatttctataccaatatttctaatcacttaaaaaataataagagaaaataagaatgataaatgacaacaaccctccttttgcctttaaatatagactaccactcctcagcacccttaggtggcgtttggttggaggtaatgaaatggaatggaaaggaacggaaacaatcttcattccattcctttgtttggttgcatattaaagtgttggaaggaaagactattccattttgaaatggaaggaaagaccattccaatgtatgatgagaaaaatttaataattttttatcaatttt

SEQ ID NO: 378726 - DNA, 4235 bp, Cannabis indica
taaaaataaaaaaaaaaaaaaaaaaaaaagacgctatttgtcaataaataaagtactaaaaatcaatagagggataacacacctcaaagagacttcatgattggcctatataaatatatataaaaattaaaagaaaaaaaaatcaagagaccaatatggttggaaataatttcaaagcgccaatccaatctggagaggagagcgaaactagtttcctaaagatcgacatagttaattaaaaaatataaatatttacactaactttacaaagcaggaacggtaggtgatctctataatcctcttgattttcttgtacaatgttacaaccagatctgggctggagatgagatgagctcctctttcgatccttcaaaaaaggataacattaacacgatgaaagaaacattgactttctaacacaaatgaaataacatgctcctcctccacccactcccactatacaattaatttctcatcatgaatatacaacaatgctgcaacaacgtcccagctaatactacaatctgatgacatctttccattttctgggatgctgcacttgcaaaagccccaacccgacagtcccctcgtgtttaatcagacaagcattgcagtttcaggagtctcccattcagcttgaggaaaaggtaggaaatacacatccatggggatttgaattctttcatcctccgtgcaaaaatcaaaagcaaaaccaacctcaatatgccccttatgctacccaccaggctctaatggttcaccagagcaagagtcctgattgatctgcttcttatttgaaaggcaatcagcaggaacatatgcataacctttaggtaaccgcatgtttttcacatttgcttgatctgatgtcattactagctctttctcaaaagtttcttgctgtgatttaagaatagattaagaaaaagtcagtaaaattgacagtaaatacaattttgtgatgataaatcataataccttttttaactttgacctccatcctccatcatcatctacaagattactggtagcagtaggtctatggggaatctgtttccctgaatattgtggcctctccacgtgcttccgggtaaaatggttatgagatgtggtgcagtcatcttctgtcctatggtcatccatggtgctggagactttacttcggcgtttgaaagaaattgtactgtccacagttatgtcatctgaacgttgaattgcatcgctgcatgatttgtaaccatctgtgtggcctttgagagatgttgtaacggattctgagctaacatcatgaagacaggagggactttgaacaagcaaagaatgagccacatgatctcgtttcatagcaagtatctcatgtgagctaaaaaccaaatcccgctgcacatatcaaagaaaagtacataaatatactcttgaacatatatcagaacacgcaccaattcagaaaatccttgtcagcacataaattagaacacatgtaccattcaggtaaaatctgtctgcacataaattagaacacatatatcaacccacatatttccggaatagatgtgatattctaattctatcttaagatactgatccaacagccaagagataaaaggtagatgccattagctagtcatgaagggacaatgctagcttctctttggcctctggtggctgttcaaagtacctttctattcaattgtttctattttttttttttttttgaaagaaccaattgtttctatttgacagcttcatatctgtctccccttttttcaggtgttatggctccttggtaaatttcattgtttgatagaattcattatgcttttttttatattgatgccgtttgtggcaaactatatataacacctatcaaaaatatacaataaatactccatatattcttttgtttaaatcaagtaatacctttaatttttcacgtttgatgatcctgtcacaaagaagacgtaacctctctagctccacctgtaaatgcattaatgcatagacttaattaggtgattacaaatagcaaaattagggggaaattgtattttaaataatgcataccctaacttgcttgaaccgcttcaactcgtcgattccgtgtttttgtgtttcagcctgtacacattaagaagctagaaattaggaaaaataaatcataatccaccagggcatcattttaagagaagaagaaaataatacatgaaatcataaaccataagtggttgcactgtatgtgtactaaatattcaaccttagcccttcgctccaagctatgcttttcacagtaagccttgtgctgctgcttccccccggaagactttactatgttcatgtgaaaaccgacacttctggcacaggatggatgaaatgtcgcttgacaatggccataattgcactgcagaacaggaagtatatagcaatcagctatcttgatagaagaatactttagttcatgagagaaatacactgaagaagaaacaaaatctgaccttaatgcaaacaccatatttgcgatggcagataaggcacaagtcaactgcctttgacaccgtctcctgtttaaaaacaagcctacaataagtactggtttctagcaacaagatattttataaactatcttttctatgagagaaactattttatctacaacatgaagtctattaacaatgaaatgcagatgtaaacataccattcctgcaactgaatctacttgacctcttttgaatcttgactcaaagacccactagaaaaagacaaacgcataaataattgtcactacaaaatttaaaaatagagctgatatattcatgagaaatagaatttataatttaacctcagcacagaaggcatggacccattgactattagaagatttcctaaaagcaccagttgtgccaccgcacaacccacattcagcaacaaaataaggtttctcccagaagttgacagctggagctccggaacttcttgatgatgataattcttcacataactcacagtaccatggaccagtagattccctaacactccgatagcaatccaggtgaactgcgacctgttaaaagggaaaaatttaaactaaaatcgataaatgaatttacaaatgagcaataattagagaaaacaaaccttgcaactacaacagactaagataggatttaatattgtctcagaacgtctgcatatgtcacatgatctagggtgttctttagagaaatctactagtgactctgcaaaatcagtttgcttctctagcgaaatcctaggagccgccactctttgaagtgtttcttttgcccgtgggatcagctgagagccacctccaaacctcccactggtggtgttcaacttcatcatgttctgtaaagtaaactccgttaataaataatttatcggaagaataattatttagatatgaaaaagttagaaacctcttgatgagtagtttcctcaaatgcatctttcctaaatgaagaggtccttgaagaagctgcagcagcagcagttgcagctgctagcacagcttgtgcctccttgtgccttctctccttcctcccctgcttctttgcctccctaagctcataaagatactgtgtaacaatgacatcatcccatctgttcacactagccagatcaatctcctgtggcagactcttggcaacattaaattttaaattatctgcaaaatgtaaattacatagtaacgtatcaacataaaacaaaaacacaaatgttaaacagaagctgtgagaatagtgtactgaccagtaaatcgctctcttgcaactgcattactcagtaacctgttctgataataaatgatttccccttccacttcgtcattaggagaaaagtccagaattcctgttttcctagaagaaattaactcttctaaagtcactccatcagctttacaagtcatcccacaccttgaatctttagttgggtggatacaacagtcactggcattagtgcgcacctcaaaacgagacatacccccatctgtggaacctgtaaagtcttaagacctgttagagccatcaacaatatcaatcaacatagaaacggcaaaaggcacaataccatcattaaactcgaattccccagctgtctttacatcgaccttattctgcatctgcattagtttcttgcaaatatctggatggatatagaaactatgagcggtttctgcatcagcttttctgcatcatataaatatatatatataagaa

SEQ ID NO: 378727 - DNA, 12335 bp, Cannabis indica
gaaacaatctatgttcgaatcttcgaggaaaggatggatataatccgagcagccataatcggtgcagctggaactccataccatgatggtcttttcttctttgacatttatctaccacctgaatatcccaatgttccaccagtaagtttcttctgcatttactcaattaccaaaactctatcatggggttaagactcggtagctactaagtgtagaaagtcaataaagaagtatgctttatcttaatttgtaatgatttgtaaacttcttacagatggtacactataattctggtggtctccgtcttaaccccaacttatatgagtccggaaaagtctgtctcagtcttctcaacacatggacaggctcaaacactgaagtgtggtcagagacatcaactattcttcaagtgcttctctcacttcaggctcttgtgcttaacgaaaagccttacttcaacgaagctggctacgatcagcagataggaaaagccgaaggggagaaaaactcagtaagctacaacgagaatgcattcctcgggacctgcagatccatgttgtacctactacgtaggccacctaaggtacaatgctaaatccatcacaacgaacgaataatttgaaattaggctccccgtctaatcttacaatatgtgtgatcagaatactatattaagtttgtttttcttgaactattctaggataaagtttgcattgtttttgaaattgaaaaccataaacatgaccaagagctactaattttgcagtaaaagttagcctttttcggttttttaaatctaaaaactgttttttttttgagatattctagtataaaatttgcatttttctgaaaaagaaaacaataaacatgaggaagagcttactaattttgcagaaaaagctagccttttttctgctttttaaatctaaaactatattaagttcgtttttcttgaactattctagtataaagtttgcatttttatgaaaacgaaaactataaaacatgaccaagagcttgctaattttgcagaaaaagttagcctttttcggttttttttttttaaatctaaatctatattgatccaaatgaacatatttctttctctgcagcattttgaggcacttgtggatgaacacttcagcaaacgctctcatcatattctaatggcgtgtaaggcctatatggaaggagctccggtgggttgtggtgaaaccgaaggcaaccctccaaagggaagctcgacggggtttaaaattatgctttcgaaaatcttcccaaagctggttgaggccttttccattaagggaattgattgcagccaagttacattacaacccgaaaaatgagcagaagaagctgcaaatgtttcaagtgacagaagtagatgttggtaaccaaatctttctgtacttttgtataatttgtataatagttatagttagtgtgctgattgaattgaaatccatccaacaaaaaaaagaaacaaaagcaagaagataatgcttttggaagatcttatggtatgtttttgattgagaatgtggtgattgattcactcataataaagtgttatgtaatatattaaaggtgtaatctttctcctttctcaaggtcttaaattgttgtaatatatgaatattggtgttgtgaaataagttggatttgatttgtgtgattttgttgttaatttatttcttcaaaaatatatatctatcacctattttagtgccaaaatgatatggaaatattaatctacctttaattttggttcattttatctttaaatagacattttattatgaaatttttgataagaagcaaaataatattgctttaagaaaactagaagttgacttgtgaaatattgtatattttaggatgtaatttgagtgataaatgaattagactaattggtgagaatatatatcctttcctttaatatcattttccaaaagaattttattttattattctttactaagtacgtattaaaatttaaaagaggatatcttgcaaaagattatgtcatatatatggcataataatcagaaaaagaaagaaaaatagtttttcttttgtaagattctttctaaataaaaacgatttactatttttggcaaaaaagaaatataatacaataaatatataatcaaaattaatataataaatataaaaagaaaaactaagaaatgagatgcaaattaagttttatatatttataaatgctctctaatttatattaagataaatactattttgaatcttgtgttttgtaaaagttactgattaaatcattcgtttttttaaatgacaaattagaagtatttaaaaaatagtacgaaatagtactttgaattaattttttgtcaaaataaaagttaataataactcaatctagatttattatgacaaaattagatgtatctattagtgttagaaattgtcttcaagcttattatattaaaaaaaaataatcgaaaattgaactcaatacactattttaaataacttataaaataccgtctacaaaatagtattaatcattttttttaaaaaataatattaatcctttctattataatcctatttttcattaaaaataattattattattattcaattttgaaaaaaataataaataataattaactcttttatcttaaacgggtcagagaaccgggttcggttcaaaaccggtcgttataactaactaactataaatatctctgtcacttccaagcttcctatccgtacaacaatggaggatccttcttcttcttcctcttcttttttttccaaatccaaacaaagggtttttcaatcaacccaaatgtcactccttttcctcttcttcttcttcaccaatttcaaacccatcgactccgccactctactcacacccactatatttcccaatttcgaatccgtatacgatcaacactgctcccacatcgtccctcgaaacccttcactctcccaccgattcgatccctccatctcctcttcctcaccttctccattccgattaggttacttcagaggcggcgctccattcctcaaccaaaacccagattccgattactacggcagcaccggctataaatctcaatctgtaaacttttatccctttaactcagtcaaaaccctaaccggagatgtttaccagttccaggcgaatttgaatcttcgtgacacttcggtgaactccacgcgccgccgtgggttgcgtttggtccgatttaggggaccgaaatctgcgattcgaagacggcttaggttttcgcttagtgggtattggtcagattcttctcggaagctttgtatggttggatctggctcagctgcttttagtggtaatctaaactctcttagtgttgttcttaaacttgattatccaattaatgctaataatatctataatagtttgataattgggagtttagagagtttggatggaagttttgaacagatttctttaatgggtttttatcaagaacaagatttgagctatgaatacacattggtagggaaagagaaaaatgggtgtgaagaagaaattggggaaagtttgtctcttgaaaaccaagataaatgttttgttcttaatgcgattgatccaaggtttaaattttattgtaatggtgatgattgtgatgttcttggtaagagtcttggatttgtacctactcatatgttttatcacaagactaggtgttctactaatgagactaaatggcaaatgttgttgagtttttctaactcaactgttgatagtcctaggttttctttcacacccaaatcgagtttcattgctgaaggggaatggaacgcgaaagacaatagattctgcggttttgggtgtagggttatgaatttcacagagtcttttgctaatgcttatgttggggattgtacagtcgggtttaacttgaggtttccggctagcttttctttgcgaaataggagtagtgttgttggagaaatttggaacactacaagtatagcgaagaagatcgagtttaggagttttgatgaagatttgttgggtgttttgggttaccaatataagtatagtaatgagattgatagtgagacatttggaagaacttgtgggaaaaagaatatggttaaaggaagaaaggggaaggcatacccggttgagtactcgtctgatatgaggtttgatatgtcaatacgaaacaggaaagggcaagttggttggggttattcgacaccattttatgtggagaatcagctgtatagaccaaaccagttctatagagttcccactaactcacaacaggttatgcagactccgaaaagtagccaaagcagcttaatgaatataagctacaggatgagcttgacattcccaactgatttcaagctcggtggtgagggtttttcatcgaatatggaaatatctgctgaaggaacttatgatagggatactggggtgctatgcatgagagggtgtcgaaatctagcatcaaaaactcagaatgcagttacaaatcatacattagattgtgaatttacagttttcgttcagttttctcctttgaaagcaaatagtggcaaaaacatcaagggaagtattgaaagtagaaggaaaaagtcagatcctttctactttgaaagtttagaattgtcttctaattcactttactctggccaagctgcagcctccatatggagaatggatctagagataacattagttctcatatcgaatacactcacttgtgtgcttgtggggttacagctctttcatataaaatcgcacccaaatgttgttccattcatttcaatcgtaatgctcgttctactcaccatgggaaacatgattcctctgctgttaaactttgaagccatgttcgttgcaaaacgcagccaacagaatgtctttctaggaagtggaggatggcttgaagtaaacgaagtaatcgtcagaatagtaaccatggtagccttccttctacagctacgcctactccaactaacttggtcctcaagacaagaaaccgaaagcaagaaaaccttgtggaacaccgaaaccaaagttctctacatcacattaccaatctacattggtggggcattcatagcatggcttatcaaccatttcaagaactcatatgggatttcttcacaacacaggcacaaattctacgtcgtgtctccaatacatagagatcgacatgtacattccctttgggaagaccttaaatcctatgctgggttagccttagacggcttcctactccctcagatactcttcaacgtgttctcgaactcgggggaaatggcattgtctccattgttttacacaggaacaacactggttcgtcttatgcctcacgcgtacgatctttacagagctcatgcttatgcttcatatttggatttgtcttacatttatgcaagccataaaatggatttgtattcgactgcatggaacattgtcatcccatttggtggtctgttgttagctcttgtcattttcttgcagcagaaatttggtggtcgttgcattttgcccaaaagatttagacataataatagttcttctgtatatgagaaagtacctgttgttataggcaatgatgatttatgattctttgtctttgttacatttaaacaaattcttagatagatatatatatttagaagagcatgtaccacaattttcatcaaaagagagatcttgttgttttcttgtttctattttaaatagtttttattaaattattattggtgtaaaactctagaattgtgtcgaaattgtatactattttgatcattaatttcttataattacaaagggttttgtccaaaaagtaaataataaggaacctagaacagaagttggaacaatttttctaaatctaacacaaataaccattgttgaatttgaattattgattttattttaataattaaaatgaataaaaaatctaaaaaactacattaaaagaaggatgcaaacttcccaattcccaattgatgaattttgcaatgaagctgccttacattacaatttacatgattacataataacaataattgaagaaactgagatgatatgtacaaaaccagagaataaatagctaagtaaacaccaaaacatactctctagtctctgatctctaccactactactaccaatcatgttactcctaattactacccaattcatggctatgggaattgaaaaaccaaaatctaactttgttcaacaaaattacaaacaaacttgaaacaaaactacttgttgtgtcagtcgaatcgatctaaggccactcttcctcatctcatctcatttcatgccctgaaatatagttagaaaattccaaatattagaacacaataagcagtgattgtaggcttggtaaggaaagacaaaagtacaatatagaagaagtatatacctctgagtatacacatacaaactcttctctttggtcagtggaattaaagctggttttcgattccatctcgtaccctgaaacattggtttgaaactaagttgtaaattttccaaccgaaagcaaaccgaaagaaccaaattctagttttgctcatttgagagtagagtacctttaggaatttctcagttggtctttttgccggtgagaatacgagatatctgaagtcctctactgaatgcttcattaaataagatcctagtttgcattgcttgaaatccaggtaaccaagagagcaatgccattggcatcatgacaataactccaaacagcaaatcatacatccgagcaaccgataccaccgtctcccaaaccactgtagactgtaaaaagggtctaagaacttgggctattaaaatgattccccaccctgtgggaacaaaggccaagagacttgttacaatatcgatgaacttgaagggagtgaactccagcagtagaacaaccacaagtactaacaccaaaatgacaagaagttgaacgagtctgtagtacatgtggtctcttacagcgtatttgtcccgagcgtacgcaatgatcatgtaaatcccgacggccactaccatgtaaatccatgacagtaaataaaccgctatactcgtgtttccaccggaaatgcccaactggtacacaacaccgtattggaagaagaagaagcggagatctaaaagaatctccaacaactttccccaaagaccggttgttttgaggtgatcttgttcttcgtaccaccacctttcccagctatgatcagaagttgtaaacaccccaccagtaaaccataaccaattcatgaaaatctcaaagtcttctacagttttcagccaatcgaaacccgaagggttgaacacaaaaggcgacattatccacgacactacaagaaaccagctggacaacgacatgatgatgtaaacaaaggtattatcagccatgggactgtgagaagcatacactgttaaaataaccccgagttcgattgccttgacaaaatggcttcgagcatagagtcgatagttctcaacaaagctcttgtgttgcaccacgaatccacgtccagttgctcggtacttagcacccccgtgaagaatggttcggccaaagaaatgggtgcgagttcccatagaaaacgtgtaaaacaacgaggcgagctgaaactgcatagtcaagaaatcccaaattgcggggaggaagccgtgctcaagagagttctcaactatcatagggagggcagtgaagataccgagttgtataacaaactgctgattcaagattgcaccgagggcttcattgttgctggtgttcttactagcgacatcctcaaccccgctaagagcaagataaaggcgcccccataaaaacgtataaacagtaagtatcaccatcattgtgttaaaatagtatccaacagtactgtaataaaatgatagcattcgaaagaaatccaatctgtgacccaaccgatacacatctctgctcaatacctgctcaccattgccactggctaccttagcttcaaacatggaaatctggttcagtccaacatctctcccttttcctacctgaatatactcgtggtgagtcacattcccgccccgaagagtgcaattgaagccggcgaatatatcctcgctgatgttgattacttttgaagctttgctgatcccaccccgaggcaaaaaccagaatctatcgaacacatccggatgaccatagtgcattctcacctttaaaggatttgccaaaacacgctgacccagagtcacgaaactcgtttcttgggcagacatgaaccaagcaagtgacgacacagaacctgtgaaaatgttctcccggacacccaatatggttggcttcctaagaccataactgaccttaaactcctctaacaaattcctcatcttgagtgcctcctcaaaataattatcttggttcatgtcaatggtttgaagtgcatcaccccttgtgaaaatgatggcgtggttctgattttcgggttttccttcaccgagcttcaatggaccgggcaacctgattcgataaatctccacctctcttcccagttgttgatcatacttaacaagaacagagtaatactcagcatcttctctaccaaagttaaactcatcgacataggcaattcgaagggcctcattgtttttcatcaaatatagaatgtcctcagcacgggggtctccctttgctttatgttgaccgtacagttggcacgccaccacatatgtaaatttcattagagcacacccatactcatgtcctttaaacaaaagaccaacaccgctacctgctctgccaagattcctcgaagtcggttgcttcactggctgcataccttcaaaacctcggtttcttttcgctgagccgtgagaggcaatttgctgtgatccttctcttatgtccatctcagacgcattatcaagaaaagcaagcatttgaagggctctatagtagtacatcattccccttacagttcgagatagggtctggcctctgtacgatgcccaaagtcggagatcccttcccttttcttcccatatctgctcgtcatgctccaatccttctctccgcattctctccataaagtttgtccactcatcttcataaatcttctgcagataaaacagtgtggaaatcccatcttcattgtctttcagaagcccatctagtttaaaaattacatcttcatcgtagtaaggtgtcaaaacactgaaagccatcattttctcaacgataggagctcgaggcatgttcataaatagagaattgctgaaaaaagcaatgcgccttctcgcctcaatgttcttcgggacgttatgtatgtaatctctggaagttaagatggtatgcaggcgcctgagttgcctatagaagagtgcatcctcgccgggaggaaacacaaccgccttttcaaataacaactctgtctgattagctggattgatactcgccaatccttctcgccttaactgctccatggatttcttcgcctttggtaattcgcgaactgaaagttcatacaaggcctgcaataaattcactgctttttctatatctctctttgggttcaacaaaagctcgataagcgaaatcaacttgccatgaattttttgaagcagagacatcttgtactcaactgtgaactttcctctctgaatgcaactatctatctcgttgaaaaacctttcaacaatcaaatactcttctgtgccgtacttaacaatcacaaacaaaaaatgcttgacagtatcataggcttcaatcacagcacaccgacgatactcactcttgcatatcttcaaccaaagagacaagtcggtttcatcagccagctcagtcgcctgactaagcgcaagcaacaattcattacaaataagaaaacaaggccaccgaataacccgaatgttccaacaattcgggggagttccaaaagctcgagttcataatcactgatgagatcttcttccctgaaagctataacaatctcattccaaatcaaagcaaacctggtagtttcaacttgactggattcgatcttcttgaaagcctgaccaagtccatatctcagtttcaatctatgaatagaatcacgggccttcttcaacagtgacatgtcagaagttaacagctgctcctcaggcataagattgaactgcatagcactagcaaagaactgaaacctgagcctaagctgcccgatatttcgaatctcacccaaatgtgagaacaacccaattgctgcaccataaatggaagagaatatagcataccaaatttgcaaatccatcatataaatcaatataacaggaagccataacaacacaacagctatttcattagtactactgaaaaattcatgccaacggtactttccatcaagattcaaaagagcctttgttggagaaataagaggcttgatttgcaagaaataactaaacgagaatttagaagccaaaaccaaaacccagaaaacagtatacttgatattatcaaataacccttctctcaatcccctaccgacgaaaattcgtgtatagaaccaccatgtcaaccaagaaacaactctccaattcaactcttccacgaaattcctaacccaaggaacaatgaaaagaaccaatgctaacaactcaggagcaagaaaaacaagaacagcttcaagaaaagtaaagatcctctgatcagcaccattagaccatctcctatcagaattcttctgactccatatcctagcatacaaaacagagaacacaacagtccatgccaaagcaaccaagcttttcaaaaccatcctcaaaccgagccacttcgtctccctcgaaaccaaactgtactgagtcccagcatcaagcacagactgaagtaacctcaaagcaccccaagtaataaacacagtaagaagctcaacctgaacatctcttctctccaaaccctgccatggaaatgtctcaccatcccaagcaacaatcacagcagcttgaaaaaacaaaatcaacaaaatccacaacctatcaaaactcctaaacaaattccaaaacgatctttgctcaacaaacccagtcttcccaactctcctactcttcggagtagtcgagaagaaattactccccaaatcaataggccatttaagcttattaaaacacctccgactccaaaaatactcattcacatcatcataatttctccaagcagaatgaggagctttaccatttctactactctcaacctcatcactaatagttttataaatcggcataatcacactcttcaaaaaagcacaatcaccagaaaacgatggcaaaaataactgaccagtattaggatcaggtttaccactcaaaacacgattaagctccatagccatatgatgataaatataacaaatacattcaggagcaaacctcagattcccagcttcaccccaaacaagaagataaagagccacataaagcaactcacgactacaatctccacttccacctctactaccgatcgaaacgttagacttccttccaacataagaacaccaagagctataattctgaagcaacttcttccgatacttcctcagaacagattgctcaagctgatcaggaacagccggtggaggttgcaatcgcatttgagagttagccaagtgaagaaccagatgctctctctggttccgaacgctgtccttttgaaacccaaagaacaatccaagccagtccatgaggtcgtggttaggatcgtaagccgcgtaaggatgaagaggcaatcctccggtggatttcagagcagccgcggcggcgcgtacctcggggtacctcatggaagggtggtccatgagtagcaagtcgtggatagggataatgttatagacttctctcattgacggcggcaccggcggcggtggcggcgcgtaagagtctcgagctccaccgccaacacggtggcgcgtggggggcacgtagtgtgtcatagtggagacagagagtgttgtggattttgtttgggtttattaaatatagttaaatttgaagtttaatgtccattttcagttaccattgaatagagtgaagaagaagaagaagtgttaatttatatgagagagagtggattgtgttgtgttgtgtgtaacgtgaaaagtgggtcgtgtagtgggttaagacattgggccacgtaacgtaacgtaacgtaacttaccacaaaaacgaatatgatggtgaaaagtttttttttattattagtgttatttaaaatgggtaaatactattttggactctgtattttgcaaaagttacagactggactttgtgttttgttaaatgacaaaatggaccctgtatttct

SEQ ID NO: 378728 - DNA, 1234 bp, Cannabis indica
agagagagagagagaataatatgtaaggagagagagcacaagtaccttcttcaagggtaaaaacccaccatcgtaccactaccaggcttggaatacattaaaaaattagagggagagatattctaaaaagacaaagagatcaaacaaaagagagagaaagagagattaccacaactgaggagcgcaaggaaggaggagtgagggaggaggtcggtgagtggctcaccggggagagagatgagaggaggaggggtgggtgtgacatgttggggctctaaaggaggaattactaaaaaagagagaacgtggagaaagagaaagagctaagatgaaaaaaatattagatttgtgattgggttatatatagctacactatactatagttgatgcttctaaacattcggctgtagttcagtcggttgtttaaaaccgatgacaattttctctttatagtttttaaaattaaaatttgtgcccattaataatcaacaaatttttttaatgaatcctcataaatgacaaaaattgtgaactaattgtgtcagttttaagcgctcacatattttagcgtctgttttttaaaaaatgatttaaaatcgataggaattgtctaatttttagtagtgttaataaagtttcacaatgagactttgtttgattttctctattgttcttcatattttccttcttgtctttaaaagtatcttccacaatggtttttgaaatgccttcatgcaccagcaacgccttaattctacacatgttgaaataatttttcctagtgaagttgtcaatctcaaactttcccaagctaatccttgatgtaatcttgatcttgatacttactattcttgaacatcgaattcctttggctctatttgtggtgattcaaactacacaaacaagaacacaacaataagcacaccctctaatgcaaatcaaagatgagataaaactaaattagcaaattaatcgaacacaccaattacgtggatcaataaaatattaggaaaacacttgatctaatccatagggagaacaaaatatttggcttgtagtcttttttaataaaataatcttcaatacacgagcttagttacagaacaatggagattgaaactcttttacaaaattgagaaaaatttctttccaagtattttcccaaaaacttaccctagcgacatggatgtaaatattcgatacatgcactactacaatttggccttttagtgac

SEQ ID NO: 378729 - DNA, 2402 bp, Cannabis indica
aaaataatttccaacagtcttctactagctccttaggtatttcttatcctatgacacattgtatgaattgtaataagttttctccacgacaccgtgtttttcttgcaactagcacagaaggcatagagcctcagttttttaaagaaactatgtagaatgaaggttggcacgaaactatgctggtttaaaagctaataacacttggaaaatggtagttttaccttcacataaagggctcttggccttaaatgggtatacaaaatttatatcatatgaatgggaaagttgagtgtcttaaggctcgtttggttatttttggcaatcatcaaattaagggggttgattataacaaaacttttgctctagttacaaaaatagtcattgtttgtgtgttcttagaaattacaacaatcaagaattaggccttgcatcagatggatattcataatgtgtttttgcatggtgatcttgataaaaaaatttacatcaaacttcctcctcacttcgatgttcgcacttctggtttagtgtgttatctcaagaagtctttgtacaatttatgataggcattgtggtgttggtttgatatgttagttgcttctttgaagacttatgatttccttcaatcctatttagattactctttgtttactctacatctcgattcaacttaatgtccttatgtatgttgatgatcttattatttctggtaatgatgcttccattgttaatcatttcaagacttatttgcactagtattttcatatgaacgatttgggtgtgttgaaatatttttttggcattgaagttgttcagagtttagagggaattttcttatgccaatgaaaatacactcctttgctatgggcttgtcccgctggtttccccatcgagcagaatcactcgttggctctttcaaaaggatctttgctcgttgatcccaaaaggtataggtgcctagtaggcaatctcatttctctatccttcacacatcctgacttggtttatataaattatatcttggctcaatttatgcaaaaacctcatcaagatcattgggatgcggtgcttcgtacgattcgttacttaaaaagggctttcgggccaaggcattcttcttcatactgattgtgagttatctctgactggttggtgtgattttgattagacaacttgcccttttaatcgatgatctcttactggttggatagtatttcttggttcttccctgatttcttagaagataaaaaaaataacacacaatgtcacgatcttctactaaggtcgagtatcattccatggatgtggttacttcagagttgaaatggcttagggctttgcttgtgattttgggtgtctctaattcgtcatccatgcgtttgtattgtgatagtcaatcaacactttacactgctcaaaattctgtcttctatgagcgtaccaagcatattgaagttgattgtcattatgttcgtgataccattcgtgatgagattaccactaatgtctctactaatgatcaacttgccgacatcttcactaaggctcttggcaagcgcaagtttttgtatttacttcacaagttaagaatttgtgatggccatgctccaacttgaggtaagggtggcaatttgtgtttatagatcgtattcgtatcgtgtcaagatccatgtataatagatatatgcctaacctgaatatgaccagtttaataatcgtgtcagaaaatgaaacctgaacacgacttatttataaatgaatcgacacgacacgacccgtgtaacccgcttataagtatattttggttaaacatgtcaactaataacacgtttatgacatattcaatacagacccatttatgatatgttaaagaactaaaataactttaaataggtcattaacaggtcaattttgtattagttttgccaacccaaacacgacccatttattaaatgggttagacaagtcaacccgaacatgagctgaacccatttaaggtaaaccaaaacccgctaactctcatgtgggtttcgaatcgtgttatcgtgtatgcatcattttgttagtcctaacttgaggggatatgaagttaattgtatgtgagttgtttattagtacatgttaattatgggcttagaccctaatcttatgacagtacattgtatatattatcctatgggtgagtaaataaaattaaagaaacacattatcccaatccaaggctgtctcaaacttttgaattacatagggcaaaattttaaattggggcctttttttaagaaaaaaaaaaaagaaataaagtaggctttcacatatatataataagtggaaattacactctataccctttttatattgtcctcttttatttttatcttcttttttaaagtctatcatattta

SEQ ID NO: 378730 - DNA, 3229 bp, Cannabis indica
ttcgagtgcttagaagtgaacttcctttgaatctatttctatacctcaaatatgttcgtggtatgtttaaatgatgtcccaatacaatgtttgacacattttcactaagacggccccagaaattgaaaccctagttgggaatgtcaacttgggcgctaggtgaaaccctaggtgctcaggttggcttttgggttgtagtttcatgtaattttagctcccgaggcttgaattaggttgttatatgtcttcatggtacataatactgaacgatagtgagttggactcaagttattgagatccgaactttcatcccaaagctcctgaagtcaacctgggtgctagggctagggtcccttcccaggtcgactgctgtgacttgggtctgctcaactttgtgatgtcatccttcttgccacatgtcaaacatggatgtccacattaccagaaaaatttctaaattaacaaatagagtatgcaaacaccatctaagtcgaatattatgatgtaaacaatcttatttgataatacaatttgttgttaagctatattttttagcgtcaacaataatatagggtgaatatgttagattcaacacaaaaagaattaggttaatttgtgtatcagattattatctagatatatatttagcagttaatataatgattaattaataaaataatgagatataaatattttatttaaaagaaaatggcagcacatatattatatgtgaccacaactagtatatatatacatcaatctgcattttaacaataatataagtaaaatgagtaattaagtataaataggcattagtggtaccataattaattgtagggttcacaagcaattttattttttttttagattagggttcacaaggatttgacctctcatctaccatgaagtataagcacaaataaagagaggtccacttcataaacctctttcaactgtaatacttaaattggaaaatgacactcatctactaatttagtctcataccccactctaccttcgcccttcttctttatattttattatcatatggcatggaaattggcagaggaaactgaaaagaaaaaagtgtttcttcctccatcaacttgaaatctacttctttaatttctttcatacaaataaatgtaatgattaacgtttcagtagagcctttccatggattccattaatgtctattgacaagtccaatataactccacacacacatgcataaatatatatatacacatgtgtgtgccaaagttgagactgagcagtgtgcatgagggcactttttatatgtttgataagaaaatgtataatagaaaataagtcaccatgcatatatattgatcttaataacatttcttttttaggttcaaataatgaccttaagtcgtgtatcttgaaacattgagatcatcgaagggaaaaaatgaaatagggaatccatgaattagaatttgttactttcatgttttaaattggtataacattggctcctatttagtttaccctaattattcataataatgattagaacggcaatgttgttgttggggtccatgtaataaactaggtgtttttcttctttaatatgatgtgttttgctaaatgaattatgtttaaaggattttgttttttcttatttcaaagacatatcaatactaattattgtaggaattgatgtttaaaatcaaaacatatgtacaaaccctagctagctagtatttaaattgattacatttttattcttattttcctaacccttttgctggtacaagaatatgtctgaatagaattataaaatttgcttggctgtatatataagaaattgtagcttaaacaacaaaccgtttgggtaatgaaaaaaaaaaagttgggacactttggtaggtttctaggaataaagtttgaagtacaaaaaaatgtattaaatatgaataataacaattaaatgagataagggttcagcttcatcttcatcaaagatatacatgaacaaatattaatttgtcctttgaaattatgatagtaggacccagaacttgttccatatttcttaaagtatatctcaccatacaataaaattctgaaatatgacactttttcccttaagtttacagaaagtgaattattttctctttttaaagtatttcagtttccaaaaagctaatagcaaccccatgttccctaaagctttaataagagacaatgatgagtctcaaagaaagaaattcaataatttctttagacatcatcaaaacaagttcaataaagtgacatcaattgccttgcttcattaaagttctatagcataaaaagaaaaatgaaaaagaaaataagtttagtaatgaaatcacttatgtatatgacaatacaatttttggttcattttggcttttcataatctaaacttgatatgaatatcgattatttcaaatagaatatttaatagttggtaagaaacatgaaaaaaaaaaagtaagaaataaagtagatactgcttgatgacttttgaaaactttagttcattggttactcgagttagaatacaggtatatattttgctttgaaaaaataataatcacaaaataaatttaaaaacgccaaggatttctttcaaactttagtagtaccatacatttatcagcatccagtaatacaaaacaaaaaagggtcaaacaatattcaaatttactcacatatatttatatagtcaaataaaaaaaaaactcatttatgatccaattttaaatctttactagctagaagtgaccaataacaatatttggagaaatctattcttattatgtctttccattgcatgtatatgatgtagcaaatatttaatgaatagtgagacattaatgccaagagatatttatgttagtcatactatagtataggtacattagaaaaattaaactctatttattagaaagaagaaaaaaattgtagtgaagtaattagacaatattttcataaagtattacctactccctatattaagaattacaaaattattagaatatgaacgaaaaaataataattatatggtgctaataatctccttcacatctcttcgatatactatgtatatatatatatacaaatataatttgtttacaaacctaattaaaattttgttctccatatgattattgggtgtagagtatacaaaactatgtgtcagtgaaagtgaaatgtaacattgtgaattgtcttc

SEQ ID NO: 378731 - DNA, 6532 bp, Cannabis indica
ctagtcctaatggtcatgtcttcctctttagtgtatttctgaatgtagggtctttcaaagtattaaccttgtttttggttcttttcctaatttgtttcatttttttgaaattataaatgtttgtttgtcttgtgtaacatacacaaccaattatctatcaatctatttatataatactggaatataaataactaagattgatactttttttgcacaggggccgactggtttgtctaccgaaacaaatatagtgttaggtgaggtgaatttatttgtagatattagaattcatattgatgattgaaaaatggggatggggttgtgacatctagtcctaatggtcatgtcttcttctttagtgcatttctgaatgtagggtcttttgagcctcacatggtgaaggccaaggctttgctccacagtctctccctttgcttgtaattgggatatacgtctgaaactgtttgctcagatcacttgcgtttggtccttgtgattaatagtcaagacattcatttcaatgagtttgatattatacttaatgatattgttcatatttagaattctcttagtagtattttttatctcattgtaaaaggtctaaaaaccttacttctcattcattagttaagtggacttttaatttagacgaatcacgtgttcaatgatcgtgcctcccaataaatttacttgtttgatttttaaggctcctttatacttgacccatttttggctcgtgccttggaattatttcgttttaaaaaaaaataacgaaaaattagaaaactagattaaataaaaatcaccataaaaggaaaatatgtgttgaatcaatagaatatatatttattaatatgacatgcaataacatcaaatgactctgtggcccaatggataaggcgctggtctacggaaccagagattctgggttcgatccccagcagagtcgattcgctttagttttcattttttttcattttattttatcatttttcataaaaatttagtaagaaaagaagaacctacgtgtcataatattatatttatcacaactatatattaatatcatttttccttcttttctttctcttttagcctaaaagcacaagcactctgattactagaagagctaacatcatgattgaatacaaggttgatttacaagtgtcactatattactatacacttcaaaagcaataaatatataaatgagattggacacaacttttgcctagcacttttagacggattatctggcaattgattaacgatactttttaaaaattattacattgaattatatgagactcgatacttaattgcatcaatgacgatattaatacataagaaagtgtgagatacttctggacattggtatcttttagtatttttgatatataaataatgatcattattattgggtaccagtggtatctagtacttttaaacatgtcgtcttgttattgagtaccagtgttgtctagcactttttagacatatcgtcttgcaattgattaacaacactctaaaagctattgcattgaattatataggacccgatacttaattgcacaaatagcgatattaatacataaaaaagtgttagacaacattggacactggtgttttttagtatttctgatatataaataataagtattgctattagataccagtagtgtctagtcactataaacatgttttcttgcgattggctagcgatactccctaaaatttattacattaaattatagggtaaatactattattatattaaaaaaaagttgtcaataattaagctcagggtcctatttttactattttagaaaatacaggatccattttggcatttaacaaaatacagggtccaaccggtaacttttgcaaaacacagggtccaaaatggtatttactctaaactatatgaaactcaatacttaattagactaatagcaatattaacacataaaaaaaatactaaataacactagtacctttcaatatttctcataaataataaaaatatgggtttaagacctcattataatacttgattacttatattagtgccgttacatagtttttttttacagttgggaaaaaaatttaaatgagaaaagccaccacccttcaaatgattttgtttcttgtttaaccaacataatattatagcttatttcccattaactcttcctatataagttttgttgagtagtctaatttttcttcacaagcaaaaacactcacaaaactcttctctaatatcaaccaattcaacctaaaaagttatggagagttacaaagtgactatagctttcactattgtacttcttctaactatggccactttcgaagctgctgcggtggaagttgaaagtgtcggagcaattccaccgacaccgatgcaaagctctgcgaaagcattgggtgtttcggttgcacttgcagccatggtttcactacttgcttggttcttctaaactttaattgtttgattatttggtgcctatgttctcacttttgttgagtctcccaaaaatcttatatttgttgtcaatgtataattacttttcccattcttatcaagatcataagctaatgaaatttaaatagaagtctctatctatatataatgacaaattaacataaatctttggctcacatgacatgactaatcataagtgtaaattgatttaatagtctctaatatatttaagccaaaaataaaggatctaatagttttaatttccccaatcttttgcttcttttttgtactaatactaataactactagtcaattaatgtgacaacttaagttaattcctattaatatgattatcaatccaaaaagagcacaaaagacagtgataataaactattttcattcctatgaatccttgttgagtaattttaaatagttctcaactaacaatttatattaattagtttttttaaaagggttgatgctattttgaattttgtattttgtaaaatttatcgattaaaccttatatttcgctaatttgacaaaatacaccttgtatttttataaaattgtacaaatagaactctacaatcaatttttttttaatataacaaaattgatgacagttcctagtacgaacaaatacagaaaacatgacaatttttatcataacatctctaaattgagttattattaaattttattttaataaaaaatcaattcatggtactattttgaaaaatacagagtctaatttgtcatttaacaaaatagaaagtccaatcaataacacaggacccaaaatagtattaagtattaatccataattaaatgaacaagacaaaaatcttaaggttttctccaacttttttttagcaatttagtactaaattggctagcttttaatcaatatcgaaaagcttcccaagcttatatttttctgaaagtatgatatacatcatatgccaaaataatgctacaaagtagagaacaagcaacactaagattttcaaaatactcctctgcccaaaaccaagtttggaatttaaagaaaaaacattagattaccgctgctttatggaaccgaaaagatcctcataagaacgcttgggagcatcatcgcgtgcaacaatctccacgactttgtagtttgcttcgggatgtattaatgcctcaacagcaacttctgcaacctgatctctggatatgctgcctgaagaaagagtgtcctagcataacgacaaacaaaccgaaaaaaaaaaagaactaaatcagtacatgtgacagctacaatggtaagtttagaaatatgtttgaacttgtaattttaagtcacctctggctccatcacaacattcccacttggagggtcatttttcaacccgcccggccttatgatcgtgtagtttattccagatttcctgatgtgctgctcggcctgaagcttggctactaaggtgagtccaaagacatttagaaatatgtaagcaggattaagtatttggcccattgcagctccattgactaaaatggagctaatgagaataaatctgtttatatttcgtttacggcaagcttcaacaaggttcactgtgccaaaattatccacctatattggtaaaaacataagaagagaaagaagaaacatcatcatcatcatccaaatcctaacattctaaaacaactgaatataatataaatatgggatgagtattgaatatctgaacaccactactcgaatgataagaccttttaaaatttagaataagatgcatggggttccatctcgaataataagacctattagaatttaggacaagatgtatggagttccatctcgaatgataaggcctgttagaattcagaacgacatttaagaaatcacaggaccaaacatgacatttgaaagaatcccacaagattggcacacattggccgaaaggtcccagatggaggttaaaggggagaagcggaagcttttagtttgactcttataccatgttagaacttggtaaaatgtgattaaaatgcatggggttccatttcaaaatcaattaacaatgagaggagtagctcatgaatcttatatatggtattttattttcacacattaacaatgtgagactatctagagataagacccgagtgatttactcaaattcttgcataccccacataccccttactcacctttatatgaaaaatctaagtaatcctcaaactaccctcaatacaatgagtcacacacccttttatttactatgttccacacaccatactaatcctgggtctaacatttgattagataatgctacattgaatctataaaagagtagaatatcataaattgaagctttctcttccctcttcctcaaggtctaagaaagtgtaattcaatgatatctgaacttagaatttacttgcagaaaaagttttttaacacaaagaagagtgatcacaaggcaagataacatctttcttacaaagaccaatatctttaactgaccttccatggagcaaacaaatcccagcctggtcgaaacccggtagcacaaatgacagcatctgaatcttcatctatcacttcagcaagcttatcagaaccatctgttacatcagctttaacctaaaacaaacacagagaaacagtaattcatcatcattccaacaaagaaaaggctaattaggacttttcttcatgaactttgacatataacaaatcagactcctaacctgctaattccttttcctcaaactattaagattgttagatttaatgacttctgttcaattcagaggacaaacaatcgacatgatgaaaattcttcaattcaacaatctaatagttcaggagaatttttaacagcatgaaaagttcatggtcacgatttggtataagttaaaattcggtgaaaaaaatcccaaattagccaaaagaaaatgttaataatgtccatagatagatggcaacaatatggttatatactctttttagtgttccaccattaatgtaagactctttaagtaaaatgaaaaacaaaagactaaattgagttttctagacatatctaacacatcaaaacctcataaaatagataaaaacatacaaattgaagatctgggttatccttaaaaatggttgttttagccttatccaagtccctaaccccagctttgacagaaaagcctttagccaaaagctgttcaacaattcgtttaccagtgctaccagtagccccagctacgaaaattttcttctttctaatggtagaagaagaagaagaagaagaagaagcttcttccacggttatctcatttccttgcatctacaaaaaccagagaagacatacatagctataattagtattaaacatttgaagaagaagaaaaagatgaagttgggtttaccttaatggaagtgaagagtgtaatggaagtggttctgattgtagaagaagaagatttggttgtgagaagaagaagagggaattgaactgtgcatacagagtgagcaaaagctaaacgagtggccatttggtctctctacataacacacactaaatatatagttatatttctctctcctctcttctctcttccacgtggcagtaaaggtctagaaggcaatatttgctttttagaattgctaaaaaaaggcactagtggtactagaatcctccttgatgtcatattgttattgatgtaattaaatagcgggtcaaataaaacttaaaaaaataatttttagagaatatcgctaatcaatcagaaagtattacttacgaaaggtgttgggtaccactggtacccaatagcgattaccaaaacttggtgcaaatcttatccctactctttcagtaacttagacaatcatgaaaatcacgtgttagttataggggtcttagagcatttttaataatggtattctttaaaatgtcaaaaacctctaaattactcaaaatataatattttattttatcactcttcctcgtcatttttagccttttttgttctaaaatatttaaatggtaaacacctctaaaaatt

SEQ ID NO: 378732 - DNA, 6590 bp, Cannabis indica
gtaaaaaaaaaaaaaaaaatctaaatagtctcttaaaaataattacatcatcaattataagcccattttattaaatttaaaaatgttattcttttttacatttattttattaaaaaacacatgtaatttctttttagttccacaatttttaatatttgccacaaaattactatctttctatatatatatatcataaaaatagaaaattatgtgtctaatttcaatcctattactttgtttgtaatacctatatcaaaatattatattttagattatatcacttaataaatataaaaattatataaataaaagattaaaaaagttagataacactgcgcgaagtgcagcttagttttatagttagatttaatactctcaataagataacatgataagagtacttggaattggttgtatgatgcattattagtttttttaaaaaatagatttaaaaaaaaaattataagtttaaatataaaattattttttgaaaaaagataagccccgtatcagatcagatccgatccaaataagttgggtcggatgtgatccgatccagcaagcgggtagagtagatcatgatacggattgggccatgatccgacccatccatttacacccctacctggcctcagcccctctctttctctgtctcgtgcgattatgatgagtggcctcagcctcagagccgcaacagtgagacctcaccccaactacctcctcagacagtttcttctccattcgcaagctccatctccttttctccttatctccaacagctcacgcagccagcaccgtagcctccattggtatggtacaattataaatatgcatatatggttttaacttttaagtttaacactacatatttttgacttgtagtttcgtatgatttgaattgatcttggcttgggtactgtcctttgataaaatgaaattgtattgtacagaaggttttaactttctatatattattattatctgtttctcaaatttaatgcatattagttgtttgatttattgccttacaaagacatgaaatcgtaatgtacaggatgtttcataaaatgattcaaagaatgacgttggttgaagatatatttacatatatttgaaccccctgccctggttctagaggtaagttttcttgccttccctcacttccttttttatatttattatttcttttgtttctctgaaaaaaaattccgggtgagttttttttggaatgcatttttgtattgagattcaagatagtgtgaggtaactgtggtctattactcttgaactaatagttaatgtcccacaactgttttataaaacgatgcaaagaactgtatatacaatctgacttttgataggtagaatgtgttgtagtatgacccctttggtttaatagagtattagaaatcattttagaaggtggcatatattctaggctattaatccagaggaaaacacattttagaatgtgatgagatataacactacttcattggaataaattgtcctgactaggatcagcttatttgtataaatatatagtgatagagagaggagtatgctttttttttctattggaacgaagagctgtatttaagagtattatttagcaattaattaaggaaaccacagaaaattctgtgttggtaattcttgaaacatgttctttgactagtattaatatggaaaaaaaaaaatgcaatgtgaggtaggcattgatcaacatgatggattcgacatgattattcctttcttgtcgatgtaaaattagagatagaaagtacaaaaaaggatttttctcctacaatattttatcaaacaaacttgtattgtgtactgcagtcaaaacccagttaatacaagcatcttgtgctcttttctgtttttatcacatgtaaaatcaacaattgattattgctgattaatattctatttgtttggtttgctctttagagaggtaaaatttatttttcttcataaacatgttaagtgggctctattaattgtcttaggttacttcaagtctaatgtataaatgttctccagatttggctggctgagtatgagctatccagaggatgcagttatgtctaagtactgctgtggtgccccttctttcccttctgagcagtgaggtgtttatcacattaaaagacaaattgacgtttaccagacaaactgagttatatccttccacaatgatcaatgatacaacgtcgtttcaattttattcgatcattctctggctcttctgtaccagtgcaaggaccctctacgactccgagcacaaccaatattgtccaatgcaaccacaagattcaacaacttactcaattcggccgagttgccgaggcatgtcaagtgttcaactcaatgtgtcaacgagacccaatttcttggaactccatgatttctgggttcactcagtatgggttgttgcatgaagctcaagcattctttaatgcattccaaggcaagaatgttagaacttggaccattttgttgagtgggtatgcgaaacatgggatgttggacaaagctagaatggtgtttgaatcaatgcccgaacgtaatgttgtttcttggaatgctatgattagtgggtatatccaaaatggtcacttgaaacaagctagagagttgttcgatcaaatgcccgagagaaacattgcatcatggaattcgatgattactggatattgtcacagtggcattatgagtgtagctcgtgagctctttgaccaaatgaaggaaaggagttgtgtttcttggatggctgtcatttctgggtatgttgcgataaatgattttctcgaggcatggactgtctctctgatgatgttgaggagcggaatggtgccagaccagggtctatttgttgttgttttatcagcagccatagggttgaacaagttcagattagttgaaagtttgagaacaacgtcgacaaagatgggatatgaggggcatgtgtttgtggggacatctattttgaatgcttactcaaggaatgggagcttagatcatgccgtgaagttttttgagacaatgccggaaaggaacgactactcgtggaccacaatgattgcagtactttcacagtgtggcaggttagatgatgctatatcactatatgatagagctactgagaagggagttgctacaaggacggcaatgatgactgcctatgctcagcgtggaaagctttctaaagccagacaaatatttgatgaaattccaaatccaaatgtggtaacgtggaatgctatggttgctgcctatgctcaaaatggaatgcttgaagaagcaaaaactatgttttctagaatcccgtctccggaattcagcttcttgggcagccatgatttctgggcttgtacagagtggacaaagcacagaagctctaaagctgtttgccgagcttcatagatcaggaacttcccattaatcattcgagtttcacgagtgctctctttgcttgtgcaaatgcgggagatgaaggcattggtcaacagattcactcactcaccatcaaaacaaggtgtcattctaattccttcattggaaatgggttgatctccatgtatgcaaagtgcaaaaacatagaggacacatcacaagatttcagtataatgagagtgacagactgcgcatctagaaacccagtaattagaggtctttcagactttcatatattgcaggaagctcgaaaagtttttgataatatgcctataagggatgtggtgtcttggactgctatcatatcagcttatgaacaagctggccaagtagatactgccttaaaattgttccttgaaatgttggctattggaatgaaaccaaatgcattaacagttactagtgtccttagtgcttgtgggtgccatggagcgacaaggcttggggaacaaatccatgtcctgatacacaaacttggattgaattcatatttgtttttgtgtaatgccttgttgacaatgtacttcaagtgtgggagtttagatggtcttcgcatctttgaagagatgccagacagagacattgttacatggaatgctgttttagctggttgtgcacaaaatggattaggtaaagaagctgttaggattttcgaacaaatgcaagctaatggggtttcaccaaatgaaatcagttttttggggattttatgtgcttgcagccatgcaggattagtggaaaatggatggttgtatttcaactccatggaacaagattacgccattaccccctcagttcatcactatacctgtatggttgacctccttggcagagtaggacggcttaatgatgctgcatctcttgtcgaaaacatgcctttggaaccagattctgcaatttggaaggcacttcttggtgcttgttcgatccatcgtgacaacaaacttggccagaaagttgctgaaaagcttttgaaaatggggaagcaaagatctgggacctatgttttgttatcgaatatgtatgcgtctcaaggtatgtgggagaaagtacaagaaataagagaactgatgaaacacaggggagttaccaaagaacctgcagttagctgggttcagatcaagaataaggtgcactattttcaaataggggataagagacatgatgagattgaagagataaactcaaaactaaaggacttgtacagaaacttcaaagcaacaggttatgtgccagacacaaattttgttctacacgacgtggaggaggagcagaagcaggatgagcttcttcaccacagtgagaaattagcagttgtttatgggatcatgcgtacgcccagtgggagtccaattcagattctgaagaacctcagaatctgtggagactgtcactcttttatgaaatttgtctcccaaatcaaccagcggaagatcatcattcgagatggaaacagattccaccactttcaagatggtttctgttcttgtggggatcattggtgatcatgtttcaaccatagaaatcttatcaattttttcatgggatcactggaattcatagatataaaaatttgaaaacaacaaaaataaacagatcactaattagatgacccctatatgataatcacatacgcagtacttagctataaattaagcactacgaaatttcgatttagtttcaatcttcaataatcattcatctccaagggactgaatagaaacaaccaccaatgaaaagagagatttgaaccttcctactgttagttatcctatgattataaatgttcagtttgcttgctttcgttatcattttgtattatccttttattgtatggctttctaaatcattctatgaacacatcaaataaatcgttcatggctttgttattgttttaattttcgacaacgtaaaccacatcttaattagtatagcttgaagattgtaaattgtaatggttataatataatatggatctatatcttttataggcattatctaactatagtttgtataatataaagccgaagtatacgtgtatatgtgtaatataaaaagtatacaaaacccgacaaaaaaataccaaatgtaaaaatttcaatttgagaccactagaaaggaggagaatgatgaattttaatttggaagcaactgatgtaattattataattatactgcacattaattatattgtattttaaaatattagatatgttttgaatgtgaagtgacaattacatttacatgtgaatttttattgtacgtttgataagacagtttggcaattataatgtaaattaatattatgtaatatttaatgtaataattattatcattttgtaaaaaatatttaaaataaataaaaatctctttataaaataaactcaaattccataacaattttttaataaatatttaaaataatttttatctattaagactattcaattgttcttgtgttttataaattttgagctattctattcggtgtagagttttctggccttagaagtttaaatatttatcatttttatgttgattaataaaataaatttaagcattttatcaattaaagtttatgttaaatcatgattaaatttaccagatatctaatttaaaagagaaatcaaatattataaaatagtattatacataagacaaaaataaagtatacatatgagaaaaaaaaaagactaaaacatattatattaattaaataattaaaattattatagtacttccaaatgggccctaaatttttgtaaaaataaaatgttaaaataaaaacataatgatagccaaaaaaaaaaaaggatcattatatagccaaaaataaggataattagatagaagtaccaaactaaattaaaacccaataattttgttggtattgtgacatgtagaactatattggtgcaattccttgtattttctttggaataagaaagagaaagaaaggcataaaggcatattctttacaaaagaaacattccattccacgcaatctcaatctcaatctcatcactgctttctatttcagttttattgtagagtttttcggtcttatggggcggctttaatattacaccacctcaacaaccaatatataacggcaccaattttttttt

SEQ ID NO: 378733 - DNA, 2748 bp, Cannabis indica
gatctgatgcttgccacatgttttcacaaataagattaaaaagcaataaacacagattttttatagaggttcggcccccttatgatagtgggtaatgacctactcctctttagttgcattaataccgagggttaatactatcgaaatcactatagatgggatctgctatagcacccttaggaatacaaagtatgaatcaggaattacaaaactctagtgttgagaggatgctagtgtaggcatgtgagagaggaagtgaggaagagggaaattgtcagacttaggcttagagcttggaggtaggtttcaggcttagattcaacataggtttttaggctagtgttaaggcctttatataggaaacctaaaccctatattacagtttgacaccctagatatttgcatagtttatcagttaattacaaaagaaaaaaaaattccattgaatctagatattattcatttattttgttagactttagggcccactttgcagcccatgagttgatgtccacgtgtagaagtgtacagggaaccctatagatcacctcctggctggctaggcccttgtggagggtaggctagccagtcatggtgcagtcccaaggctgaccggtcataaagccgtttaggggtggctggccagctcttgtgaggcaagtggtctatcacttgatgcctatttgagtatcgaggtctccattttcttaggtgctcacttgaccttcctattggtgagctgtaatgccacgtggcactaattttgttcaggtaagtatgccatgttaggaggacaaaaattgggataacacttctctaggctcaaacagttgtagtactcaaccttctacttaagcacagacacaggctaatcaacaacatcaagaaactttgttaatgctatcacgtacctagattctggagccacaaaccattataccacacaagctcacaacttcgaaaactattatgactatgatgaccaagattagatgtatgttgatgatggctcaggtttgtttatcaaacatattggtcaatcctttcacctccccaaattgtcttctcagcctcctgcccttaacaatttattgcatgtacctgaaataaccaaaaacttaattaatgtctcaaaattttctcatggcaataatgtattttttgaatttcacaatggcatgtgttatgttaaggacaagttgaatcattctactttgttgatgggaaggcacgaatttgagcaacctgtgtcactccagcaactcaattctaataataatagctacattcctgcatgaaagagcacttttgttatcactcacaacaactgtaaacctacagtatctagctatgtcaaatgtaactctaatgttgaaaatgatttcactctatagcataataggttaggacatccatttgagaaaattgtatgaagagttttgcaatcttgtaatattcctttaagaaataaaatttctccattttaaatatgttatgcctgttgtctcaagaaaattcacaaatttctctttccgaaagcttttaatattgttatttcaaaaccattgcagttggtggttactgatttatggggaccttttcacacaagttatttcaatggttacaagtattacatccactttgttgatgtgttctctaggttaaattggttatatctgctgagaaccaaatgaaatgcattcaaagtttttgtaaactttaaatctaaagaaaaaattcaaactggtaaacccctaaaagctttgcaaactgattggggtgaatttagataatttttttgctacctcacagaaaatggaatacaccatagacacctatgccccactacacaccaacaaaatggtgtagttgggcgcaaacatatacacatagttgagattggtcttgctttgttagctcaagcttccctagccctcaagtttttggatgaagcttttaggactgctgtatacattcacaatcggttgcctactcaagttttaggcaaaaagtctccccttgaaactcttttcaacattaaactagactacacatcatttaaaacatttggatgcaagttctttccaaatataaggcaatacaacaaacataaacttgaatttagatatgcttcatgcacatttttcggctatagcctcaatcacaaaggctacaaatgccttgacaaaaatggctgtaatatcccgataagcctaatggtaaataattagggtttatatttatattatgaattaatcaggtaataagtgggattatgatcctactaatttatttcagcataaaatttaaattttgctataagtgagtaaataatcgtaatttgttaattacggagatttatatagcatgtgtgaatgtaatatgagctatatgtggaataaaaatattttcaggttgggcgaccctggagactcaataagtggatacataagcgtaatttgttaattacggggatttatttgaaatacgtggatataatatgagttatttgtgaaataaaaatattttcaagtttggcgaccctggagacccgattggaggccaaaaatgtcacaacagttttagttagaaatattgatgagattattgggataagttgattttagaaatatcggggtattttagagtactcgaagttgaccaaataccctagaaatagagatttcttagtggctaagaaataataagataattattaataataaatttttttattaatattattat

SEQ ID NO: 378734 - DNA, 11480 bp, Cannabis indica
atctttgtttccatttcaaatgcataaacttccatctttttgtactcctcctttgcattgaagtaaacataaataagtatagagagagagagagagagagagagagagagagagagaacatggccacaagctatataagctcacactaccaagtcaatactaacttttgtgctttgggccaggtaaattaccttgaatttttaaaagaatggaagataatcatcaaaataggttagcttcgcctttatacaaaacattaattttagcaaaaaagcggaaggggggggggggggggggaaaactattgctcaatgacaccgtagtcactagtcagttctagcataagtgttgaaaatcactttatttacctgtagtgtctgatcaaaaggcactgttagacctttcgacttttttggatcagacatctttgaattcttatctacaaatgaatcatgccttcgtccagcaagtgactcacgtttgttaatatcacgttcaagaagagagttctgaccctgcaaacgttttatttctcgttctgcaaatgcttttgcaccctaatgatgtgcagataattagttaatgttggttattaaaattgaataacataatgatgtctaaatacacaatatacctcaattttggttttctcctgcattgcgttcttaagtttgaactctgcatctttcagtttcacttttgttttttcaagatcttttctcaaagtttctttttccttggcagaggaacaagacgaaatacttgaaatttccttttcaagaatttgaatataagacatatactcttccttttctaactcttgctgttccaaaagtgtctgagaacaaagagcaaagtacgattgtaattatgttgcagataaaagaaaatacagtttacatgcatttatattgtatgtttatctataatacttggtacatgtgtattacttactctcaaagactgctctgagttatgagcctctagtttaatttcttcaatctggttctggagatcaacaaattgatcatgcaaatgaccctgcaacccaaaatatacacacaggattcttttcaatatgataaaatagtgatcttaaaaaattttaaactcgtaaatcacatcgtacatcatcataccttctcattctcaagtttataaactttctgcatcaagcaagaattcaaattctcatggttacttataattgatctttcttgaagagaactctggctaatcaaagtcttgaaatcctgtgtttacagtagatagtgtttaaccttttaggcaatgagagaatcaacaaagatatgaacttcaaaatattgaataaaagaaagacgagttaacaacataaggcactctaaaaatagctataaggaaaagccttatcatatgttccaagaatactcacaaggaacatattaatcacagcagcaaaagtctcagagacatcatccacaaatgaagagataccatcagtaaccatttttgagtcctgaacttctgaaattatatcttggacttcagttaaaagcttttccataaaagcagaatattcctcctggaagaagctttcatatgttagttgaagaggcttacaaattaacaattaaatcccatctgaacacacaaaatctgcagagaaatgtacatcgaaaccaaaaataatgattacagctaaggaaataaaagtagacagataaataatcttgtttcttacagattcattagtagtaagttgttcatgagcgacccgaacctcctcccgtgcattcgaaagcttttcatagagctgaaatagataatgtattcagactacgcacaagtatggaagaaagcttaaccattgtataagatagtgaagtatatagggaatattgtttgttggtcttctgatcaaaaattatagtcagactatcttcacacaataaaatctcaaacacatatcaacgatttgatcattaacaatatgtagaaaactatgaagttattttttgtctttagctgaacagatttctattcttcactattgtttttccgttttcatatatttagtggaattcctagggtttctatcttttcatcttcttgtggattggtgtgccagccacctactgtgtatatatatatatattaggttgacacacccatggatccccacaaaaggctaaacaaaactgaagaacgtattccagttgacaaggaaagatattagatttttgggcaaattaatccaccttccacactggtaagactcaaaatgtcagccaataacgctcacaccaacaccagaaaacgctctttaatttctcaagaatacaaagaatcacagctaatttgagatagctaatctcccatgagtctaaaaccccttattacaaccgtcatccacttatttatactactcactaactactgctcaaaacagaacataacaatccactaatacaaactcagctaagtaaaaaaacttagcttagttattctttatattgcgtctcacataagttaaccctatgtgaggtctatcaatactcttctcccaattttaaaccttgtcctcaaggttgaaatctaaaaactgatgctttatggtctcaaaagactcccatgtgggttcaaaatattgtaacccttgccacttgattaggacttcaacttcccaggctgagatgttgcttttgccggctgatcgtaccccaagaagcttctcaggctgaactactagctccaattccatagacggttgcggaggtaatggtggcaccagtacgtcagcccacacggctttctttagctgagaacatgaaaaaaaagatgtatgtgagctgtttccggtagttccagcttataggttacttctcaactggttatagtcgaaccagttttcctctacaactctcgtcgttcaaagtactggtaggagcggccaccttcgtcagcagatcagtcgtagcgccagtgagcgcggttggaagagttgccaggtgcatcgttgacgatagcagcaggtagttctcaaccgtgcctgtcgtcgttcacggttctttcttctccaacagcaacgctaacgtttatttcttctccaacgcctccccttcacagttgatggcaagctcctcaagggtagtgacttcacattcaaacttgaacgtcgtaatgattcttctacggtctacacagcctcagtcgagaatcaagattggttaactccaccattaatgagttttcttgccatcttcatttgctcttccaccatcagcaccttggcaatgacatccaagagtgttttcagtctatattcgcgcaccttaattacaatctcagcatgcaaatcaccaaagaataaatcttgaagaaaagttgctgaaatctcaggaaattgattcgtcggtctcgaactgagtatgaaatatgtcactgatctttcgtatcgaagcaccatcaacttatcgtatggataatcttcgattgaactacaacaattgaacatcgtgattcgaaactccaatcaatttctaattggatctcgttcctctgccgcttgaaaccacccagcaacacccactaaacatccttgagcagctgataccttctttctttttggggtccaatgaacctagaaatactcttctatgcgaagaacccaaccatacaggtcctctccattgaagaatggcaacaccaatgccatgacagagtccacaagatcgtactctaataccacttgagaggaatttcctatcaaattggctagaatagcaggaacatagaacaaaaaagtaatagagttatactgataatgatatctgggtattcgagaggcctagtgctctctcaaagccaagagctactgctctgttacaatttcattctccacttttccctttcctatttactcacccattgctaacctaggaaatccccaattgagcttgggaacaagaaaaactatttgaaggaaaaccagccaacaaaggacgatacctgcaattagtagggaaggttatctatctctcacacactaaaccaaacattgccctgtgagtctagtgagccaatatatgcatgatccttgtcaaggtcatctcaatgttgtttacagaatcttgagatatctgaagcaaactcaataaaaaagtctatttttcaagaaaaacaatgatgaacgaaaagtaaaagtatttacaaacgctaactgggctggatcaataaatgcagaaaatctacatctggttgttgtaccctactttaaggtaatttggtaacatggtagagtatgaaacaaacatttgttgcaaggagcaaagctaaatacaaagctatggcccatggagtatgtgaagctatttggataaaacaagtactggaagaattaagagttctgcgtcaacaagtacactatcagcatagcacataaccccatacatcatgacaaaactaagcatgtagaagtggatcgccactttataaaagaaaggattgatagaagagttatcaacatcaaatatgcgctactaatcaacaactccctgatatactgacaaaatgattgtttgaacgagtatttaattttcttatgaacaagcttggactcatcaacatctacaatcaagcttgagggagagtgttgacaaataggaaatcaaaccacgtgatttgataaaagttgtgaaataaatcacacgatttggtcacagttactcttctgtatttaattccttcaaaattagaagaatttattttctaccttttatgtagaatattatgtacagtcccaatataatgtattgtttactattcagaaattttctccagtcatttctttaattacctcatcaaacttctcgcgagcacaaatgttctgctctgttgcaagctccacaatgcttgccaggtttacctggcttgaattcttctccatttccaacttgttaatctgaaagatgacagacagacatagatggaaaatgtatataaaaaggacaagcaaaaagtttcaaacagatttagttttttcatattggtaaaatcccaacccccgacaaaaaaaaaaaagaaaagaaaaagaacgattgttatcaaaagaacagttactgaaataaaaaaaaaatgagggagagactgaaaagagaaataataaaaagatgaaaaaagagacaaaaaccttttcttgaagccttttaatcacaagaatagtctctgactcatttgaatccaaattcctatccccagtaattgtaccttcagtagcattattggttatacagtccttaacaccagaaactatatcaacctcagcaagctttcttgtcaagaaatcaatttgaatctcactttcagttctctgcataaaaaatacataaataagcataagaaccaagattaaaatttgcatacaacacgggaacaagaagagataacaacctgactttcaaatttaataaacagatcttcatattctgcttggacatctgctacttcattgtcctgccaagaatgagatacaaagatgggtgtaaaagagaaaaaggaaatcttacaaaccacacatacacaagaggaaatgtcagcgctataaacacaaaactgtaagaaaaggcaaatgttacctaccacgtgttggtctttctttctgacgggcacttttctcctgtttgttatatgcaataaaacacaaggatcaggaagcttatactcctcagatgcattacttttactatcttcatcttgtgtggaggaatcatcctcagggatgctgtccataagtgcctcaaacggaagaagtggtccagtatcacgcttctttttcatgggttttatatcagaagcctctgattgcatggtagaatacacctgaattcaaaatacatgtattaagaaccttacttttatggccttaaagattatactacacaggagacaatttgtattcctatttaatatccttctgtttttccctattacttgtttaagaagtattgaaagcttcaattgaacttttagcaattagttgaaatttttattcatatatgtagaaaatttttggtgctcaagctatgaaaatttgctggctttactcccgaataacacattcatgacctcgagagaagtaggccagatctaatcatgttaaacacaccaaagataaacttcatattgttattagtcagcaatattatacattaaaaaaggaaaacttgatttagcaattaatttaatcttcttccagaattccacatatttcgatagagcagaacatatgagctctcatcaaataaaacctaatgtacttaattcatgtcagattgctaaccaaatcaactaggtgatacatgtgtacatagaaaacatacattcatacgaaaaagaaaaataataatagaaacaacaacatttgataacaaatacttgaacaccatctcaaaaagctcaaggcagcaaaaaccacatttaactcactctgaatctgatctccctaatctgaaaagatagcttgataattacacttgttctctgaccagcaatggtatagattattaaaaacaaaatctttggatagtttataacccatagacagagacaattctattatgaaattatcaaggaaatataatctgcagaattacaaatgaccagcgatatataactttcgcacatgctagaaaaagaagaaaatattacctcttcaagagtctcccgagagaggttacccgcacaccaagtatctcgcctcttctcctagaggcagcaaaccagaaaagttttaacaaaaattacaatgaaagtgtaagaaagtgtaagaaagtgaaaatactgtctgtggaatttccaaactgactcgaatagcttaggttttactatacttatcattcttgttgaagattaataaagattcaaccacattattcacactaatttcagacctagaacctatcaagttggtaagaagaaaaattcagattcagtccctttagtgaagcttacttataaaaattaaaaaacacaactctgtctagtatataagcaaacaaaagttctgtggtagagagtaaattatgaacacccttgagcagacactacataagcttggttgattcacaatgccctagttcatgcagataaaaagtgcagatgcaatcgtgactactactttgagaactgagcgtttatctagaccaacaaaactctatataagctaatagcagtacttttaacaggccagagaactatcataatttggaagtcatgtaaacaagccagaatcaagtctgataaaaagaaaagcacatcacaggaacaattctatgtcttgggtgtattatttctgttcaagaataatattcatacaactaaatcccaagtaaaagagaaataatgttaactattttatagtcttcatttttaataacaatttttagcataaaagacgtgaaactatgcttatcaatactaacctttctaaaacgatctcgactttcatccctatttgaacacaaaaccattgagctcaagttctcaattttcttttcttgttcttgaaccttcttctcatattcggcttgggcttttctttcctcttccaactccaaagctatgcgttccctatccagctcagtctgcaagacaagtggagcatgttcaagaatatgatccacccttcataactgaaataacttaggaacatacatttcaaacctttaataatttattccgcagattgaggatctgttcttcaaaatgttctgaatgaggaccctgaagaatggataaaagttaaaagaacactacttcaaatggatcattataaattgaatattatttgtaacagataattacattaataaaaattgtagaacaacctgtaatttggctcgaagctcctcaatttccttcttttgacgctttaacaaagcagcatctgttaaaatctaccataaacaaaataaattagttaaaattaatgtaagaaagcacagatatataaaaaaaatgaaataaaaataaaagacctaaaacatcgaatttactataaaaaagaaaaataattgaagaaaacctcattgacatgagcacaatttttaacacgcaaagccctgcttgcaaattgtagactgcttttagtctcgtctgcgtgaacctgccattaaagatgtacaacattaactttaacccaactaaaaacaagacaacaattaacaagaccatccatagcaagtgctgatcaaaatagtcttggtgacaccacaaattgagaaaactaacacaatatgctttgtgcccagcttattttctctatctgtccatgaggactgtatcaataatttgaactctattacttgcatttactcaacatctttatgaaatataaatatatatatatatctgcaaaaatagtaccatttaaccctacatacttgccactgaagaaaatacagaataataataagaggaaataaaacctcaggaacaaaataaatatcagttgaacattgcaaaaacagtgaacaaaaatacctgtgcaagtgtaatgttgcatattatagctgtgtttgcatttccaccgagagcaggttgtaaaatgcgcgttagtttactatctctatatggaacatgacccctgcattatatatcaaccacggtcagttgtcttatattataagaccaacttctatgtattttaacaccgacattaacaagtacagacagagcctacccttgactctctacaccttcactcagtttcttaataaccgttcccagtgtcatcaagcttttgtttatgtgggatccctctttaagtctaacaccttctgccccggtttttgcagcacgttctgatccagcaaggtcaactaaattctagaagcaagaaagggcatccaatgtaaacatcacaaaatgaaaagggacatgttcttcttcattaaaattacaaaaaagaacacagacataaaatataagcacaaaagtcaggaaaataactaaagtctcattttctcaagagcatcgccataccaatactgaaacacgaacagcatcacaattaccgatgtcttggtcttcagttttatctcgactctcaattatctgttgattacaacatcataaggtgagtgaatgaaacatacacaatattcctgattttaataaatgaggacaaataaaaataatcagattttagatctgcaatattttaaaaacagtaaagtggaccaatgagcatgcatttttttattttgaaactaggctcactgcctaaccctacaatattagggaaccaggaagcatacataatataatattccaattttttgttaaatttgggcggatagagacacataatgacattaccatgcggaaaatagtgtgggatctgctactgtggacgttcatattagtctctccaatatgccgatgagctgaaattttgaagcgcaaaataatcaaactaatcaacagcattaaagacattaaatctaacagaggttgatatctagataaccagggtattttgctttaaaagaagaattgtaaacatgtggttacacattgtaaaagataaacatattataaatatgtaaacaatttaagtagccaggtattcaagagaagctaaacatgactggacaaagctcaggaacagactgactttagatgttagctgtctaaaacaaactaggatcctgtaatattttgatgctccggttgcattctactggagaaatgtataaagcaatataagccaaagcatacatttagacaagttaataagcactcttagttctccaataacgctcagaaagagaacgtataattcaattgagaaagtaaaacaggaaattacattctccaaactccataaaactgaggacttgttcaggtgatgcaacaatttcttctcgcaacccagccacatatattccccgctgcaaaaatgaagagagaaaatcaccatttgagtgctgaaataacatcatatggtcacatattcacatcatacaaattcagtacctctagattttcatgaatctgtaatttccgatgctcaggagccaacaagtcgttaatctcctcgttatagatctccatgtaggacatacgcagaagaaattctcgatttacatcctaaaaagcacaacaaatatctatttaacatagaaacaaatcctagcaaatctttctgacagcaattttaacattacttgtctgttagcattatacttgtactataataaagaacgaacatacttccataaggtgccaatttttaagaatatgactacaacatcataacaaatcaattacccgatgaattgtattgaacaaatccctcacggcgagaggaatcacacctggctccatagccgagcctcgcatggtaaaagttttcccactgttagtctgcccataagcaaatacagttcctacaaatgtgccaaatgaacctaaagttagtcttcttaaaagtaaaaaatgaaaattacagattaatacaaaacacccaaaaaaaaagtgcaattttatgcttcgaatacgtaccattgaaacccccaacggcagcggaaacgatttctttagttcgggcttcataaacatccagagtcttacagtcttcggagaaaattcgatctaataatccccaacaaaaagaaaaattacaaactcctcacaatcagacataaaataaagagagggttaatgagtttaattaccgaattcaaacttggaggagtgattaggaatgaaaatggcgttggaagaaatacgccatggactggacttagcatcctcaaccgaaagaggtcgagcacgaacggccacgtgtattctctccattgagttagttgatgcgccgccggaaaatatcgctgaaaagaggtttcaggcaaaggtacagtccacgacgaacagtccttctattggtccaattcgacgaatctaaaagatgaggttcttgaaatcggcggcggaacaactgagtagaaacggcagagacggaggtgacgaggaagaagatagaggagccgaacgcagagaatcaatctggggacctcaaatgaatctcagtcggctaatcttctcgagatcctactctttggagaaaaggagggaaaagctttttttatgtatttgtatttaaaaaagcgtgcggaaaaattttgtaggtatttttttaaaaaaaattaccttacataatttcttattatgaatgagtacatgattaatttagttggagaattttatttcactccaaaaaatttgggtgccgtttggtaacacttttgttttttaattttttaatcacaaaatgaaagtaaaatttttgtttttaaaaaatttatttttgaaaaacaaaaatgcgttttgtaaccacttttgttttttaattttaaaaacagaaaacaaaagtgtgttctataaactttatttttatttttatttttcgattttatttaagtcgggtctaggtccgg

SEQ ID NO: 378735 - DNA, 2753 bp, Cannabis indica
aaaattttcaaaggccacatttatctaatagtggatctttactttagggatcaatattatactcatttgtacatgtgatttgttttgccaagagacagcattatatttgatttattttttttaactttaaacttcattcaactaaatcaattcggcctcaataatattagtaaagtatgtaaataagttgctttagtcataaaatgaacagcttaattaacaaaccgtttgacaaaacgtaaagtttatagcccacctaattcagggacctaaaaaaaacattttccatttaaaaatatatatattttaataattttcaaaaatactatatatatttcaaataaaaagtacataactttttctttcctaaagctcactcaatctcaaagagacaagaggtcatgcttgggtgagcaagaggaggatgaccctggagtgtatgtccccaatgttcattgtataatcgtttaacaatggagtagaaaatagacaaagaaaaaaggttacttttcttatttttttaggttacgagctgttgttacttgttacctaaaaatctacaaagaaaaggacaacatgccaattcttaattaagttaccaaaatttcaatccacaccactctccataaaccaattttcatatatgaatataataacacgagatcataaaatgccactagtagtgtgtaacaaacaagacagcttattaaaacaacatttaatatgaaattacaaagataattaatgatacctctttattatctacacacaaaaactgtcatcttaacgtgccacgtcactacttatggccgaagaagaattgctggccccccacgtggatggacaaaatgtgaccacgtaatccttggcagtacagctggccaagggaggtggcgaatcgtaagcgtaactatagtaagaaggacatgcctccttaaaaatcttcgaatacacattgggcttacatttatttgggcttccgtactcttttcgacaacaaaacgaatccaaatcaaacctcaaacaaccactcttacatgccacaacttctccgacgtcgtttaacaccttcaactcatctggacacaagctattcagattctccacacacccaccaattgtgcattttgccgaaatgggccgggccgaaaccgacacgggaagattgtacccgtccactaagctcacgtcgtagtaattgggctttgtttggtctgattggaccgaaatttggaccaacgtcactggtggagtacctataagcccattacactcgagtcttccatcgcagtctcctgtttcacaagctgggctccagttagtggcgaagttgcaacctgttcgggcccataatcgaccggtccatttccatggggcaatgactcgatgggcctggcccgatgggaggtagaagccaccgtttgctaggactggaaacccattgttgggtgctattgctggccatatgggaaatgagcatttgttgtggacgtaaaacgacaccgtatgagcttttgtatttcctgcgttaattaataattcatttgtataagtttgtatatacgtaattgtaatttaatgttaaggaagaaaaaatggaagaaatactataccaaataggaggaattgagatccgaagcataggagaaaagcaacaaagaaatttggtaacttcatttgtatgaattagattaatttactttttgtgggaaatgataacatgtgaaaatatatattaatgtggttgtgagtttattctttgattgtacttgaagtttggatttaaatgatctttggagacaagaaaacaaacgtgggtacgccttgcttatattttataaatatatgtgactattttaataagcaaaaattactaatggatatgagtaatgagagaattgtaaactttcacattacttcatcattggaggaaaatgaccattacaagttattaagacatgaatgaatagatataagttggcctatcactaactatacatgtgtgtcatagtgttgattttgtataactacatagaatttcattacaaaatgttttctattttggttgaaacatattcattttatatatttggtttgaaacaaccaagtcttcttcttttatttatttatttattaaaaaaataaatagttattactgttccattattgaatgtaaatttcaatcatattatcaattattgtgtggataatttttcttcaaataaattaaaaccctactcccatttgaaatattggtcctcccttaggataggaatgcattaattgtagtaaatagttttcttttctcattcaaatcttagtagtaatgtaactaccaatgcttaaatcttcggattcccattatgcctagtctagttttattttcttgtgcaattatttaagcacaatagggtttatttatttaattaagttttcttctttgtaataaagtcattgctgtaaataaatgagaatttataacttgttgtagcattatagcataggcaaggcaactggtcaaagttcaacatttccatttatcagccaggttgtgacaaaatgtcagaaataaaataatagccataagttaagagtagtggactttcaaatttaagttatttttattattttttatatggctcacattttaggtgctgcgaatatccaatagtgtagaaaaaatataccaccaaattaaacattattgtccataattttaccacaaataataatagtaaatgaaaaaaaaaaaa

SEQ ID NO: 378736 - DNA, 4159 bp, Cannabis indica
aaaaaagaaaaaaaaaaagagtaaagagagagtatattctctagtaaatagaatattcactttattattaaattagtttattgaatcttaacaattatattatttttgtattctactaattatttattataaattaattaacggtaatactttaaataactataactaaaaaaatatatctcactaaattgaaatagtatgtttctattatgaaataaactttatattattacaagagaattacatgtagcttaaaaaaaaatacatgaaataaaatgaaagcaaattactatacacaagtttgattatagtatatacaaaatttcacaaaatatatattaatattgcctaaaattttttattatattttcttatgtaaaattataataaaatttaaattcatgttaatatttgttttaagaagaaagtaattatgaagagaaattgataataatctatgttgaccacaccatctaaaggtggagtctttccaatataaaatgatcaatcaagtacaatcaaagtatgaaatggtgagcacatggggtgagagttcttctcatatattagttgttgttgtgttgtttttgttgttgttcaaataaaaaaaattaattataataataaaaaataatattcatttcatttcatctctatttgacttttgaggctaaaaactcaaaagtgtttaatccttattctctcatagaaaacctcttatggtaaggctagaatgaaggaggaggaggaagaggctacccctacactactacaatctaatcctcaaatcacaacacaacaatgcaaaagaaaagaaaacaaaacaaaaaagattcattttttcatataatggaatggacactcttctctctctccacgaataagaatttgaaaaacattattataattaaaaaagaaagtaaattttagaaatttatatatattaaaaaaaaaaaaggcaaagccaaaaggaaaggtggagagtccacaataattggcatcaaatgcttatggggattcgcactgttgctgaattccaagatctgcaataatcatcaattattctttttattgaaaaaaaacataacatttataatttaaataaaaaataaataaaaattgaagcttttttttttttggttttctcagcttccccattggaggagctcaactaagctctttaagctatctgtttgtctttctttgggggagagaggcggaaagtgatagtgattaacaaaaacaatcgtaccatagtccattaaaacatatatatttgagcttgacatcttctcccaacacagaaaaacaaaacaaaaaaatcaattttttttttgagaataaagatatacaaaaacttggcagccaattagggcttcgtcggaaagttggttgcaccaagggaaaagagaaaagaaagttaagggtttgttttagctttatctctatcactcttccactaccactggtacctgtttttggtgcgtgtaaggtttgtttttgtttttctcagccatttttggagtttcttcggttttctatggaggtggttcggacacggatgaaatggggttttgaatttttcgggtttaatctctgaaaagttgggttcttttgaggtttttggtagtttttggcggtgggttgtgcttattttgtattgggtgttttttaaattttcttttgggtttgattctttggagctttgaaattcaggggaattaagaaggaaagggatgttttatcaggtggtggtagttgtgctgaaattttaaatttttgttatggtggtgtggggtttaactattgttgaaccatggaatctttggttcttttgcgctaaagcttgaaggttttggttttggagctgataagagttcttgattggttgagggttttgaaggttgtgtgagtttgggaaagttttggtaccacttttttcagaggtttcttttcaaacttttggataggagggagagctgggattaagctgatttggataacttattcatttctttgaagggagttgagaattgcttaatggtgggggttatggtttattagagattctggggagaaattttgttttgggaaagaaaatggcaactgagtcaaacgcagggtatcactgtgaggaaacattcagttctgctttgaatcgacacgcaatctcttttcagtctggggccattaacagcacctgtgagatgcttcccatggggaatttttatgctgtgaatagcagtgcagcagcaacaccagcaggcatggtgttctctgggagtagttctagcatcattagtaacaatcctgtgattagtcaagctggcagttcttctagtggctctcttcttcttgattcagtgccggggctcaagcatgacgcggggttggctgttgaatggtctgtggaggagcagtgcaagttggagagaggccttgtcgagtaggtcattcagaacacgttcttttgaattggatatgtatagatttacttgggtatacttaggattttgatgcttatgagttactagttgtggttatgtgaattaagcagaatgtttattgatcttatagaggctttttgctagtgtgtctgtttgtgttagtcttgcacatatggcgatttcaaggattttaaaggagcttttggaattaataatttcgcgtactctttgttcttgatatactaatatgcaaattcattcttgttaggcttcaatgcattatgattttgctgtagtttttgttttagttgcagctctacttatttaccaaatcttgttagttgctcattgatgttttagcaagttcatttaagttatttcttgttccaaagttaaatatttatattctttttctattttttatttgtagatatgctagtgaaccgagcataatgaagtacatcaagattgctgccattttgcgagataaaactgttcgtgatgttgctttgaggtgtaggtggatgatggtaaggtttcaatttcaactccttcagtcatgcattctgagttactttaactgattcagacattttaaaccgtaatttgatgctgaattttgtgtggccttttcgaaatgctaaaatgcagttatcttagtgtagtatgtttaggtgaggtctgtagaatattgattttcaaatagtgattaatattaacatgcaaactgactagtttgctgttgctatgttaaaatcgcgcagaagtgcttgctcgttacgtctattaccaataaagattagagaaaatgctttatttgttatcacagtgtgtgctgtagcaatgattactaatccatatattttggcgatatcatctagttttgtatttatagatgtgtaacagttatttatgacaatgcttatgaacatgatgcatgttagaccatacaaagtaacaaagttattatggtttttgagtttggtgtaatttatgtaaaaatttcagaggaagcggaggaaaccggatgaccttattttggggaagaaattgaataatagaaaggtatgtttttgtaacttgtaaatgaaagtgcacattaattgtttcatgttatgatctattcaacattaagtctttcctttttgttgtagatcatgttttgttcgtcattgctaccttttacgacagcttatactcttaccttctgtagatatactttaattaatgccaaaacgtttttctctccatcttataaaaaaggaaaaggtaccttgataactgtcttaagcagccattgttggggcattctgaatatgcttctgtttttgtgttatgcagttttgggtaacaaaccatctgttctaaatatatttgcatatcgctttattgcctcagcgaattgtcttgtgtgtctatcttaattggtttggctgtatctgtaagtaatagtttggcaagatgcaatattaaactttcagccatagtaattttgtgatgctcggtaagtacttcaagctcaccaatttggatgtagattgaagcaatatgttctaatttgatggtttagaattttagagggtacatatgagctctatatcataataacatttaggatatttatgccatgtctgtcgaaaagtgttcaaccaaaagtacattgtaaagaaaagaataggcaaacatttaattccaaaagcagatttttatgt

SEQ ID NO: 378737 - DNA, 1418 bp, Cannabis indica
ggtgaatttttataaaaaatactatgtaagttttatactgtttattgtgttaagtttttactgttgttttacagttaatttttaattgttccactgttatttaaatttttctgttttgttattttacggttgttttataaaaatacagtatttttgtaaaaaatttctgtataacaaaaaaattataaatttttacctaaaattcagtatttttataaaaactctatttagaaaaaagatagtatttttaaactaagtaaaaaaaaatatataattataaaagaggaaaacttatttttgagcctttaaactaagtaggctctaaatacaggtctagtctgcctatacacaagaccgagcctatataaattttaattaatttacatttgctataatcaattcatttgtatctacacctttcaaacaaaaaaatataaataaattagagatttcacttttcaacatattttataattttatggattagtgtgttatgaattacttagggctggtgttgagatttattgtgccttagctaacaataaaattaataggccattttcaaatgataatgtagtatttttgaaaatattgtatttttaaaataatttttttgttttgtgcttctgagctgggtgggccctaaacgtaaaccaaactcgccttaacctaaactcgaccctcatcgtactttactacaaacgtttttctaatatgatgggtgatgacaaatagtgtaaaagtttatctctcaataatgtcaatcgaaattattatatataaatatgtgttgttgaatggggtagggttttttcaatttctgtgctcctatgcttgggctgagtgagccttaaccgtaggccaagctcgacttagcccagacccaaccctcatcatacattactacaattgtttttctaaaatgatgggtgatgacaagtagggtaaaagtttgtctctcaattatgtcaattgaaattaatatatgtaaatatgtgttgttgaatggggtagggtttttttttcagcttatgttgcaggagaaaaggaaggagtaatagttgaaagtccatgtgagatgggtgagagtcttaatggtgcaattggtttagatatcaataatgagctaaatcttctccaacaaaaactcaaacaacttcaacctaataattcggatcttacaaactcccaaattactcttgctatgaaagattttggtctccaaaggtacctatatactataatatataattaataatctcaattgtcaacaaatttgattgaaaaacatatttttttaataaaacattatagctactatatatatgtttatttgatttgatacattgttttgatttatatatttacgagcaatttgcggcgaaacccctttatgttttgatttttatacacttaac

SEQ ID NO: 378738 - DNA, 3859 bp, Cannabis indica
ccaaagcatcgcactggtgaataaaccttcttcatcactgaaatggaaggaataagtcaacatcgacaagctctaagggaaaggtatagaaaagtaggaggaatatgacttgttgagcttggaaactggtgaatatgatagtaggcaagaagggatatgaggaatcccattaagacatagaattcaaaaaaaaaaaaattagtatatgttgtcacgagatgactacaattaagtcatactagaaaatagatagttagcacatgaacaataataggctttcacatagagaaaaccagcaagggaaaagttgttcccatgaaaataagacagatattctattcgaatataaggtattttgtggggaatgaaaaagaaaaaagagagaaagggtgaatgaaggtgattaaggaaaatggagatcaaacaaacagttgtctaattttctaagattaatacttccatacctaaatttatgagaggagacctagtagggatcaaaattttaatatgccataaccgttctcaagttttctctgctggtgtaagatgtcccatctgttctgtgagattatttacattcctcatgctccaccaaaacttgccccgatcaccaggattgttctcattccttctctcatcagaatccttcctttctgactgaacttcctgagtgtctgaagaaccaggattctcagtcaagaactgttcccagaatacatcgttggccccagtccgcacagtagcagtagtggtagccgcattctctggttcctttacagattgttcttttgcgacaaaaggctctgaagtaacaattggagcaggatcagagttcacatcaatcccaggggacttcgatctgatgtcaatattaagctgtacacaggaaatagatggactttcggcacaaccagtagattcatccaactcaatgtttgaactactttgcaaatgaacattcgaaaaatcatgaacaatatcttcccagaataacagggatgcctccaactgctctaccttgtccacaattaagttcaaaactgaattaccaacattatctatacgtaacaattcaggactccccgttgagttatcttttgtgccaattttcggtaatcttctctttctcacattggcctccaattgtgaaaaattgacggcaaaccctcgtttctgtaaaacctgagataacagagaaacaatgccttgttgttgctgttcgcttttgtgaaactgttcttttaaaccgcacttttgtatttccaatgcccgccgctcattctcatacctctgagactccacggcaagctcctgtaagtcatgttgaagcctctcaatctcatctttaagactctgtctttcagattcagccaattgtggagttccctgaccttgaagattctgcaaagaatggctgtgaactggcttccttctgtggatatttttaagaagttgtggctgacctcttaagaaatcatcatttgagaattcccattgctctggatcaacttttctaaaaccctgttggtggtactaagatttcagaacattttaatctaataacaagaaagcaaaataaacatttcaactaacatgtacgagcaaacacatgtgcaaagaaacaacttgactcacatatgtgttcagctgtctgatgaagcttgaaaagttactgtgcttaaagaatctaggcagcaaatctcttgcaaactccagcggattccacacaatgaagctcttattagaagaactccatgacacgactgtatctgttgaagggtcttctaccatttcataggtttttgcaaggaaaggaggcagtgaattcgagccgccctgagattcatccatcccaattcacaaataatagcgtcttctcttctttaattttcttaataccactgacctaaaattacaaattctaaaacccagaactgaaacatacataaatcacttattagtagaaccgtataaagcatgaaaatcccggtacaagccaaaattactcaaatcagtttctataaagagacccaaatgagaaaacatatccaaaacctatgaatattcaaacaaagaagaaccatcaaattcaaccagtccaaaccgattataaccctgtagtagtttccagaaatcccaattgaaaaacaactcgaaaaagcactaccaccacaagagtatagaaattaaacctaagaaagaaaggggaaaatcaatcccttctggatatgaaaaatttcaatctcgggtaatcgagggcgatatccaaatacggtcaaacctgcatatttgaaaaatcgataaatcactgagaaaataaaaggtaaaagtaattgccatccacaaatgaactaaccggagattccgaaaattccaaaacaaaatcggaaacaccatgtatacctctgtgtattgaccagataataaaaattaaaaaacctcgagaacctttctgataagtcgataactcgttggccgaaacaatagcattaaaaccaaattccacggtttgaagatcattttaaattattttcaataatgagagaaacttggagctaaagtaattatataaatataaattgcaagggaaaaaaataaataaaaaagagttgctttcagacaacttttaagcttacctgaaaagaatatcacagagaacaaagaagggtctctctagagagagaaagagaggaacgagagatagaggtagtttcagggaaggacgtgtcttaaagcatcgaagaagattctagctcaatagtgagtttcaggatttgttgggatcctcattctcgaaacgcgtacagattttctccacttcaaacagtttttaagccctctatctaaatttattttccaattacttatgtgaattcaaagaaattgaaaacgcttattcctcttttcggtaaaaagcctagttatcaattgacaatgggagacaggaagtatctggtggctttaataccattgaataagatgaatgagattgcttcttaaaattaattgacaatgggaggaatactcccttcatcttatatatcacaatttatttccacacgttagcaatgtgaactacctttaatactcactaacaattctcagtcaagtaaaaatgagaataataaataataaataatatataataatttaagcaaataaaaacacgattcgaccctttttacttatattattttaaagaattaataagatcataaggatttgggcaagtgagttttgttatcctgatttttggcactgacgtggcatgtctacatggccaatatcagtgccacgtgacattacaactcgccaacaaaaagaccaagtcatctactcaacacttcaaccaacgaggagaccgagcattcaagtgagacgataaatgacaaaccagccacctcaaggaggctggccgaccctatgtgttgggttttgtgttataaataaaattctatttcaatgtaatctttttcaattatcaataaagaaacagaaatattttcattacttatttagtatatcatttggttcatgtgatcatttatatgtgttgttccaaattttgcactctgacgtggcatcacgagaatggtgacacgtggagtccgcttggagcatctgctcgggaagaatagaccgagcaggatgtctcgctggcacatccaggatcagatatccagcaatccgtacagagcactcagtacttagcgaattcagctttcgcatcatgagtcatcagctcaatccctataactcagggatcaacttacgtggatacgacatacacatgatcccgctatcagtgtactcagcctcaatcccacgatccttgcattcagcattgatcacacgatct

SEQ ID NO: 378739 - DNA, 6723 bp, Cannabis indica
atatacatatgatatgatgtctttaatgttaaaaatgactaatttttttcacatgtataaataccatcttaaaaatacaccaccatatattaaaaatattcaaatggccatattgataatactcaatattatcttacccaacacataaatataatatttggtaagaagattggtttgtcatttctcaagagtcgaaagtaatatgtatctcaaagtttaatttattaatgtatttatttatttatttttaagagaaatttttattaatttatatgagaggatatctcaaagtacatttttgagagatctctcaaatatttgatccacattcccataatatattgtgtttgctgtcattttagccttggcacacctcaattgacccttcccaatacattttaattaattaacaatatatataccaccaaactttaatttataacaaactcaaaaaaaaactgaatatatataattgatcatgtggatgtgtgcattttattacaatttaaataaagctaaacaaatatatatatatatatattttgtttctcaaattaatacatatatatttcaatttgcaaaggtatcttccacgtcttgatctgatcccataatatatcatctactactactataaatacaaccccatatctctttcatattgttcatcatcactactactactacattaatccctatatatatataaattattaattaatttaagagagctaaatatgttgttagggaaaggaataggggttgtggactcattcacaggtggtctgattggtggtaataataaaggaaaaaagataaaagggtcagtggttttggtgaagaagaatgtgttggagtttaacccattggcatcttctgttaacacaggcactgccatttttgatcgttttggtgaatttttgggcagtggtgtttctctccagctcgttagtggtcacacttgtatgtacaataatacatatacatttacattctatatatgtatatatagattagttatggtgttaaaaataatattttaacagtcagttaattacatatatttatgcaagtcaattaactatttagaatactatttttgaggtagtaaacaatatcaaatttaaaaaaaaatagtaggatatatgatataattataatatatataattatatatataaaaaaattagattacaaaatttattcatatatatcaaaaatatggtatgttgttattgatttattttagtattagtttttatatttaaatttaataaataatagaaaaagttgtaaatataaggtgacaactaccaaatagcttctatgtatgaatgagtattgttataggatatttaaagtgtctaatttataattagagatattttataaaatttattaaactaaaaacaagtgagatccgatgataatgagttatactaataacattttataagggtgctaggcattatgactaccttttattattaagtattagtgaatagggatgtccatcactttttatagatgttgctttacgattagttagcgatattctttaaaagttacatgagacccgatatttaattatactaatagtgatacgttactgagaagagtagtaggcaccaatagtacattttagtattttttttttaaaaaaaacattacgattgcaatatgttaatagtatttataaaaactattatattaaattatatgagatttaataattatttaattgcactgcttttatcattttcacgtaattattacagtaaaacctctatttaagaataacctctaatttattataaaaaaatcaagtctcgatttcagccagttataaataaaaataacatataattagttgtacattttttaagttccgtattaataaagtttacctctatataagaataattatatcgtaataaaatatatacatatatttaaaattaataattttattctaaattatactacatacataaatattatatttactttaaaataattctattataatatagtattaatgtttatttattattattattgttacattcatccgtattttaatttttttgttagtgtaactctatttattataatctctcaattagaatataatttagttaattccaaatgtatttttagataaagattcatctctattagcaaataattacaggcgatgtaatcacgtactgacaatattaattttgtatttaaataaataatgtataattagatgggagagtaattaattaattaataattattattagttaattaattgattattgttactatacttgcagctggtaagttgagtaaagaagctcacttagagaattggattacttcattgcctgctttaacaccaggagattctgtcttcaaagtcactttcgattgggatgaatccattggagtccctgaagctattatcttcaaaaacaatcatcttgatgagttcttcctcaagacaattactcttgatgatgttcctgctcaaggtgttgttcgtcatctgcaactcttgggtttacacagctaacaaatacaattacaatcgtgttttcttcagaaacaaggtaataattaaattaatatacttgcttgattgattgattgattttggtaatgtcctccatgtgtttgaataaagttcacaaccagaaaaaagaaaattatatgatttagttgattggggttaatttttgcagtcatatattccaagtgcaacaccagcaccattgcttaagtacagaaaggaggagcttgagaacttgagaggaaatggattaggacagaggaaggagtgggacagagtctatgactatgatttgtacaatgatttgggtgaacctgataaaggtagaaacttttctcgtaaaacacttggagggaatagtgaattcccttaccctcgaagaggaagaactggtagaccaaccaccaaatcaggttaggcatttgtttaagtttttttttttaagaatttgaaatgcagagatttggggttttgattcttcttctaaacattgttttttttttgtttgaaatgtattatatttaacagattctagaactgaaagcagattgaaacaagtgaatcttatgaatcctctggatcctgttgaatctttagacatatatgttccacgagatgaacgttttggtcacttgaagatgtcagactttcttgcttatggaatcaagtctttgactcaagctatcatacctgcactaaaacattattttgatcaaactcgaaatgagtttgataatttccaagaagtacttgatttgtatgaaggagggttgaagctaccaaaatcagtacttgataatatcaggaaaaatgttccttttgatctgctaaaggaaatgtttcgaactgatggtgaacagttccttaaattccctttgcctcatgtgatcaaaggtatatatatagtcaatcatgctcttaaatatactacaataatcttgttatacactaataattttcggtttgaatgatttggtatagaggacaaatctgcatggaggactgatgaagaatttggaagagaaatggttgctggcgttcaccctgtccttatccgtcgcctcgaagtaatttcattgtttcatgctagaatttctcttgttaaacaatttataattatcaactaaaaattcaaaagctattgtaagtaagaaagatttagtttcatcattggtcctaatttggtctgtgttgactacaggagtttccaccaaccagcaagctagaccctgaattgtatggtgatcatactagcacaattactgaagaccacattaagaacagcttggaagggcttggtgtatttgaggtattgttcctagcaagatttttcatatataatagcttcaaatcaaatgtaccacaactaatacaattaatcatatgattgaataataggcactctttcaaaacaagttatttatattggatcaccatgattcgtacataccatacttgaggaggataaactcaacttcttcaaaggcttatgcaactcgaactctcgtgttcttgacaagtgaaggcacattaaaacctgttgccatagaattaagcttaccacatccaaatggtgatgaattcggtgttgttagcaaagtgtatactccaactgaggaaggtgttgaaggtaccatttggcaattggctaaagcttatgctgctgtaactgattctggctaccatcaactcattagtcactggtatgaaactatcaaagaaatttgatcacatcataagtttgatttgagatgaaatattttctttagggtctgaattttggttggtctgcaggttgaatacacacgccgtgattgagccttttgtgattgcaacaaaccggcaactaagtgcactccacccaatttacaaactcttgcagccccattaccgtgatactatgaatataaatgcacttgccaggcagagtcttgtcagtgtcgatggcgttatagagtccacatttttaccaggaaagtatgctatggaattgtcagcagtggtttataaggactgggttttcactgatcaagctctccctgcagatcttcttaaaaggcgagtctatttgacatagacgataactaaaatcatatttttatgaattattataatcatctaaagaaatgcatatccagtgataaaaatcagtgttgtatttaagtctaatatttaagattttcttttgttaacattgtattctatggctctctattcagaggaattgcagaaaaggatgtgaatgctccacatgggcttcgccttttaatagaggactatccatatgctgttgacgggctagagatctggtctgcaattaaagcatgggttaaggaatattgctctcactactacaatagtgatgctagtgttcaaagagacacagaacttcaggcatggtggaaggaagttagggaagtgggtcatggtgataagaaagacgagacttggtggccaaaaatgaaaactcgtgaggaactagttgagtcatgcacaatactcatatggatttcttctgctcttcatgcagctgtcaactttggacaatactctttcacagggtaccttccaaatcgtcccacattaagtcgacggttcatgcctgaagagggtactccagaatatgagcaacttaagtctgaccctgaaaaaggtttcttgttgacaattacttcagaatttcaaagccttgttggaattgccctcgttgaggttttgtccaggcatgcttcagacgaggtctatctcggtcaaagagaaaatcctgattggacattagatgctggtcccttgcaagcttttgacaaatttggaagaaaacttgttcaaattgaagatgcaattgtgaggaggaacaatgatttgaacatgaagaaccgagctgggccagtcaagtttccatacggtttgctcattcctacgagtgatcaaggcctcactggtaggggaattcccaacagcatctcaatctaaagctcatctccttgtgttgttgttgttgttgttgttgctagtgcttttattgttcactagtctatttatctttcctcttgttcccaaaattatgttaccaagagtctttgttagttgtttgtaactaagtggtggtgtcactaagaaaggccatatgggctattgcagtactaatttacttgcactgaatatgatgctagcttaatcatgtattatcatacctcaattaaataaagtttatatcaaagctttctgctagattttgaaattctcttcttaaggaattgagtgttgagttatcatatgtgtatcatcatgaactattaaacagcattgaaaaatcttaatgaaatttaatggtagttccttccttcaactccttgcttttataagggattttactacacaaaaaagtataaaattggctcatttcttactaaaatattaccattcttttttacatatttgtttatgtaaacttcttttttttagtttaatttaaaaaataaatgaatttaaaataaattcttttatttgtcaagaattagtagaaaattataattttaaattaataaataaataaataaagcacaatttgataatgatcaaaagttcaagacttaaaactaattggggtatgattataaaactacagaaaattctatggtttttctctttaaaagaaaacatctatgcactctttatctattttaatattagaaaaaaatattagtctatttttttatggtcgtgtataatatagttatttaagacattttttaaaattttaagaaatttaaaaaaatttaatacatcgaaagcaagattcaagcttacacacgttgattattttattttatacgcttggaaaataaactgtttgaatattgttttccatattgtaaattatttcgaatttctcacaatgttatataatattttaaataactataacgtgccaaaacaaataatgtggttaattaggttttttttttttcttttgcgaattacaccatttactatttttttaatttgtttttcaaatttacgatttgggtttctaaagtagttgtagcgctggttgcagtagaagttttcatacgattttttgttgcaatttaagttgcaatttagttgcaataggtgtttctatgtagaatttcgtaaaaatgaaaaaaaaaaactgtttt

SEQ ID NO: 378740 - DNA, 4318 bp, Cannabis indica
ttttttttttttatatattgcaccaatgaagttagtttaggaaatctgatggagtccacaacaaactatctccaattaacctgcaccaacattattgatttttatttgatcagtacaactgtctaaaaggaatttacaaagatgcaacgtagaaacagagatacaaaaatcaatgattctccctcagcccataatttacatagactattaatactatatctttcatttgttagtttgagtggaatattgtactaaatccttgtacaccaatcagacttgcattggcttaaatcttttcaagctttgttcaaagcagctaacctatatgaaaaatagttcggaagaagtgtatggtctacgtacctcttgctttcgcattctttaagcagtttggaaacagcagaagtcttcattttcctgctttactggtataaaatttctctgatgttccaccctttgaagatgggatgacaattgaagcaaatcgaccgttgattcatgttcaggcgaaagagaatacttggtatcaaaacagtcagaatttcgcgaactcctatctgcagcttcaaagtcagcagcgtgattggattcagtaaacactgcagattcaaactggtctactcccatggaattcgtcccgcaagaatagaatccattttgtccatgcctttccattgatcttaacctcagaggtttttctgaaagttgaccagctgtttgatgggcacctggaataatcatgggactttcgtttggaattcctgctgagtggcttgagaagttgtgtgattgaactgacagaagagagagagcacaagcggagtttgaggccccatatggtttgtgaatggttgctgctgtatgaaaactatagtcgtcattttccaatgaaggaactccagaagaatgaggatggattaaagatttcgaaaacatttgggtactcttgacaggtgctgttaactggggactgtaaataggctcctcttcaaacttgatgtgtccaaactggttagcttgttcgtatttttcaggagacagaatgacacctggaagtatatcagaaaatacaaacggtgttcgcttttgcaaggacgctccaagatatctggtgcctgctgcagccagaaatgttagaaaatggcatccctttcaggggaggccaaaaagaggtatagttattagaagcacataaatgcaactaattaagaaacagtcaacccaaggaggaaagccagcaactcaatcttcaaaaaactattgaaaacatagaaaaatagctcattacaaatgaagggtggagatgaaataaagtagctccaactacaggtttaatcttaaactcaaacaatccttctcttcccatctacttttagcattatatgagcacgactttttgctttaagcaaaaaagcttgtccataatattgataaaaaccatagcaaaatgcatggctcattagacatgcaacctttaaactgctccgcactcttatattttacaacttccacaattatattcatgataaatcaattattagagagccggaaaggaactccaatggtggctgatgtggccactaacttttctctgtaatagaaggaaagtctctagtgtatgttagtgactttctaatttaaggtaggtagcaagttatattcaagcaaaaataaaaagtgtcaatagtaatactaataatcatctcccccacctcttctcaatgtccctttaacttatgaaatcaatttaggattgttaatacaaaaaatgaaaaaatatgtattttatgtggggcttggcttaccactcaccagtcaagttctacttgaattaagtaatgcacaaaaataagtgatatgactggtctaagatttggcaatcttagaatgtcacccagttcattttctccactaaacaattatcacattcattagctaaggagtattcagtccacacaatgccacatcacaatcccattgagaatgtattaataaaaaatatgaagcatttgtaaaatacagagctatatggcaaggatattgacattagtacaaaagcagtgaagtcttcctgagctaggtaggacttataacaatgatcagaaataaaaaccagagttcagagttgaaatgccgatattaaattatagtaccaaatttaataaaaatggaagttgtcagtatgcaggtgataaatgaactgtaataacttttagaagtgttttcgagaaagggacatgagtctatcaagtgggaacaagcaacactcataccttgataagcatttgaaaacttatgtggtttgtcagagagaccatccaattgaggcttccttcgacgttcattatgccctgctaagcgcctacggcaactgcgcttgccatcatcaaattctgctagtagatgaaacctaatttacaagaaaaatcatataaatgcttaatatactgaactcaggcatacaatgaactttgaatgagaaagctttatatagcatcttaacacaagtagacttcttaaattgccaatcagaaaagaaaaaagaaaagattacacagcacagaagcagcagatgaagatgcctttatacaatacaacccaaccaaccaaccgacacaggtagacttattatatcatggtaaactgaaatgattcaatctaaagagtttcatacaactactacaccttctcatagtttatttaagccttagcaaatcatgatctcataaagaaaggactcaaatttcaatcagcaatgaaaagaaaaaacatttcatttattccatcgtctaatccttggtgcattgaagtgggaaagggttaaatggaatattttcaactttttgtacacaactattcaaagtttccactttttctgggattttaaataattcaccctaaagggaagtcaatctcttgctgctcatggtaaacaggtcaaaataaccttgaaaggaacattcttgcggaatcatcctagatacatatataaatatgtaaacataatgaaactatgataagccaaaataaggggatgattataacaatagaaaattaaaagaataaaaaataaatatgtcaagagagagagagagcgagagacctgctgcactgctggcaaaacctttgctcgatgccattaacaatgactttggaggtcttggagtgaacatcacaaactttatgcttcttatggtaatcttttgaggtactaagatccatattacaaccatgaacttgacaaaagggagtttgagaatatgaaccccttacccgggctctcttgacaaccaaggaaggagatgaaactgtcttatcttttgaatgttcattgttctgtgagtttctacaatcaccgaacctacctagcttcaaagcaatcaatggtgaatcttggctattagattccataaaagagctcgaaaccttagagtttgaaccagattcatcttcaacaagtgatgagttgggtgaaatcaagcaagcaggagaggctgctctgtgaatggagccattacccacctcaccaccaccaccacataacatttccagtccttggctattctgaatagtttttctcaacatctcagggaaacccaactccatgtattccaagctctccactgattctctaccaggaacgagcccattttcgcattgaattaacgcttttctgtttcttgaaaatgcatcagaccaatctatgtcgtcagaaaacaaaagggctttgccttccgcagcgaaattccaagactccattgatgtgtatcagaatcccaagttgcagagactaaggaaatcaatgacagaacacgcctatcaaccaagaaattcgaataagagaacctcagcgttactctaaaggaattaaatttaaagcaaagtacaaaacttgttttaaaaatatatatcaaaatcaggaaccaaaaacgcatgagtacatacgtgaaaatactacttatcataatatgtatgtgtatatatgggcacacacaaaaattagtaacagtcgtatatctacaaagactgaaagggaaaagaaaaacccataaatcatgaaattataaatgttccaaaatagacgaattgatgttccatctgatatgctactaacatgtcatatgtgggttaagtggcaattcaaagatagaacaaaaatgggtaaaaatcatgcttttattggcttaagagaaaccaaaaataataaatgaaagctttaaacttttttttcttcctatttgccaaaaagatttaaaaaataaaaataaaaataatgaacagaagaaaatgcatagtttttttttaaataaataaaaaa

SEQ ID NO: 378741 - DNA, 2535 bp, Cannabis indica
ttggcatctgaaggaaatgttctctcttttctatctttccaatttttttctttactaccaaactaatatctttttatttaagttttgaagatcattttagaattcaaaaaaaaaatctcaataccaaattcataccacactactgtaaactgtaccactaccacagttccaccagaaaaagagagaaaaaacaaacacaaaacacctaaaatcacatgcaatttagtacatgcttacccggtacaatccgtactatgatgattatgacgtcatttttaaaaaatacacttttcaatttatttttattcttttctagttatcttcaaattttcaactaaatcaaaaaaaaatatatcaaaagtaaataataataataataatttcttcgagctcaattttttctcatcatctaatatatgtacaattcaaaattatttaaagtttaaaaaataaaaaataaacaaaaaaagaaaaagaaaaaaacgcagagaacagccaatatatctatctcttctgaatccctaattttaaatctgattccttctgtgcaaaaaaagagtagctaagttgtgttgaatcgagcttagtaattataccaatggcaatgctgttgattctcaaactatgttagccatgtaatcttccacttccttccttatcgtctcctgcaaccatctcgtaaattcgggtccaaacttcaaactattcgtcttctcagatttagtagaacttccaggtaatgacaacgtcagttgagtgaacggatcggtgaaactttcgctctgattgtaaacatgttcttgtggactaagggatcgattcaagactgttgagaataaaccggaaaaaagtttgtctcgttcgaaattacatcacaagcatcatccgatccggattcgctaccgccgagctacaagagtttccctgtactgaaaccggacgatcgctgccaccgccgccactggcaaaccttttcctagacggatttgatgtttcatcgtcgtcgccgtcatcgttttccgacgacgaacactttctcttcaaagtcgagttccagtgattcttgattgcgttgtccgtacgaccttcgagaagcctagcaatggtggcccacttattaccgtgttttgaatgggcgtcgattatgatctgatcctccatagcggtaaacggacggtgtttaacttcaggagagagctgattacaccaccggagacggcaagatttaccggaccttccaggaattgatttgcttatgacagaccaattcctagctgagtgttgtttgacaagagactgtaatttctcgtcttcttcggggctccatggtccctttaccttacgcgataataaagactccattaatggagaaacaaagaaatgactagaatgtttttattttattatttgacgaaacggttggggaaggagaggagaaagagagagagagagagagcgcctctgtattatatggtgagagaataaataagagaggtttatataagacagtattagggtaactgatatagcgggttaaccgaatctggtaatggatgttaaagaaaccggtatttcgcggtggcccgttacaaaatgttaatatttttcgaattgacacgtaagttgaggtttcagttattaattaagaaaaaattagaactaaaatctcggtaatttagaatttatcaacgtgagttagtttcccgttttgagtcgtacagttatggaaattagtaaaggcagttttccggtaatttattataaatggatggagtatatatattggaaaagaattattttttagggataagtttgagcgagccaggctggatagcattacgtgatgaatttgggttccgtttacaaattcccttttatacatattagaataatttgcactacttaagtttttaacctttccttcattttcaaatcattatttgtttcaatttatatggtattaatatttaggtggctttgggctttttatttttacaaaacaaaataattttttttttgtatttttacgaaattttatataaaaatttctatagcaagcaatctaaattgcaacaaaaagcgttacaacactttaacaactcaaactgtaaatttaaaaaaataatatatggaataattcctcttatatttaaatcatattttcaaaaaatatataagtaagttaaattaataaatacgtgttagcctggttaataaaatttttatttttcacttaaaaattaatttaaatatattaataaaaaataaacataaataataatttatatattattaatgtcaaaaatgaatcttaaatatttatttataattaaaattttaattaaatatttatgatacaaattactttatatattagggaaattttatttacaccccaaaaattcctaagtacaccccattttaataatttttaatttaaaaaaaatttatatctttaattgtactaagtatttttaacttttttactttcaattttatattcttaaaaaatatacctatcaaacaaaattaaat

SEQ ID NO: 378742 - DNA, 1828 bp, Cannabis indica
gaaacggttgccaacatcttagagatgatcttataaatgacgttacaaagactgatcggtcgaaaatccttcatctcttttggcttttttatctttggaattaaagtgatcaaagttttgttgaaagcttctggactccacaatgatttagaacattgagaacaacctttgtcacaagatcaccaactatattccaataattttggtaagacatagctgataaaccatccaccccaggactcttatccgatcccatggactttaatgcagcataaacttcaggaccagtaaattccagcagcaaagagtcattttgttgaggagagattgttgttggaatggtggacaacacatgagaaagtgcccaatgatcctcatcagctgctgtaaaaagcttagaaaaataatcagcaatcaaatgagctataccatccttagaagttatcacagaaccaccagcatctcgcaactctttaattttgttgtttgaacgtctagctgaagcttttgaatgaaaaaattttgtatttcgatcacccgattgtaaccattcaactcgagaacgttgatgccaatattgttcctcattggccaataattcttcaagtatacattcagcagattgcacggcttgtacatgggcagcagtagcagccggctccagatcagtaattgaagcaacagagttcaaacgagagacttctttctgagctttggaaatctttttttttcatcttgccatatttcttaatatgccagtcttgtagttgtttcgaacacctctccacacactcacgaaaaccagcagccggatctaagtgatctgcagaaaaccagcaacgagaaataatatcacagcattcttcatctttaagctatattttctcaaattgaaaccgagatttccttctaatagctgggacttgttgttgagaaaaatttatttcagcacttagaactctatggtcagatccatagtaatccaagtgagttagaattggatgtactaaagaatctttccaaacattattgattaagcaccaatcaattctctcttttaaacctgtacctcttttcctgttctttgcccaagtaaaatcatctccgagaacaggtaaagcattcaagaaacattggtccatagttgatcgaaatgcttgcatttgattatcaggtcttaatggtccacaacttttgtgttcttgtgcgaaaatttcatttatatcaccaattaaaagccatggatcaagaggagaaacatcagcaagacgtctaattaaagcccatgtatgttttttgttgattgcttcaggaaatccataaattgcagaaagatgccaacgggggccatcatcaaacaagacataacaatcaaaatgatttgtattcatagataaaagagttacatcaacaccatccttccataataacattataccacccttcaaacccaccctagacacttctagaccattattaaaatttaaagacaatttaaaacgagaaagagcaccatcacataacttgtttccattaaaaataacacctgaggagattgctcactaacaagcaattgtagacgacgaaatgcactcggattccccaaacctcgtgcattccaactgaggagtttcatgatgagtagcgggattgcattgcaatcaccgctgcattgtcaatgataccatcagaatccgaagaatcatcagaaactgagagttgggaatccacttcgactgacaaagaagaagtgtctaagccttggctaccacgacatcttttaagtgtttgtctcaatgatttgttgggaattattttaccaggatct

SEQ ID NO: 378743 - DNA, 4384 bp, Cannabis indica
ggaaaataaaataaataaaatgcctcctcttcctttacccttcaatactattcaatatatttgaataatatttaagaacaagcatggttggctttataacttaaaaactattttcactttttaaaaacagaatattgctttctaaaaacaatagttgtttgcccatattttttagaaacagttcttttgaaaactaagtttaaaataaaataaaataagagaacatcaaaatgatgttttctatttaaaaaacaatttaatatttcttggtttcccagatcggtttgagtattgagtctagggtctggcttcaagtccaagtgttgggattcggggtcaatgtccaaggtcagggttcgggttcagttctgggtccggttttggttccatgtctaaagtgtggggttcgggcctaagcacaggtccgaggttcaggctaagttaggtctaagtagtggtgatgggtcatgtttcgagtcaatgtcacaagtcaaggacctaatcgatctcacgggtcagggttcgggtcgatgtcacaagttgggtccgggatctggggtttgggtccggggttaggtccaagtcaaggtcacgggtcaagacttagagtattgtaatttttttagagaaataaaaaaaatctaaaatcctatttttagaaaacattagcaaaatgaatcttgtgttttgaaaactctctacctcctccctttacccttctctgaccataaaggctcaccaacagaaaaattcacactttctttgtcagtcctgtcgctcttacaagttttcttccttcatctttcttcattttccctccccctccctctctcaaacataataaaggggctcttttacaataggttttttttttcaaaaataaataaattagactgataaggttcaacccactttagatgaaaatcatctaaatgacagcctataatttcttttttaacttgatctataaattaatgcaaggtttatcatattttccctctaaattatgatgcacaataacttgctacaatttactagcattcaacaacttttaaaaccaaaaacactcaccccgtgcatgttgttcactggtcactagtacatcatttcttggttcaacgcttatgctctcatactcgacattatcatttataagaggctttagtgtttcatatttgctaatggcttgcacagtgtcataaatgctatcccacattcctaatttgatagatgaaacctacaatatgaacacttcattacaacatgcaatgtcataaaattccagttgaaacaatacatatagcttcatacatgttttgaatatgtctgcacttaaatgtggtaagaaagagacaataattgatcaccatcaacttacagcaacatttaataatccaatgaatggataacatgaacataaagacatcatcttcttccgatctttcgctttataaaaccgaagcatccgctttaaaacctacatgaacaaggagaaatctgttcaaaaaaaaatgctacttctaatccaaaacattatcaagacaactcaaaacccaaaaacttgtggagttatttaataaagaagaagagaaaatatgcatcaaacatgttaacgtttaataataaatgtatgttatactagtcaagttttaaatatttggaaggaccaagaggttgataagcacacttcagttcatgggataaaagataggtttccatcatatgcatttgatttagataatgaaatgcattcttatgatagcttatgaagtaaaaggagacttcaaacatacctgacccacattaacacctcgacatctatccttccaaatagcaatgaacatcctcaaagaatcatcggtaactgaaaagtcattttcagtggctgaagaatcatcttcatccatatcgctactctctttgggtcccttcccattatttacaagaacatccagtcctaccttctttatctttcttaatttggcaggttcagagttgttgcaacttagctcttcaaattttcttttctttttaactgctccactactgttacagtgcttgtgggcagtattagctgaagccatgtactctttagtttcacctttcagcccaagccgtgttatctcctcagctgcagacgggtaaggacaactacttggtcggtctgaacttttaacacgtgttgagatgtcagtagcatcgccactatcatcttcataaacacaaccatcactaaattcatcctctgagcttgatgatacgaatttagtgtgcttgccacgaaaatccttatgtacagaagaaaatgattcaacacgatcagaaatggcattaaaacgttcatctagttcttttttctgcaaggatcgaaggagttgcctattttctttgggaaaatcggtcttcacatgctttcgaagtttggttagtgcagaattttcccacctcttggccttcacgatataagatgtatgcaacctatgataaaaagtatattcagatgagatcacacaccaaacttcagctaacatgtatttaaagttttataatagtcagcatgaatgttgataaaattcctctggtcgatacagggaagcaaatcagacaaaagtgcatattgtcaaataaaaaatcgataaattcaggataattgagccagcatattggcaaattgtcatcctttacagtcaagacatgtttgctatgcctactttaatacttcatttgttattcttagcatgtcttatttccataacaaataatcaaagaaaagcttctttcttttaccccatttaaagacgccaattgttaataaaaaacaggatctccattcttaataactccataaagaaagctaaaaacatcaaactacaacaacttaaaacagaaacactctgaagcaaaaacatgaataactttatattagttgatgtgaaaaaaaaaaatcaccatcaaaagatataaatgaaataaaaaaaatataaaaaatcgtatgaccagtgaaagatataattctccggagcaacgattgcaataaaaagccaattataaagtttaaatataaatatataaagggaaactaccatctacaaaacttaacaactacatgtttgactgcatgagtgagtgttcgggtgagtgacatggtataaaataatgatggcaataacaatgaagatgatgtttgcaggcataacaaagtggtataacaatcttgagttcaaatcccactctcaagtcaaataaataaataaagaacaaggttttcagagcttgaagctacactagaaatgtacataaggaagtaaaaatgtgctgctttatgtcaaacaaaagaatatgataattatacacacctcaagctttcaactcttatgccaagctcttccttcggagcaactgattttttctcagcaatgaaattcaaaaaatcatcagcctgaatacctttactagtaaacttaacttgatattggaaaagcaatgacatcaactctttagatgttatcttaaaaacttcagttgtatctggatcaagcgagaagtaataaactataagagggtgtcgaaccaaagggcccaatcccaactcatcaaacttagcaaccccttcaagctggcagattgcttgttccaattcatacaccgaagtaattctccgcacagcaacaaagcaatggataaatgcatttatctaaaaaaccaatacaaaatacaaaaactgagtgaaaattgtatgaattatcaaaaatattgctgccaaataaacgaaaataacagttacagaattcatctttattgacatgaaaaatatggttgtgtactcattcagtatattttggcaaaataaagtattttcaataggagtaatgctaaagacacaatacatactttttacgcacaataatgatgtgtatttaattaccatcatagattattatacatgggaaccgtgttactttgagattaattatacattgttgtgtgggaaaattgtcaaactaactatgtaaaatagtaaaattggcaaaataacaacactcgattaactctatgccactatgacagtcgcacagtacaaatctatggtcgcaaaacgactaagattgttattttatggtcgcacagtgtaacttatggtcgcttacatagtaagttgctaataaaaatttttgtaaagatattttgctaataaaattttccgtagagtctatttttacaaaacactatcttattgtgtgtaagatagtatgtgaaaattaagtgtgttctttcgataataatactctatattttaaaatcttagtaacctgaaactcaaattattaagcaaaaaaaactgaaactcaaatttgatcaataaactatctattatcattacact

SEQ ID NO: 378744 - DNA, 1419 bp, Cannabis indica
aaaaaaaaaaaaaaattactcttgtttggtatggaaagaaagattgtatgaaacttgatccaacaaaaattttcttaccaaacatgaaaaaattgactttttttttattctccacacatctttttttctacattttccttacatttttcttttctcatcaaaatgcaacttccaaacatagccttagtataaccataacttggaaaagagatgaaagagtagacataattctatagattttcgaaagctacagaatactaatgttacccctccacatttcacaaaaaaaatgaaaaaattatttatggatcacataacccaggtgttagtcataaaattctgtatttaaccgttgaacataaatcctgacagtctagctaatttgaaaatgaagctgacagagcacacatttgtgctaaacctactatttcacattggaagtcataagggaatcttcaatggcttttacataatttgtagtcttaaaacatgaaaggcgttttgcatataaaatattccatagatttgaaaaaaggttctgtaaattctattgatgagtttaagaaattcttcccagacagcaacttttgcatactgcatgatattaattcttatgactcatactctataattataagatgtattgaattttcaaattttcttgtcaattgtaggtaatgtcctgttgtctatgtcattgatgttactctaatggtatagaaactttaaaaagaaaaaaagaagcaataaacaaatgtcaaacctaacatggttcttcgtgtacggattaaatcagtaaatcattgctagtaatggtgcatacactgaggctttctcaggtggggttatcaaaggtggctgagggtacttttcttccaatgattgtgtgataacatcggaatctgcaacccacttctcatcaagctttaatacaggaactttaccacctgcattgatctttagaaacctagaaacaaaagaaaacaaacaaattaaactgaaaaatcattcttgtcagctagacatggtaaggggttaaccaaaggtattggatttaaaataatcaccattctggcttgttggccaagtctaccaactttaaatcataaggaagatgtttttcctccaatgttagcaacaccctttggcaaaagggacctacagaatataaaaataccagaattaagtcgataaatcactcctgtaagtaggtccaaaatccaatcatgcataatttaagctacaaatgacttccctcaatactaagaaacatacaaaacaattattaactacgaatcctttataattataaacattgaaattaacacaggtccgaatacattcaatgctaaaagattcccttcactgtactacattctctctctcggcaacgaaaagaaaaataaaaataaaatttaa

SEQ ID NO: 378745 - DNA, 3056 bp, Cannabis indica
ctctctctctctctctctctctctctctctctctctctctctctctctctctctcgataacaggtgagcggcggtgaagctttcgctgggttttttttgttggactgtttattttggtggtcaaggtgagcggcaatgatgatggttgtggtttggtactggtcgagtggcggtgatgggggtcgcagtctagttgtggttgagtgacggtgatggtggtcgtgatctgtttgtgttatgggtttcagggatttctctcgcggtggtggtcgtggtctggttgtggtcgagcgacagtgatggtgatgtggtcgtggtggctccgggaatgagaaaaactaaaagatttagggttttttttcaatttaattattttatttgttttaaataaaagcttatgtaatatatttatttgttgtaatctatatactatttattatttaaaatatgtatttgttgtaacatataggatgtaatatgtaatttgttatgtaataataaatgaattatgtgtgtaatttattttaagtttatagcatttcaaaatttgtatttcagaattactaaattttatttttaataattattttttttttataaaaatacctttttagtctcggtttaaaaccgacatgaaagagaaaatatatatgtatactttaagtgttgattttaaaacgacacaaaaactcaatagtgtcgatttagaaacgacaccaaaaattaactttttgtcactgtggaataggttcggttctatgaactgacactaaaagtatcggtctcagtttaaaccactcacttaaagtaataacatattccgatttctagttactcacatatatcatattcaatataagaaccatatcgcataactctccatgctaactactatcttacataatgtcccacaaacgtggagattccaaatctccgggtgctcctgaccaagtcctggtaatcctagtcacaaaatatgggattcacaagtatagggttaatccctaaattctattgcacataatataaaattggaattcagattatagataatcatatacagctcaaaacgagcttttcaatgatataaagaactctcgaaacgaagtccgaataaagttattaacattcgaaaattacattcgaatttacccaaaaacaagggggcgggccgcggcaccccacatggggccgcaacacctgggttcgaatcccaagccaccaacaggaggcgggccgcggcacctaggtttcaaaccatgaaacccttaaaaacaagcttcgaattcaagcccaaacacaccaaatttcatgctaaacaagtccaaactcaaattaaattcttacgaagcatatatcaaataaactgagagtgatactactaatcttactctccatttatcaccaaaacatgcattaaaatcaacaaaaacatgagccaccataacaaagttaagagctcaaatctagctaaatatcattccacaaacttgaacctcactatccaaaattccacagcaagaaaatgtcaaatataatcaccatgttatcacattcaaaactcaacctaagctcctaaacatccaaaacttagctagagataacaacaacaaaggattcaaacaagactatcatcatcatcatcacaccaattctcatccatgcatttccaagaatataaacacataaaaccatgctttttaattctcataccagcaaaaaattcaacatgtaaagaagataagaactacctcaagctcaataccaagctgtaagcacaaaaactcactaaaaatccaagcttaattccatgacaaaattttcaacacttagtaaattgaagggatggaacgaaagagggagagggggttcagctagggctaaggaaaatcaattaatatagccaaaagatcaaaatgtccctaaggccataatagagcataatcatcaaacaagggtaaaaatatcgttcttacatatcatacataaataaatttcagaatattcacacattaataaaataccaatacataatcccgaaaatgaatttcggcctcgaatctggttcggtcctaaatttccaattgtgactatatataccacgccgacctgtcaaaaaacctctgaaaagacaagacataataatatagtccataagcacatcataatataagttccatagttttacccttcttgtgtcaaaatgactaaaatgcccctagctcaccagcggggtcttaacatgtcatatattttattaatttacatataataaattatataataatataattccataataatacacacttaactagttagggtttgctaatctattttcttaatcttaggttattacaaaatatatatgactgtgtttttttatcttggggttgatcggaaatttccaattacttacacatttctcgacagtgccacgaacgttttaaatagagcgacctaatctgcaattcaacccaaaattttgttacaacaatgtaaactatatatgaaatagttttgaattcaatccccactactacaaaattgggctttagaggcgatttttaaggggttttggcgtcggttttgacgaaattcgctaccgacactgttccaggtgacgctatagggtttaaaacaaccgacgccatagggatcctttggcgtcggttcttatgaaaaaaccgacgccatagggtcttggtatttactagctttacaatttcgtcttttagcataatttatatatatattattttattattaatataattaaattaagtataaattatatacaataagcataaataaaaattaaattgaaaagttaaataaatacacatttacattaatctaagtgtttgtatattagctatcttttattaatattttatatttgacattatgtgtttgtatttttgtagtatattagtatatttattataatttttttaagtttatattttgtataataattagtatattaaataataaataatgtgtaatattttttaattttattgtaatttcattatttttatatatttaaattt

SEQ ID NO: 378746 - DNA, 2724 bp, Cannabis indica
ataagtgggtgatagttaaatacaacataagctgataattacctgccagagaatacacagcaatgattccatctgattacgagcaaccgaatcaccaataaaagcaattgtcttccctctcatcaagttcaaaaactttcgggcatcaaaacgagggaggtcacattgagaaggcttccagcgccaattctcatagtccttgtcaggcctcccatttccctggcaattctgcatctgtgtcaggacagggcaggtattgtttgtatataatggtcccagtgaatcatagatccaatttccctggtacagatcgcaacctatataacggccaccaaaaaccaagcgaacacattagagaaagaagatagtccgtacctcaaatgcaattccctgttgttgagaaagaaaaaagttcatttttgtatttttcccttgaattccccttatgcaaacaagacaaatgcataaattatggatagaaacatcaagtcacactagcaaaaaaggaaacttaatgaatctataacttggtacgtacataactgaatactagtcaatgcaattgcaaatgaaatatataaactagggaagccttcatttgatcaaagaaaatcaaagaggttaaaggatttatttcaaaactaaggaaaaaaaaaagggtcaaagaataccagaatcagtcctgcttgcattgttgggattgggaagcttagaatcgtgagagaaagttggcacagcttctgaatcagctgaactggaaccagaagaagctgctctgctctcgttggttcccaaatctaaaatgttggatttattcacaaatgccttagaaatagaaatgccacttagatcattatcactaacatttaacaaaggaggagtaacatccttaaccccatcgtcgtgtgttgaaacagaagacggcacaggaacagctgttgatatttcttttatcttctcaacatcagaaagggtagtaggcgcatcctttgaagttaagggcacttgtgaactggtctcgtttgagaaactcttgtcaaatagttcaggtaatgtgacttgatctttcacatccttggttttcaagtcaccattggaaccttgtacatatgactcggatgagacattcttagcaacattgtattcactaggagatctggtggtttgattgtctgtagagactggtgaatctaacttctccgaactatcaatactgtacaaagatccagaaacctgggaaccaactgggtttgacaacaaaacccaggaacccaggactaaaaacaaagccaataatcccactaaaattgcaatccgagaaagggtcctcggatatgcattggctgctaaataacccttggacgaggtccaagtcattgctttccaaaattagaaagtcttataatccagtttcaaacatgaaaccgtcaaaactaaatgacctaccaaaaactttattgttagctccaccgcttatgcctgtcctggatttacaataagaaaaagttcatatttgttcagattaagaacttcattaatatttacatgcatcgaaaacaaaattttcatcaagaaatgtccaacattaaaaatcaaaaaaaaaaaaatcaataaatgcatcggaagtaaatgaacaaataatcatataagtgattcgacttaaacattaaaaaataccaagtcattaagagataaagcatcaataaattcgatacaattacgaaaaaaaacaaatgtaatcatgaaatgtacctttatgaaagaggaacgaaaccgaaactttgaaaccaactattctttacgcgtatctcttttttggcttcttcttcttattcctttttccgtttgtttatcgagaaaattacagcagggagagaagaatcaaaattaagagttttcgaaggaataatcgagagataagagtattatgtgtttcttgaaaaccagttacggaattccgtgaagatctcggatcaaaggaacttcatttaaaaatgaaaagcattaattaaagaaaataaaatagttgcaatcaatgtaaactactaaaattattatatacaaataaataaaggataaataaaacgaaattttaaatttttcgaagacaaaacgaaacgtatcaaatctattatgcaagaatgatttgcggcaaagttatgtgcttcactcccgattttatgaatgaatctagctttcatgtgaaaccagaaattactctaatacccttgcttcagcaccgtacaagggtgaagggtagggatgtacaagggacagaaaattggtagggagtgttctccggttcccatttccgttaagaattcatttttcatcgaaaatgggtagagaattctctaataggaacggaaaaggggcgagaaatctcttaataaaaaaataaagtttataataaaaatttaaatacataaaatattaaactaaagaattaataattttttctctgaactttcgagaatatttattttgatttctaaaatatacggtttgttaagaatatcttctgaactattacatttacagaaacttagtctatctattaggttccgtctataattttgtttaaataatgacgtatctttgtcaattagcaactttgccccttaaactttgacaactataaaatcgtacccctcaaaataaaaatgagaaatattcaatattttttttagtaaatcttaaaaaattaatttagatcttaagaaa

SEQ ID NO: 378747 - DNA, 770 bp, Cannabis indica
taactacagataccgaatgtgtgggaagatgaacttaacaatgttgtccaaatgagctttggaacagaagttctcccagcagccaagatggagatggtctgaatagttgacttttttctttttttcatataaaaagttcatctgatataatcctaagtggttttaagcaatttcttctgctgcattttcagggtctatgccaactggccaaatgaaagttgaactttgattattctcttggaatattttatgccacatagtcctatggtcaggccccatatatatacacagctaattaaatgagaagtcaaacatcaaaaacatgacaatccctctttgagatgacaagaaaataacctgaaaataattctacttaagctgtacctgagaagatcctaacttcagctcctttcatcagggagttttcatgatccaggaaagctacattcctctttggaaggaaatgttgtatagattgatatttacaaaaaatataaaagggatgaaatgttatgaaagatgatatgtgggctgcttttgtatcttaaggcttggagggcctagtgtagttaacaagaaaattgtaatccaaatcatggtcttcttttgttcatttagttagttagaagctatatatgtgctaatcatatatcaccaaatgttatgtctttcttcttttcttttgattctgcagctcttctgaatcagattactctgtctattttttcactctcttttttttctttcttcttttttctttcttttttttt

SEQ ID NO: 378748 - DNA, 8592 bp, Cannabis indica
gacatttcttataaaattagtggaggaagttctttattttttttctcccttatttaatcaagttctattcgtaattaaacaaatataagtgaatgattaccttactattaattgtcattacttattaataaacatgcatagtctaacaacacaaaacttttgcaacccatttttagaattttttttacaagggataaaaatttaaggacaaaactctaagagtctcataaagatcctatttattcaaatttaaatgatgataatttttccacatcgccaactagtcttcctttcatacttcactacctcgcccctttagaagttgcagaacaatgaaaccttcttaccccttttcttaatcgttatatatttgcaggagaaagggatagtgagagagagaggagagagggagagtcatttcatataaaagaaatgaaactcttcattttatttcccttcgattgaaaaagacagagaaacacatatcatcacatataaacatattcataaaccctctaaaccctggttgaaccagaaccaccatgccctgttcgactctctttcacggctatatcagaaccatgtctctcggacccactaccaccaccagttctctggctcttttcaagacccacaacaaaactattgcagttaaacctcctctgttgctgggattcttcgccaggcaccggacctaccgtactcataatgttggcttctggaatgtttaccgggcgccgcgtcacttgtcctgtcgagaactgacatgcttgtcttcttccgggaccgttgaggtggatgggggtcagaggcggcagcgccaccggcataaaggggctgctacgctgccgttttggcagcagcagagtctgaattacggccgttatgcttatcaggatgtgtcgagcagtgaggattccgaccgcgaattagggtcttctaggaaagaagcggttagtttttttgtctatccattttgttggttctgtaatttcaaacattgattaattgttgtctgaattcttatatctataagataaatgtttttataacgttggagtatattatcataatgttggttggattgtagctctgaagtgatgtagtgtgttttagttctcttgctttcgttatctttctggaatatgatagtacctcttgatgttcttctagataatttaagtggtttttctctagcatgtacattgtaaaatgatctaagttgtgttcatgatttagtgtggttcaacccttgataacattgatgaatggagatggaagttaaccatgttgctccgtaatgagaatgagcaagaagtggtttcaagagagaagaaagacaggcgtgattttgatcaactttcggcattggcagccagaatgggtttatactggtatgtttgtttctaagcgtctaaacctgttcctgttcacttccttatattatgtcatttattcaaacacttgtttaatcttttatttaatatttgcagccgtcaatattccaaagtagtagtctttagtaaagcccctctaccaaactaccgatcagatttagatactaagcgcccacagagagaggtattattgcgattctctgtgaagttgacccactgagtttcttatattactgttctttttttttttttttttattgaaaagggttatgttgatgatgatgttgagttctgtattttactttattaccatcagttaatcatttcaaaatcatatttaggtgataataccatatggacttcagtcagaagtagactatcatcttagagctcatcattctcgaaagtcaagcagcagggaaggtttatcagataatttattgtcaagatcaagtagcagggatagcattgtctctgatgagaggtttaatgagcagcaggagccatcaggccgtcgtagtgttgctatggaaaaaatccttcgacagaaaagtttgaacatgcttgatcagcagcaaaaatggcaggtcacttgtacttccttctcttttattgtcttttcatattacatggacttagctcctcatttattttagctttttttatataggaatctcctgaaggtcagaagatgcttgaacttcgtaaaagtcttccagcctataaagagagggaggcattgctaaaagttatatcagaaaatcaggtctgccatgtttatgatattttgattgattgataatggtttattgtttttacatttatatgctttctcacccagaagtgaagagtagcttaagagattagctcttaaggtgcaatcctgttactcaacaataaaaataaattgtttatcatttgatttacactgggctatgtttatattatattttctgatcatctgtccatggagaaatttcagtacaactggttgagctagtatttgatataagattcttttgtcaattactgcttttccattttcttttaagataagaaacatggtttgattatatctagatgaaacgagagtaaagatgttataatagataaatttgcaatcatgtacaccaattcccaagtaaataactagctcaaccagttgatataatatcgaaagtggcagttgaatgagaaagaataaagcagctggatagtgtgaacatagtggaggatggaattaagtcttaaaagaagagagggagaagcgaaaaggtgaattgtcccaaatgatatttagagaggaacaagcacttagatttacaataacccaaggagggagatgagaatacaagattttttcagtctaatgaatgctagaaaagcaaaaaacattgtctcaaatattgagcgaaatgacgaaaccgttttcgacagagaatgagattgaggaggaaactgtgggctaattcagatccttgtaccagttagtccaagatacatttgtcagttttgaggggctggagtggggggatactctcaaatcctgtctattcagttggaaaggccttttcaagaggatgaaattagaagagctgtttttaagtacaatggtgatattcactgaatttgaagagagtggggtggtgaattgaattactaaggagacacacattcatttccaaaattttaaaagaagcaacttcttgtaagattaaaggctttaggccaatttctttggtaacagttctttacaaagtcatatccaaagccctttccatgagattaagatatgttttgagtgagacaatttcagaaacacaatgtgcttttctgctgggaaaacaaataatggatgtgccattgattgccaatgaagtggtagaggaatatagacgctggaaaaagaaggggggtggtattcaaagtggattttaaatatgcagggtggtattaaaagtgtattttgaataggtgtgcgtttttttttttggagtggaggtttctgcactttgttaattttgagaggaagtggaggaaatggattatggggtgcttgaagtctgtttcgtatttaactttttattaatgggaggccaagagcaagtttgtaggaacgggaggcttgagccaaggatattttggagaggcttttagattacagccaattgacttctgtgttttgcaaaaataatctcttttcactggaggggacttatcttaggttccaagtaataattatcattatcaactctctaacagtgtggtcattctttttcatcatctttaagagaggttcttttctttctgtgtcatttcgcatgcccaaatattttatagagactggttaattttcttgttaaccaagtaaatcaacatctcaaacatgtagatcttagtaagaggtttctttccattctgaaattgttaggtctgtgaagtgtgtgtgtagcttaaatgtggctaaatccatacaaaatagagaaagctctttctgatttttgttttgggtaggttgttgttgtttcaggtgaaactggctgcggtaaaactacacaacttcctcagtacattttagaatctgagattgaagctgctcgcggtgctttctgtaatattatatgtacacaacctcggcggatatcagccatgtctgtctctgaaagagttgctgcagaaagaggagaggcattgggggaatctgtgagtttcataacctcccttataaatataacagaatctgttctcaaagtttcattagatatatttttttttggttttcttatgatttacttttcgttatagtctttgtttttatacatactgtgtactatgtatatatatatatatttaatttaggtactcttatcaaatatatatgtatacacacatatatttatatgttctctctctcttgaaaaaggtgggttataaagttcgtttggaaggaatgaaaggcagggacactcgacttcttttctgcacaactggcatattgttgaggagattgcttgttgatagaaccttgaaaggcgttacacatgtaattgttgatgaaattcatgaacgtggaatgaatgaaggtagttttagaattcatttatgtggttggttgtggggaaaggaatggaaaggaatccctttcaatccattcctttgtttggtttcaatctaaggcattaaaatgctattctaactgaatgggcaccatttcagtggaatgtctattcgttccgaaaatgggtaaaagagaccattcccaagtacaattattttttttaaaacttttttgttaatttttttactcatattaaattttattccattactatttctattcatactcacatttctagttcattgtcgttactctaaccaaatgtaaggtttttgtgtactggtattttttcacgtgatttattattataatttttcaattttccagattttcttcttattgttctgaaagaacttcttcctcgtcgaccagagctaagattaattttgatgagtgcaactcttaatgcggagcttttctcttctttctttggtggtgctccaacaatgcatattcctgtaagttttaaagattttatgccattttctgtaattttgtagttagggatttgtgactcaattttttattatagaccagactgatgaagttcccaagtataatattatcataaaaagtagagtaccttcaatgtccaagacttgcttgctattgtttgtctgcaattgttttttctcgttcaaagtttttgttttcctggcagtttttttgtgcatgccagtgagccccaacttaggaccttttgttgattttattcctcccttccatcaaattttgattgccatgcaatgaattaaaacaggaagattgaattctttatatggggatgtttgtcatatttttttagggttttacgtacccggttcgagcactttttctggagaacattttggaaattacgggatatcggttaactcaatataatcaaattgatgattatgggcaagaaaagtcgtggaaaatgcaaaagcaggctcaatctgtaggaaaaagaaagagccagattgcgtcttcggttgaggtataataaattttaaactctggctagttttcatttcggttcttaggtataattgtttatatgcttgtgagcaggacgcacttgaagctgctgattttagggactataatccaaagactcgggagtccttatctgtttggaatcctgactcaattggatttaaccttattgagtgcgtgctttgtcacattatccggaaagaaaggcctggtgctattttagtttttatgactggctgggatgacattaactctttgaaggatcagcttcagtcacatcctctcttgggagatcctagcagggtattgctgctagcatgtcatggttcgatgcccagtaatgaacaggtgttttttttttaatattacataattatttactacttacccaacgaacgtagttatattatattgaaatgttctataaaaactcttcaataatttgaacttttcaaatttatcagcatcatttcacaagaatatcctgatatgcagtgagatttgctatatcatattttttttttcctttgtcaacatgttggtatgtgttttagttgtgtctaggtgtatattagatttaattaaagtaatttcttagagcatatcttactcttagtgctaaaaaggtggtgtattatattttagcacacttcaaaaaacacaactccagtggtgttctaatatatgtgtctaatttggtacatgctataagttttgccaaatttggcccacaatgaattttgctcttttatttagtatagtgccattacttattatgattcattattattattataaaacactagattctttatttgccatgttactttaattttgacaataaaaagaataataatttttgtatattgtgaatagcagtaacagttgatttgtaattatttttccccttatttgtaggaatagaatcaattaggatcaattatgtatatttatgcagtttattaggtaaagtctatacattgttcagttctacgcacaaaaattatatacaaaatattttctcccaatttctataaccatcaataataattaacttttttttttcacatattatgcattggactacgattgtaaatattgggccacaaatttttttttttgcgccaaatttagcacaaaattttgagttttggcttgaggcttgcatttttgtcttgaacgtacagataatttgagtaagggtgcgtctggaaagtcacgatgtaattggatttgtgtgtaattgaaggtaattacacaatttgacatgtttgtctgaccatgtaattacactgtaactgtgtaattaaaggtaattgaggggttccgtttacactctccaattatcatggccccatgagaattgagtgtaattacttaaaactttccatttcaaactttaactactaaaaaatattattaacctgtgtaattactatttgttttgccaaataaaatattaagaattcatatgtaattaccatttcatagtcaaacacacattaaaatatagtgtaattgctattggtgtaactaccaccctagtaattacaaagttacttccaaacacaccctaatggttttggagcattcttgtcaccatatgtgaagcgtttaccatttttttttcccaatatttgatgaattcaatttttcaagggttttgcctattaaattagacaaattctgttagattatagggagtagtcaaggtaatgcaaattctcacttttacatttttttttagttttgaatgagttagtcttttctcactgttacagttttgttaggagtgcaccatgtagaacttttgtatatttagatatatccggacattattctgtttttaactttgccagtttggattaggatttgtgtgaaaaaagaatttcattattaaaacattgaatgggagggtacatcaacattgaatgggagggtagctgtacttttctttgtggcataaagctcctctgcattgctagattcttgtacgtggaatagttatttgtctgttgtcaagagatctcattttcttattagctatggccatgcaatttcatgcataaagttgagccaaacgcagagtgtgtatggtcaattgaaataaagggtagttaagtcattgtggtgaaggataatgtttgagtgggaatagaatagtataaattggcgagtttagggagtgggagagtcgtgcaagaattaagaggttatttctctgcatcatggagtcttaggcctatttaatgcctagggaaattgtctctgttctaatatcaatctatacacaagttctctttatttttctgctattgttcttgttttggctattgttctgttgagtttacttagctgctgcgttcgggtcttgtcaaacttgttttctctgtgagagaattaagttctttgcttcgctttggtttttaagtggcggattcgaagatacttgttgcatttgtttcagattgtattttatgcgtttattttataccttatcctcttctttcttatatttttgctcttttcaatatttaacagaaaaaaggtaatttgtaatcattaattttattgattgtatgtttactaatatagatatttctttgtccccctatcaatttttgcaaacagaaattaattttcgataagccagaagatggagtgaggaaaattgtacttgctacgaacatggctgagactagcatcactattaatgatgttgtttttgttgttgactgtggaaaagcaaaagagacatcttatgatgcactaaataacaccccttgtttgcttccatcttggatttcaaaggctgctgcacgacaagtaagacactaagacttctgtttacaaaattatatttgatactttgcttgtatgatttgtggtacgagctctagtttttctgtttcatgtctgtgataggagtttcctaacattttggtataaacagtaacaaaatggaagtagagccaaacagaagtaattatggaaactagtagctgatatattggtagtagaaaatagtttgaacaagtttgctgggtattcgagagacccaactgttaaccccaaaaattagcaaagctaaccttcgag

SEQ ID NO: 378749 - DNA, 2910 bp, Cannabis indica
taaattgtttattttttttttgtttttttttttttcttttttgatgtttaaagaagcaacattattgaaaggaaaaagcactagtaaccacaagaaggggctacatcccttaacaaacctgagctgctacaattacagactctagctcaacgggcgagttcatcagccagggcattctcagagcgaggtacatacaatacagttactttgtcaaattgtttacagagtaattgacattggtaaaacaaaggaaaaatgtgccaaccaaaagggatggaaccaccaatctcaaaagccaaagcagctgccttagagtcagtctttatgtgtaccgagtttgcccccttatccagcgccgattggagcgccaatttaatcctgcaccactctccttcgaatacactattaacctttgacacatccatagcagtccaataatcccctgttgtatgatcttgcttgtgcacaaccgcataacctgcaatgtttcccaccactgaagcatcaacgatgcattcccaagacccttccaaggggcttatgtttgcactattatctagactcgggatctccaaatcttcctcgcaccacattttgttggtcagaaaatcttcagttcttctcatacaatcctggaagactaatctcatctctatatctctatctctgaacactttctcgttcctccatttccagatagtttccccgatacatacaaagagggtttgaagctctgtgtcatccaaattgcaccaccaattcccaacctcttcaatgtctctccacttaaacctgtcaatgcggataccctttttgaaccaaatagcccttctaaaagagcactggcaaaagaaatggaaggtagattcgggttctgagtcgcaaaaaacacagtgttgttggtccgttggaaggaatccaatccgtgttttagtagggagaatgtttgaaaagagcttccaactaaagagttttaaacgagggtgcagtttagctttccaaagtcttttccaatgggattgaggatccttcaaacaatatatttggctgacccagtacgcactcttgacagagaatttgcccgattttgacgccttccaaaatagtatatctcgaccctcagctaacggtttgatccttagaatttcctctgccatctgaggctcaaaacacgctttgatcaaggattcattccacgatctagtgccctccagaagcagatccttaactttccaaaaagcctgatttggaatgaagtggaaactgtcccgaatatcatcagaatttttcccaggaatccaaggtctattccatagctcacaatcaccatccgcaatcaggattccagccccctccaggcacacttttctcacgtttagtatactcttccaattcctagaatcgttccctcctttgtcaacctcccacgggtcaattttgatacaatatttagccataaaactcttaacccacaccttgttctcctcgctcataaccatccaaaacagtttagccaataaggcctcattcatatcattaagtcttcttaggcctaaaccaccacatcccttgggttggcaaatctcattccagctcttgtacgcctaataatgtttcatttctttgttaccaatccaccagaatcttgcaagaattctgtaaagttcatcacaaagggtctgaggtacttgcacggtagacatgaagtaattcaaaatactctgtagaactcacccaattagagtagttctacctacctgggataagtgtttggccttccatccttccaacctcccttgaatcttctcctttataaagtagtaatcttttcttttgcttgctgaaaaaaaaaaaagaaaggattttctagatatttttcacactgtttgatattttgcatcccaatggtctcctttatctcttctttgcaccccttatttgtattcggggagaataccactccgcttttctctttgcttattttctatccagatcactcttcatatttacgaaaataatggagaagtctcgtagcattactagccgaagcttgggaaaagaacatagcatcgtctacatagaataagtgagaaattggcattgcattcctagccacccgaattcccgtgatcccaccattcttttcctcctggaaaattagttttgacaaaacttcactgcataatatgaaaacaaagacctctcttaggattgaagggagcaactggtgcgccgtttaggaggatagaataactgacagtacttatacattgcataatcagcttgcagacgtggttgttgaatccattagcttttaggactcggcttatgaagccccactccatctgatcgtaagccttattcatgtcagttttaatcgccataacccctttcttgcctttcttgtttttcattaaatgaagaacttcttgagccatgatagtacattcagcaatccaccttccagggatgaaggccgattgatatggagacacaagcctatccataactccttttagctgatccgtaagcagcctcgcaatgaccttgtaccaaaaattacaaagacttataggcctgaatttttcaaatctgtctgcaatactgaccttaggtatcaatcatataaacgagtggttgagctgactgtcaatctctcctgtaaagaagaatttccttaccatttcacacacttctttgcccactatgtgccagtatttttgaaaaaatattccagggtatccgtcgggcccatgagctttgagagggtgtagtttaaagaccacttccttaatctcggagtctctcggaatgtaaagcccgcttagttaatttggaaattatcagttgtttatgatttttttatgaaattatttatagctatttaaataatttatactgttatttatg

SEQ ID NO: 378750 - DNA, 1180 bp, Cannabis indica
ttaagaagaataacattgacaaaagttcaacaaacaaaatcgatgtttaacatgacaacatatgtctaggttaacaaatatcaccataactctatttcaacatccataaaaacaaaaatgacacagtaacacaaatctaaaacagagaagttccctttcccttcttgtctccacctatctcgaaatgcttgcaacgctgcaaaatcatagataacaacaatcagtaaatatggaagaaaacaacaatcagcatagagtaaacacattgacacagtatatagaatgcacagctgaccttgattgcgtgctgagagacatgcttgcaaccttggcactgaagcctaagcacaatcttcttggtagttttggcctgtttagagagattgattttgttaaaaatgatgaaaatgaagctgaacaaatacacagtaatcaaaatgtataaacattagttagtatagtgggtgagaaagatcagtgactaatcatcatgttctctcaaaagattatacattgtaaaccattggttagggcacatttctattccataccacccaaatgctacattatatatagtatttcaacaggaaaactaataaaactacacaatatagcatcataggacataaaatttaaagagtgcgagcagaatcaacggtagattatgttcacaaaacagatacattatcttccccttaacattgtaaatcatcaattagagcacattcgtttaccatcattaacttcactcacaaaaatcaagagtatttaacatgaaaattttcaattttaccttcttgtgaaagactggcttggtctgacctccgtaaccggattgtttcctgtcataacgacgcttaccctgggcggcaagactatcctttcccttcttgtattgagtcaccttgtgaagggtgtgcttcttgcactccttgctcttgcagtaagtcttcttggtcttaggaacgttcacctgtaaaaacatatcacaaaaaattaaaatgactccaaaaatagaagataatataatcaagtaagatccctttatcctaaaggaactaaaaaaaattgagtatttcacattattaaggacgataatctcaaattaccaaaaatccccagatcagaattaaagtttcaagcttcagtgacatttctaaataatcaaatcacaccaaat

SEQ ID NO: 378751 - DNA, 2864 bp, Cannabis indica
agagagagagagagagagctaaatatagatggtacagtgattgagttttgctttacctgctgaagccatggaagatcaataaagatcgcacagtgaggagaggaagaccagcaatagagaaagtgattgtgaaagaacttgtttactagccgaccaattcctccattgccaacaaccacaccatcctcgacctcaataagcttttttttcggcagaaacgagagagatttttactctttccattttggtctcagtattattattattatttttttattaattttgaagaatatttaatctactacatacatctacacgttaaatgatattgacccttaaaagtcatataagtgagtggttaaaaatttatctgtatactataagtacaaaacctatgtcactactatagaattattctatatatatatagtactaaccctcaactagataaggatccttatgaactgaaccttcgagacacctaccacccctcggaacagctatatatgttttcctcttcggcacttcatccgttatatattgttaattttgaaactatttgataccgcaatgcatcttctcggccttctcactatgctattatgaatgatataatctatagattaaatatctataataaataaataaataatatgtaacataccacattaatattttaagttgttaatattttcacatatggtgaagttatttattacaatgtgtaacacctataattatcacttatattaagatattaagtagataaaaaaagtattacataatcttaatttgtaatttgatgaatcaaatcagcatatattaacttaaaaagttgtatttacaaactcacatcacccgaataagcctaaaaattactctcttccaaaacatttacaattagtaatccactctctatttatataagaaaacttctatggcatttgagtaaaaactctacctctaatttcagctttgatttccttaaccatgattgatcaatgttgaacactttggtgccagtaagtgattctggctcgtctaaacataataaacaacagtagcaattactgcagtaaatacattttttcatgccctttcatatattgcttctttagttgggattttatatcctaaataagactcatttcaatataatcttatttactaattaataaaaaacatcaaaaataacattatattgtttacttcacatattactttcaagattatatgtttaatatataaattatattaaatcttgaacaaattgttattcatgattatagtgttaattgtcaacacaatagaaaatagtcatgattatatgcttcaaactatttagtttcacgatttatcagtgcactaaatttatattggcgtgataatcagtgatgtagcttacttacacttgtataagttgaataccctttccagggtatcagcaaagtaaacttgtatcagatgtattggttataaacttaccactatatcttttctagttcaatgtcacttacttgatcttaggtcaaacgatatcaatcctgagatgattatgttttagcctaattatgctatacaagttctttgatttgttcgttactagtttccctgtaggactagctcatacttacatcttaggaatttggtattgtaattgagtgggagcgttaatcatagatatagatgttaaaattattggtgtcacaattgtatatataaaaatgtgtgttgggtcatcaaataaataagtcaaatttatgctattttggaataaagtttatgaattaaggggatgattgtaatgattttaatatgtggataccataaggacaatttctattttgatgagggtcaaattagaaatagtcaaaaaggattaatttactgtttattcagttattaataaataggcattggtttccattttttatttttggcatcacttcagataattattcttgaatccccatcatcaagaaaacttaggttccagagagaaaactttgatgtaaaaattagaagatcataccattcataatcgattttatggactccggtacgctttcgctaatctataattctattatttaattctcataaattaattagggtaaattaagttttacagtgttcttaacatgtggtatcaagagcatccctaaattaattcttgagactttatggtattattgatcttttattaaattatttgtgtatttgatgattgttggatatacaatttattgattataatcgttcatgtatatacatattgcaattgaaagacatttgtcgtaatttatttgtatatgcgatgcgattcaataaaaaaaaaagtttgttgcgattatataagttcatgtagtttatttgtcgtagttttgattataaatgtttctctaggactgaacatatataaatcagttgtttaaaaaaaaaagagaaaaagtctgctgcgattcggtatatgcagtttaatgtttacattatatatgtgcttctttttttttttctttcttttgcgagaattcatgtaatgtattcttgttttattattattattattattattattattattattattattttattaagatatataatggttttaattataataataatacagtaacaattaaattcaaattttagtttaagaatttattaaagaaatttaatatttaattaaattaattgaaacaaaatatcattaaagtgatctcttttgtgtaatttaatttaataaaaatataaagataattatgtgtatgtaattcataaatttattaactaacccttttatgcatggtgataaatgtgtgacaattataaggtattaactgttgggttttgtgccc

SEQ ID NO: 378752 - DNA, 5959 bp, Cannabis indica
ctactacatctcttaatgcgtctgaaaatgaaatttatttaagtttaaatacttggagaaaatggctgattgaattcgaatcataatggtgttgtattctatacagcacaggattaatttgagcaatggaattactcatgttcacacacttgaattttaacattaacattacccaaactgaaaaacacttcttgacaaccaaagatcaagattgtcagattttgtgatgttgtgattaaaatcccaagtgaaatactttcaggaaaaaaggaatatgttcactattgatgctggaaaattgtaatatttaccctggcacatataattattatcttttgctaaaatatataaatatagaattccgtgattgaatttgatgagattatgaaaacttttgaagagtgtttgtactaaagacactccaatgagtaatcatacgtgcactccatgacaacaattactctcataacaattaaaattattattattatgcattgtaatataaatattgtagtaaaggatttcaatttaatatacacccttctcacgacaacaattaaaattattattataatatatatatttatttatatattagagctaaagctcctaataactaaaacaaaatgaaaaatcaaagtagataagaagtgatatgcataacgaccaatactatttattaatttacaggaagtcaaagtcaataccaagtgagatatacgtggagaaaagaaaaccatcaatttgctttactcttcatatatcctatattattgtttattgatcatcactttcatttgcaataaacaattaatcacactcatctatggctgatgcagtgatctctgttctcctccagcagttgacttcagtcactcaagaacatgtgggagaaaacttgaaactggtcaccagagtagataaagagcttgaaagccttggagcaaatctggtagccatcaaagcagttcttacagatgctgaaatgagacaattgaaagaagaagctgtgaaactctggctggaagatctcaaagatgtatcctacgacatggactctgtcctagataaatggaacacagccattctcaagtcaaaattcgaccaaggagaactaaaggttgggtcttttattctcttctcttgttttcattgtaccaagctaagtccttctgtgattactcatcgtcttaaaattgctaaagagatccaaagcctaaacagaaaactagagatgatcacccttagaaaaaacaggtttggttttatagaaacaagtgatgcttctcttttttcactgaggcgaccaaactacaccacctcttttcttgatgtgcctatcatttatggtcaacacgactacaaagaacttctgattaatcagttaaggctgggagggactgaccaagatgacaaggaactcaaattcattcccattgttggaatgggagggattggaaagactactttggctagaaatgcttataatgatgctgaagttaagagcctttttaaaggtaacatgatttgggtttgtgtttcagacccatttgatattagtaggattgccaaagaaatcattgaacaactcactcgtcaaccccaactgatcactgggttagagttgttaatgattaaatttcaggaatctatcgagggcaagaagtttttacttgtactagatgatgtgtggactactgattatagtaagtggctttcattagaacacgttttaaagcttggcgcaattggaagtagagttgtggtgactacacggaatgaggaagtggccaaaatgattggagatacaagtaagataagcctgagtaaattgagtgaagaagattgttggttgttgctaaaagaagtagcactttcgaacaagacagagcaagagaagcaaaattttgatgcgattggtcaaaaaattgcacgtaaatgcaatggtttacctcttgctgccaaggctttagggagtcttttgcgtgttaaagatattgaatattggcatgaaatgttaacaagtgaaatttgggagttgaaaaatatggaggtggagcttttcaatccattgttatttagttattatgatttaactcctgtagaaagacggtgttttttgtattgtgccatctttcctaaagataatgtttttgatagagatgacttgatccaacaatggatggcacaaggttatttcaagtcaaggaacaatggtcagcatgaatttgaacaatcaggtctggtgtgtttccaaaatttagctacgcggtcattttttcaagaatttaagtatgataattataacttcactcttgaatgcaagatgcatgatatagtgcatgatttcgccaaatatcttacgaaaaatgaatattcgattcaaatcatttctgatgttgaaaagagagttgagttgaacattcgtcatctcaacttaattcatgtttctttggctattccaactttctcaaatctcaagaagaagaagaatttgcacactcttatggttaggtgtgatttagggtgtatggtccctggtgagcacttgagatgtctcaagacattaattttgaagggagaattgatgaaattgccaacaaatattggtgatttgatacatttgagatatattagcatcgattcgggtattgaaattatgataaatgtgcctccaacaattggaaatttgcttaatctgcaaaccttaaagttctttagtcggattaaagaacttccagaagaagttggaaaactaactaacttaaggcatcttctgttaagtgaggggggaactgaaactaggcaaagcagtattgggaagttgacaagccttcaaactttggaaaatcgagatcaacgcttttgggcctttaaaaaaaacagaatgacaatggaggtaagagattttcgaaacttgaacaatcttcgtaaaatttggttggaaggtttaggcagagaagaacacaaggaagaggctaaggaagctcaacttcataacaaaacatctcttgtccacttgcatctgatatttgattttaattcagagatggagactcatgaaattgtacttgaaactttgcgaccacatgaaaacttacaatatttaagaattgaaggatatcttggtggttcattttctcctagttggatggtgtcattgattaatatgagaagcttatgtttgtatgaatgtgttaactacaacaaaatgcctcctttggggaaactcccatgcctcgaatcgctttccatacaatggtctcgtggtttggagaagatgggggctgagtttttgggagtagaaatctatgacaacacatcatcagcagcagagttgttattatttcccaaactgaaacaactccaaatcaaaaatgcagattcattgaaggaatgggcaggagtggtggggtggaaaatgaatggccctttgaaaataatgcctgctcttgagaccttgcaactcactggctgccttgtgctggaaagtttgcctgactttcttgagtcaacaccactgaagaatttggagattcgtcgttgtgatattttagagaatacttgcaagagggagacaggagatgattggcccaagatttttcatgtcccgaacattattattgaaaaggtaaaaaaaacatatataaatgagtaaatattataatttgtttgaatgaggcaaggataactaactgtcatttgtgtatttgcagtgaaagtaaatagatgaagaagaggtattaaggaaagggtttagcccaaatgatgaagactgaggtatgcttatttatttataattatatgactcatattatacatgtgcaacattaattagaacacgatttgtgtgctgccaatattgaaaatgaattctgttggttatcttacctctattagcttcaccttcattaatgtttcagaagatttctttttagaaaatttaggaagctaatgctaacctcttcaaaagaagacaacttttgcttaacaaaaagaattgattattatatgaaagtgtgtgtgagataaaagtatatatggggttacataccaaaagcaaaatagtagaagctaagtgctaagtgagaaaactattaattaatgagttataactcctattttctattcctcttcaatattcttttttataatcttcaaaaaattacagtttttttaggttcaaaactattatttttttatatcttacaaaaacagaggttgttttgcttataaattattacaatgacaccaactttcccaaatgttttaaatgatcaagtataagtaagtagcacaaatttgaagatgatatattttgagtatttgactagattaggatggcccctgcacaaggatgacacgcacaaatcgagaaataaataaagaagaagaagcagaaacttgctttgcataatatctaatttgacatgtaatctcttatgtatgaattagtcttttatatctgaaatttcttcaaaagaagataactttgctaataactaatataattatattacttaaactaattatatttttgagtaaaatggacacttacactaatgatcagtatatgaaataatggacactctctgaactaagtagtgtgagataattagttattataactcttatttccttctcttcattattctgatttattagatcttatagagacaatttggcttaagaattatactttgaactattgcaacaaccaatgcaaccattattattaaatcattttgacactataataattaacaagcttatttcatttttattattgttatcataatattaacttgcacactcaaatcacacattattaaaagtataattatgcctatcattatgtattatatatatggtctatttttcaaatccataaacctcttaatgattttgatcatgcatttttttaaggaatacttcctgagagatgaaggcgtatgacctcttgggctccgccgatgaactggccaccaatgaagatggcgggcagagtaggactgcagccgagcagggtgagcgcttgctcgatcgccctgatgctgctgctctctattgggattttgtctagctcataaactgttgggttggccccaaagctataaaacaaggactttatgctgtggcacatgcaacaactgcttctgccgaagatcaccaatggactatcggataccatccttgtcaccatctccattttttctcaaaacaaagaaaaatgattcacaaaccgatgtgatgatgatgatgatgattataagtagttagtatatgttaggactttttgttgtggtaaaattaggtagtactgtttgtgctttttgtgatgggggtactcattattattataataattgtagcacctacataaagaaagatctatagagatcaattccaaaaagtttgatagtgaaggaattaaagatcaaactttgatagcatattattattttggaaaatttatagtacatccctttaaaggtatattttagtacacttcatattctttaaacatctatagtagtttggtaaatcgtgtatcttgtagttatttaagattactcgtaaaattttaaaaaattctagatagtttcaatgttctttttataacaagcgtgataaacaactatttgaatcttattttagcaaattattttaatttttttgaaaattataaataattataacatatacaatcataaaataacaattatatttaaaagtttttttgatgccgaaacaattaaagagtgcactataactataacatatacactcttttttaggagatgtactccaaatttttccaaaagtttagaggagtgcactacaaatattttctattatagctagctactaaacaaatgtttttcacgtatataaaaaaaatatgtataccataataaattgtttgaattttatttgaatattattatttattttaatt

SEQ ID NO: 378753 - DNA, 2168 bp, Cannabis indica
aaaaaaataaaaagaaagaaaacaaactaactgttttattaaaggattaagtaataaaagagctttctaagattatactcttggtctttccaggatattcgaaaattctgtttaaataatgctcagttgaatttaccagtatgttttccaggaattagaagcatttctttttgtttataaggctataaatataaaccatactaatactcaatacatggttgagaagtaacataatcaagtactgaattgcagaggaagacaagattaaagaacataaaaagtgcaaagaccactttgctctttccctttgaccacagctatctgctatgattcgaatccgaaatgctatgttttaagccacaaattggccagtttccaggttttgaatatgatatcaatattataattgcaaataatcagagacaatcagaactaatcaaaggtgttttgacttatgataagttaagtctcagctgcaagtgctcttgaaatcttcataagcataaaacagattttattaacctaatataaaaggaaaaagaaaagtgtttttttcacacaataaggttttaaaaatatataaactgacaaaccagcactctaggctgatcaaaactggttagaaagaaaaagataaggctcttgtgttctaacattcaagagttgaaaagctatcttagaatttattaaagctgttacaattctaatctttccagaagacaaagccaaaaatgaccacatttattagaaattgtgtggattttcaatactattattatgatggaaaaccatgacaacaacatagtgaggtgtccatactcgtattgatatgatttaaactgcaaattctccgagtacccaattaagtacaaataacagcaataaaacccagatgataaaaaaaaaatcaacacaaacagaagcaccgtgacattcaactaaacatcagagaaaatacccagaaatccttttcacgaaaagatcaaaacttgtcaccaaaaatgcaaacttttcacaaaggtccacaaagttaacaacaggttaactcatctcatattatcaattcccacaaaaagaagaataatcagcaagtaaaactgtactaagatgaagagaagagtgacttactgaaggggtggaaggatcagagggtctgagttggctaaagttgtgggggttgtaagagggccagtcaccgatcatagaccccatgaaaatgctggttttccttaaaagagagaaatggaagtgaggagaaaacacataaggcgattctagaatcagtgtgtgtgagtagtgaattgagtacccttaaatttaccaatgcaaccaccccaagaacagcccacactctcccaaaatcccacccaagaaaaacgtagtgaggtgttgggtaaactgtcaaaattggaataacttttgtgaaggacagcaggacccactccccatgctgctctatcatcactctcaataaccctcttcttttttggcctactcatttgctaatatggtacataccaaataccccttttaagctttgtttagggcttttatcatctaaagtaatcatatgtgttgcacataacacaaaattgtaaggatatgtgcattgaaatatgcaccatgtcacggaaataatactatgctatattgatattggattatgctatattggcattggatgtaatattttagatcatatactaatttttaacctttttttaatttacgatttgggttgttttagtagtttttatgtaaattattatgtagattttggttacaattttagttgttcgaatagttattatatggatttacatgtgaatttttataaaaatatatataaaaaaaactaattgaaagtgtaaaaataaaaaaaaatcatattttaatgatgtttaccgattgagtggtctaatgacaaagtgcttacttaagtttttgagaacattattagtctagccaactttgacattcatttctcaagggtatttatgcacctaatgctcaattggggttcatttgatgcattcataccatgggcgaggcaggatcgaccttgaggagcatcaacatgttaagtctgtgcttagggtccatctaactttcgggccaaaattttttttcctttttcaaattacaaattttttattgattttgaaaaa

SEQ ID NO: 378754 - DNA, 1637 bp, Cannabis indica
attcttatttttacgttttcatttctctcaactaaaagctatctaaaggaggactagagccccatactcgctctatcactttcttacatatattatatttaagatattaacagaatctcaattgataaaaatgaataaaaattacatttatactaacatttggtacggctaaagaaagttattgagtttttgtgtcttacaaactcaaaattttaattacgtatttatctgtattatataagtatgttttgtgtgtgagagtttgtgtggtggtgtatgtatataaacaaataagtctcattctcatcatcatctacatgtgccattcccgtgcaatgcaatacaggtagttagattgagacctttgacggagactcatttatattatctttcaatattatatatatggattggtgagattttaaaatctgtatgaaggtctaaactgaaacagggtcttcattcaattaaggttgggctaaatcttttgccctagcaggcagcagctaccatcactctttttctcttttagcttaatattaaatgtcaaccatgggtggttcctaacctccaaataatacgtcactatctacatattaattattacacttgataaataagcttttatttcaaccctcagtcaaaacaataataaggattgctttcaataataataataataatttatctcatctatagttatttttgttagaagaaagggatggttaataaataacaataactatgaccgtcaatggaggaacaaagtaaacacaattaatatgaaataagatgatgatttgaataataagagaatatacatttaattcaaatcctataattctaaactacgcccgcttgagcttctcattatttatcttttttacctaattgaagaaaaaagaaatcctaaaagttaatttgttgcccacttgactatagtgttgtcggagcacgatagtctgtcacgacatgagcctaggaggcatgcgagcacgactcgacatagaacaagatgagctttgaatctagtatgatacaaataaatatgagcttcgacatgacagtaaatatatgggattaagtacggttcaaacagacatgtatgaaatcataatagataaacacgaattatatccataaatatatattttctcaatgatatattcatattatttatgtttaaaatatacaatattatttatttattatttaagtttaaaaaataaaattgtttaaagaaaaggcaaacatacaaaaatttgggcttatataaaaatagaatcatatttaggtccgtattcaagcctgtattttgatttatcaaagctccaaacaatcccaacataaatattttaggctcatgagtcggtctgagccgtactctcaaaatatgggctaacccaactgttggcaagagtagcgtggcaaggacgatgacatgtggcacaaagttataagagaatgaacatttgaggaggatgaaaaatcacctttatacaagaaaaaaaaataccaagcacaatgtcaagacaaagggtaaaagactaagggaaagccataaacactaagaaggcgtttggttgggaggaatgaaaatataggaataagaatgagaatgggaataggaataggaa

SEQ ID NO: 378755 - DNA, 7898 bp, Cannabis indica
cgattctaactcaccactttcaaagaatcgttgaacaaatcgagtcacatctactttaactgtatcctaacatttttgaaagaaagtcaaggtcaatttccacttaggtgagtttggtagaaatctctttttgggcctgaactatagaatcctagaagttggtcaacagatttacttcttgctttaggttgtgaatttaaggtctttttcgttaatctcctccttcaacatgtcttccttgagagtagcacttttttctttgatctcagcctcctaaaattttagcctttagctttcaacagaagcatccaacaaattaacttgagtcttgacatgttgatagctagccttatagtcatcaccgcacttctgtagcctctagatttcatctttataaccagctacaacattgtctatggttgactctagccttgctttaacttgatgcttcagcaactcctttgattgtgcttgggctttcttccattcagccaaggtttcctctctctttcactctaaggcatcttgttcagccctaaaggtcttgagttccagagacatcttaaccactgctttagagcacctttctaccaacaagttccctggaagatataaaataaaaccaattgacgacgaagagaatatgcaagaaaagctagatcttcactggtcgttgtaacccatctctatgctcccatccaacaataagtgtcacctattttctctaagagatctacaataaacagagccaaatcactttcaaccctagtctaaagcttctcagagatggctagatgatcaataatcagattaggcgcattagatcccacaaccaaatcagttagttcaaccttgcatctggtggcaatcacgttagtcctctggcggatcttagcttcctcaacctcaatcttcttttgtaagaattgacctaactcttcaagttggacatgcttttcctctaacaattccaatgaccagtctggaagagttaagctagttgaaggaagtataggaagaataagatttgcgaaaggatttgaagatgtacgctaaaattaggtctagcatcccgggacttgggatctaaaacctttctattagtacgtgagattttccttggcttctacttcttcttcttcttcttcttctctgccctcttctttttagcttctctttgctcctccactctccacgcaacttctcatttttacggcattggtttaattgctggaaaacctctgcctttattctcttgccctccgtatcgatgttagatcttggcctctttcgattaaatactattcattcaccgtcttcttcatcatcttcctcaacagtaatgacctcagagtggcaagtgtatcctgttggaaaggttccacttaaagagtcaaagccatcgcaacttcttgagcatgagcttccaccgcagcctctttggtttgggatccttaaataacgtccaggactacaacctctagaatagcctctggcaaattgtctggaggtgttgattctttaactatggtctgggaagatgttctagacttgcctctttggcctctttggacccaggccccatctgggcggtctgggtattttctacaagaagatcacaaaagttaaaacatatggaagcaacaaaaacaataacagtaaaataatttgaaagctaagtctggatccaaccattaacactactgtattttggatccccacaagaaaataaagagatatcctctttgcttaagaagctaccgtattggaagaaccctaaatacttcagcaagatgaatgggtctactctaacacattaggaaggcaggaggaaatagttttggctttcaactatgtcatctaccctatcataataacgaatcataaggtatctatggtggtatagttctaaaaaatatggatcaaagcctccttgataaacgtggcctgcgtcttctagatttgaggcacgaaataaacggaagggagagttgcctcttccagacatgctggcacacaaagcacctctatcaggaataacttcagatgcagcctagcccactctctaagccattgcttgtccttcttgatggtcttcctcgcctcatctgcgattatctttgcaataactttcttgacctttggagcatcattatggacatcacgagcatgacaggcatcaatgccctggtgaggagtaagtagaacaacttgcctaaggttggttgtagggaccagtttctccacctacaaatcttccttagggaagcctttatacaaagcctctctctcatgcaagaaagaagtggttgtcagatgtgcagtattgtctaaaaaaaagaaaaagaagtcctaattagatttttcactacaagattgaatgaaaagttggaaaggagaaaagggagtcatcacttactatgctaaaattcaaagacaggatcagaaccctcttaaacgaaaattcggtggtgaaaaaccaatagtcctagaagtcatgtgtgtattttaccgtgttggtcagacatattagcgttcaatattgtttctcgagttggtcaaccttgctcctattcttccacattgtattagactttactcgaaagtaaatgatttcctccaaggataggactttcaccttcatggctcaacacaggatgaaccaaccaccaacaacttgaaacttaagggatcacctggaaggcgagatccctacttccgcacagaagtacatgaagtaacttctaaaaaggaagatgagctccccatctccttagatccaaacactgaaacaattagcgcattgacatggaaattcccccaagatggaaagcttattccagaataagccagggatgttcttgagggctcgttatgttgatccatctcccatggagatgaattatacactactcttagagctgtaatttcctcttgttccaaaattttggcctcctcgatttgagcagcttcacccataatagaaacttaaaaagaataaaaaaaacaaacaactaaatacccacactaaagaagataacaagggtatgggagagtcctcctttatcactgcctggagaggtccccaccggaccctacatccagaagcaagattctcaaagaacattgttccaaagtatatcttccagaaccataagaatcccagacaaaggatttaaaatgaaacgcatatattgctgacatttggctatataaccataaattcactaatgaagacaatatttctaagaacctaacaatatttacaaatagtatatgtaaaaggtctctattttgaaaggatgttcataacttccccaaatagctaaatcttattcttttaactcctagagtgaacatcatcaagtaaggaaaaccaaattcaaacattgtttagaattttagatacttaaagatcacttacttgataaagatgaagaacttaggggtggtggaggatttgaataggaaattcgaacgtcgtgcatcggtcttaaagatactcccaccaaggaaatttggtcaaggtgcacaagcctagtattaagggaatgagaatttattaatgagcgcttcgatctctgcttgaagatccagtggtcatgatagatttaaagagtcaatggttaaaactgggggtggcactcctgagtattcacgtgcacaaatctgaagaagaggacaaagatactagttgaagtaatggttcattctctaaaaatttgaatgcaaaattaaaaataagcaaaagtggtaaacatacgatttctacgatatttatagtactgaaatggcgatctacgtgtccttaaatcaatggctcaaattgtatccaaaaaaacataaaatgcattcgacggtccaaaaagctatcaaatttacatttgattcattgcctggaaccaagatatttgaatgataatatttgcctcaggataatcgctgacatgatcatctgtcggttttttgcaaatccacgcttcacacacctttttagtaagcgtaatttgcatgagcaaatgaaaaaattctacatgtcgctccatttcaaaaagcaacaagctgtcaaccacaacttttctacttagaatttaaaaaggtttccaccgttttagcctccacatggcctcaagccatctaaaaggagactacaagcctctaaaaccctaaagttctgaaggcttagggataaatattatctgtgtttttgtacagaagacacgtgtaattcgaagatggtttagttcagctacaaataggtctaaatgtaggcctagccaagataatggattgcatccattagctaggtcaagccatctagatgatggatgaagatctcgtctagatgagataagcatccagcataacatctctctagataacatcaagtagtgcttcagagagagtgcttaagggacgttcagatatctagctccgtatctcacttatttattatcaaatcccataatatcaagacttatttccaagatcatgtctgagaatcgaatattataagtaaataaatggagtaatcatcaatcaagcatttatgtgtctttattattgacaaaggtaggacatgttttgacaactatcaacatgatgtggaatccacgttagtagaagataaaggcctcatgggtcgggcttcaccaaagaaacctaaagtcaatatgttatttatttttaccccactagtgggcaagatttacatatgagaaccctaactctataaatataagaaaactcattcatgcaaagggttaaaatctagaaacttgggagctaaggaaaattctaaggttcaagcacttgacaaaatacttatgtaaatcaaaaggctttttaagcctcataataatattgactcgtggactagaggtcgttaatccttgaaccatgtaaaaactcctgtgttattttttgtttttgatctatttcattagctttattacattatatatcagtttctaaaattgtaatgccctacttggttaggcgcgcttcagtgttttccaaattactgtgccaaccttttcttatcaaatagattagtgaaaaatgtgattaatttaaattttataaataacataaactttactgaaataaacatatcttttacaattttcaagatcatgtacttaaactcaaattaggaatcagataagcaaagtaatgcaatgttgtaagtggatcaatgccaccaaacttctcggtggcctctttgatcttgatgaaaccatcagctttgtctagaaactcttaaatagtgtacactgttttgagtttcaagttttgccataatggactcatagtagcaagtcctactgccattgccatgaatttaatgtcttcactgagtaccctcgtctgagtggatgcctctaaaaatcattatatataattcttttgaggctcatcttactcttgcttgatacataccaaattgttgggcttgattggtctttctcttgatggtgagaaattgtcatagaacgctcttgcaattgctccataataattaatagatcctagagaaagcttgatatactactgatgtgttgttactaacagggtggatgaaaagacttaacatcgagaatcatctcaaacaccttgcagattgatctgcactttgaaattatgtatgtcagaaagagggtctccctttcctacatacatactccatttcagcatcctgatcaagatggtcaatgcgatgacccttctcgagagtggagatagcttatctctattgagactcatgtctacgatacctctcgaggcagcaaggtctctcaccaactcatgtaagctatctaaatccgtgtgtgtgaccttttgggaaatatccattagttactccacctgagcaactacttcatcttcaacaagttactttggctgagcaagtggttggtcttcactgcctacatttcaatgagatggaatggaagctttaaacacatatgggtctcgatgattcttagaatcataccgacttttcttagtacaaaaaccatcaaattcctcctctctttgcctcttaagaggatgcgctatttgagggttaatgagcctaagaacttgtccgatcctaccctgaatgaacatttgagagggttgagcttcatactatattttctcagtattttgaagtattcatccacattctctatgtgcccctagcctttttggacttgacaagcatgtcatctacatataattccatgttttgtccaatctaatctttaaacattcagttgaccaagcactggtaggttgctccagcaattttttagactaaatggcataaccttgtaacaatatagaccaacatctgtttggaagctaatgtgttatttaattggtgggaacatcttgatctaattatagcttgagtaggcatccataaagcttaagatcatgacaagcaaaagcatccaccaattgatcaatcctaaaaagtgggaaacaatcctttgggtatgacttaaataggtcggttaattctatgcatactcgccatttactgttgggttatgggatgagcactgggtttgatacccaaatcaagtaaaatgcctttatgatgaattttttagtttagggtttttccacttcctctttaagagtttgggctctttccttgtcaagccgcctctgtttttgatgtattggtcagaagttgcatgcatcaatatttaaggcgtgaaagattacacatggacagattctggccatattattatgcagccatgcaaatacattgaggtttttccttagaaattcaatcaaagaaaattttatttcacttggtaaaccttgccatatctttattgttgtggtcggcatggttggttctatctctacgtcttctagttcatccaccaaccatattctagtatcaggtcctcaaatcagagatcaatctcattaccccaccttgagcaaattcatatttgttttcaatttgtttggcctttgaactttggctgaacttgtcttccttcttcgccttagtgagcgcaatgttgtaacaccaacgatttatccactggtctccttttatacatccaaacccattttggtagggaacttgacacaaatttggtagatggaagttgcatttttcaagtcatacagatctggcagtcctatcatgactttgaaagtcgatggtatgcctattaccaaattgtgccttcattgtgctactggtgggcattctccctatagtgagggggagacagatgacacctagtgatgcaatactttggcctgaaaaaaccatagattaattgggcacacggaacaaggtctttgatccggaggcctatcttctcgtatgttgttttaaagagaatgctcgatgaggccctgtcatagatcatggaccgtgttatagtcatgttgtctatttacacttctacaaccagtgaattgttgtgggggtagtgggcgtgtgcagaatcaggatcgttgaacaatacatttatgtcatttgggcatggttgtttagaagttcattaatccacgagtaataccttctagctctgcttatattagagcgtccgagcatacctttcttgtatccccaatgatatggggtcctcttactattacgctcagatgcccatccataggtggttgcattaggcaattctggccgttgtctccttgctgagggggtctctgattttgattggtcttcacgtaccgattctattggaaattatttcttcgaatgaggaacttaatttcctccttcaagttgtcacatacatttgtgacgtggccaaaatccaggtgaaaatgacaaaacttggtggtatctgttgcgaaaattataaacactacgcaagtatacgcaatcaagtagtaaactcacacaggtg

SEQ ID NO: 378756 - DNA, 5890 bp, Cannabis indica
atatactttaaacaaagcaactgtgcaagataataaactaaaacttactcagcatgccttttgccgttagcataaaaattcctttaaactataccatcagaaaggttccaaaactgaaaaattccccatgagccgactgacaaggctttaacaattaagtatttgcacttgcttaaagatgaaggccagttttcttgttttggctcctctatatatacacacacttcttttggaaaaaatcaaacacagcttaaccacattctaaatgtggtgtagtttattcaaatggctccaacttctttcttctaccttatttttgtgctcagcttctttcttgtcatcgcatctgcctctcaaactaccaagtctagcaatttacagaactacatcatccaagtacgccaaccaaagggcagagtcctttcccaatcagatgacttggagagttggtacaaatcttttctgccagttagaactgctgcaagctcagacaacaagcctcatattatatattcataccgaaatgtaatgagtggtttcgcagcaaggctgacacatgatcaagtgagagcaatcgaaaacaaagatggttttgtatcagcacgccctcaaaagatattcaagaaactaacaacacacacacccgacttcttgggactgcaccagcagacaggattttggagagagtcaaattttgggaagggagtgatcattggagtactagatggtggaatttttccaggccatccttcgtttagtgatgcgggaatacctcccccacccgctaaatggaaggggaggtgtgatttcaacgtgtctgagtgcagcaacaaaataataggtgcgaggtcattcaacttggcagccaaggcaacaaagggaggggcaactgagccaccacttgatgaggacggacatgggacacacactgcaagtacagcagcaggaaggtttgtgaactatgcaaatgttctaggaaatgccaaaggcacatcagttggcatggctccttatgctcatttggcaatatacaaagtgtgctttggagaagattgtcccgacatcgatatactggctggtcttgacgcagcagttgaggatggtgtagatgtgctctcgatctcccttggtatagaaccaactaacttttcaacgacagcattgctataggctcatttgcggcaatccaaaaaggaatatttgtaagttgctcggctgggaattctggcccttttaacagcactttatctaatgaagccccttggattctcacagtaggagcaagcaccatagatagaaaaatagtagccacaacaaaactaggaaatggagaagcgtttgatggtgaaaccatccacagaggagactttcctccaacatattcacctcttgtttattctggcatgaatggcaaatcagagtctgcattttgtgctgaagggtcattgaaagatatcaatgtcaaaggtaaggtggtagcctgtgagagaggagggggaattggaagaattgccaagggggaagaagtcaaaagcgctggaggagctgcgatgattctcttaaatcaagaaaccgatggtgttagtacagaagcagatgttcatgctcttccagcagcacatgtcagctttagcaatggactaaagattaaagcctacataaactcaacggcaacaccaacagcaacactattatttaaaggaactgtcattggggactcatacgctcctgttgttgcttctttctcatcaagaggccctagcctggctagtcctggaattttgaaaccagacatcattggaccaggtgtcagcattcttgcagcttggccattccgtcttgacaatgacacaaatccaaattctgctttcaacataatgtccggcacatcaatgtcatgcccacatctcagtggaatagcagctctgctcaagagctctcacccttactggtcaccagctgccattaaatctgctataatgactactgctgatgttgtaaatctagaaggcaaagccattcttgatgaaacacttgcccctgcagacatcttcgccattggttcaggccatgtcaatccaacaagggcaaatgacccaggactagtctacgatcttcaacctgatgattacattccttatctctgtggcctaggttacaaagatgaagaagtaggaattattgcacacagacaaataaattgctcagaagaatctcctatacctgaaggagagctaaactacccttcattttctgtcacactaggaccatctcaagtgttcacaaggacggtgaccaatgttggtgatgcatattcaacttacacagtcaaggttgttgcaccagatggagtctatgtgagtgttaaacccaaaaagctttacttcacaaaagtgaaccaaaaagcacaatatgaagtgtctttcagcaacattgcttcaagtgggaaaagcaatgcctatggtcaaggatttctggcatgggtttctgtcaaacacaatgttaggagtccaatctctgttaaatttcagtaaaaacggatgcactgcatggtaggcaaacatagatttgcactgcctctattaaaatctctaagaattatattcatcaagacgtgtaccatctaggttcataatattcatttctataaagagtgtgagcagtacgagtaatttaacagaatgaagaagaaaaaggtttattttatttccactagcatcaccgagatggaagttcgaatagacagaaagtaaataaataaataatctacagaaacgaaacatcttactagttactacttctttcctactcaaatgaaagatatagacgtctcgatatcacaagaaatttcaagagtactacagaacgtagctacttagtcaggcacaaaactagcaattacaaacaagcatctctaaacccaatttatgcaccaaaaattggtaaaacctaagaaaaacaggtttctcgcttttctccctcataagagaaaaaaatcttaagtcttccaaggatctagtacttctggcaaatgacagtaggggcagcatgaattttgtccccaactcatattgaactattgattcagtttttcctgccttcaatcataattccatatagcagtgagaaactaacttcatagaggatgacaaactgagcaacatgctagtccatcatccaaaaccaggaggcacatcggggtcctcatcagtacagcaatctggtttctggtattccttaccaacagataaagtgggtgactcaccatgatcaacatgaccacgctcaagcttctcctgtaatataacaggccctccctgctgatcagccacctgtcttttttcatggcgtaaagacggtttcagatccttaatttttctcttcaaatgtttatgggagactgagaatccaggtggttcgtgtgaatcattttcagacaacattgctttactggatggaacaagtatcaaatccttatcattatctttcttttgaactgacagtatctgagatgttgaggattcaacctccactttcacttctgggttcgttagtctgttgtagacagattgaacagtctctttaatttcacttttaaccacatcatttgatctaataattccccacagcccctcagaaatctggttcattagttcgtccctaataataaaagaacatgaaatcattcacattcatttccatttacttccaagagaaactctctcagaacttaaaactctaaagggcattatgtaaatgcttcaaaaatgttaaattgaacaatgaaaaaacacaaaccccaaagataatctcaagaattagacagcatacccaacatcttgataaatagcatccgaaagttgccttggtttcatgatctcagcacctaaacgattaagagcgggcgattgcctcacaatagaactcattttttcccgcaattcgacctgtaatagtaacagatcctactaagcctttccgcatttcattcattcataaaatcatttttaaatataaaaagtaaagtttcgggattcaataaaattgagaatggtagacagtaatttagaaccctaaaagagagaattgtttacatggtccttaagcttgcgaatgatattgagacggagcttatcaaaatcgccgtcgtctttgagcttggttatcacatcgtccttggtaacacttcgatttctgtgatcgcaatccattattctcttctccaaaatctcccttttaccaaactcactctgtttcgacaatttatagtgttaatcactccaatggcggcaacttatttattgggtgaattcagcataatacaaattaacatttgctaccaaaaaaccaaaatatatatttatataaatcattgcaaaatatattatttgtttattgctttcttatgctaggtaagagaaggtggttaagtttttttcttaaatattaaagttaaaattgtgtttaataatattttaattagtttttataaataaataaaaaaaaataaaaatattttttaaaatcatgttctataaaattatatttttaatttttttaattgagagtcaaaattttaaaaaagataactatatgtgttttgtaaaaattaccaacaaaacttaataataatttaatctagacatgttgtgacaaacctgattacattttctgaatctgtttgtgttaaaaattgtcttaaagttggttatattaaaaaataaaataattaaaaattgagctcaaggttctgtgtttactattttgaaaaatataaggtctattttgttatttaacaaaacaaaatgtccaattggtaacttttgcaaaacacagggtctaaaatggtatttacccttttcaaattttttgaaaataataaaaaaaaaacacttttaaaatctttttaaaaaaagttttttttattaatactttgaatgcccactccaacctagaccttataactcggacccggacccggatcctgatcccggcctcgcacgatttagataaaatcaacaaatgaaaataaaaaataaaatttacagaacatacttttgttttgttttttaaattgaaaaaaaaatgttataaaacacattttttaaaaaaaaaatacttttatttttgtcattaaaaaatttaaaacaaaagtgttaccaaatgtcacctaaaattatagaacttttataattttttacagtaatagtactatcttttgatagtattgtgttcaggaatatcaaatttggaggggttctcaggataaagaataggtactgtaaataatacgtgaaataataaacgagaaaaatcgtctgcatcaaacaacatcatttttaacgttatacaataaagttgctcactcaacgatccaagtaatacgtaaagtgtttttgagcaagaataaacccttaaaaagcctggcaaaaactcttatcaaacctatacataaaattacttctaatcttatatcctttcaattaatgtaaagaattttataattaagtatagttaacccatgaaatacctatgttattagtaatttttttttcagaactatataattactaacttgaatcaataacataataacctaatttgtacaataatataattgttttattttataccgtaagagaagcaattgcacaatttaattggtttctctaacaatcacaataaattgctaatgaactcctaatcattaaatatcccataataagtttattgtaaatcattaaatagtttaatttaaatagtacgttccatatacaatgcaacatatatattagggtaaatagcagcataagtacccaaagttttgggtttgtaagcggcataaacccaatgattttttttagtggcataagtgttaggttttatgccc

SEQ ID NO: 378757 - DNA, 1496 bp, Cannabis indica
tgtagatatctaatgcctctagccattcccaaagctattctcactctttcatcccaatgtggtttcatatctgatttgaagagaaatttcgatagtgatccatggctcatgtaatcataaactagaagcttatttgatttttcatgacaataaccaatcaaacgaactagatttttgtggtgagttctaccaatggatctcatttcatttaagaactcaacatctccttctacagcaactttttctagtctttttacagcaatggctctttccccatatgggaatcttaagtttcctttgaaaaccgttccgaaagagcccttacccaactgttgtgcaaaggattttgtagctatttcaagctcattataagtaaatgatctaacagccaatacttcatctacaaaaatggcttttttactagagttgaaatgacttttccaaaacagaaacattgaaatgaaaaggataatgatggaaaatactatgcacacaataccaatcactaagatatgcattgcctgacctttcttgacttctttcaatgatggggtgtcactgtaattttcattacgtactttgacaatggttgttgctgtttcaccactttgtgaatcaacagctttggagtatctcagaggaggaagaagtttgttgcatatgttgttagcaaacaaagcgatttcacagttacaatcatccaaacaatctttctcacaagcaaacttgttgtttattggaacagaggaagagtttgagccattttcccacaaaactccatccaataccttaaccgaaaacattcgtgtgttgtgatcattatcactgttatccattgtgcaataatttatgttggtaccattcctttcacagcctaaacttttctggttttgattaatgaaatcaaaaccaggaagacatatacaattgggttcttcattttgaataagatcacaatatgcattattaccacacaagccagttggagcacacctattgttagttgaattccatttaatactccaactgctgttattaaacaaattgtgagaatataatcttaatattccatctgcatcaattgttagacgataagtaacattattaatcctcccattgagtaaatctgcagcatgaattgtctttatgatactcttacttgtagaattcatcaagtctaattgaccattaaaaatcaagattacagaattgtgttctggtttccatctgtactcgagtaccaatatgtgtgataagctaaaaacaccactgcttgttggacgcagtattagattaccatcggcctgcatgataacttgaaatcttcggacgagtgatttgtgttggaatcagctgagatgagaacttttcctgtctctaaacgctgtccggacaaaatggtatcggttggatgtttaaagctctgccatatgggctcggaatctgagttgtagaggtcaaaaattcccgaatcgagcagtgaagctgaggcagca

SEQ ID NO: 378758 - DNA, 4215 bp, Cannabis indica
acgcttaatttattattcacaaatgtgttttaaaaaataaataaaactgtaattaaatgtattatataatttatgtaactcctattcatgttacaatgtgtaggttaaataaatcataagttatataatttaggtaccacactttaatatatatttgtcaactaaaaaattcgttaacataaatgaggtttgataacctctacaagtagcattgcttctgagccgaatgctaacgaaatgggatatgtctaatggtcgtttttttcagttgtcctatgtgctcataaagcttgtgggagttcattgacccacctttctttggctacatcaatttcttcgtaatggaattctacagagtcttattcactacttctagttgaccattctcttgcagatgagctatagacaagaagcttttataatcttattcctcttgcaaacttcggtaattgttcactatcaaattgggtcccattgtcgaatacaattttcatgggaatcctgaagtgacaaattatgtttttaacaacaaagtttaagatctttttttatgtgattgaagcgagaggtttggatccggtccattttgtgaagttatcaatagccattactacatatttggctcttccttgccccgtgggcaaagaactaatgaggtatgttattcgtgtttttagaagagggacatgtgtacttatatgatccaaattcaattaacaaaggcccagtttataagcccaattaagataatagaccaaatttactaagtcgagccatcaagattccggaaagacatctcctccaggcgataagaagagctcagtgaagagatcatctgaatacctatccatgatgcttctgaaaaggtaattaatcaacctctagatgttaaggttgattcggtgcttatttagtaccaaatcacatcacattaggataaatcctagaacttctgagtcagtaatgggctattaactatttaccaaaggataaatcaatgcttagggatagtaagtctacactagatagctttattatagctaattaattcctgctgaataaggcaattatacagttttgaagcataaaatttacctttttttcagtagaaatcaagctctatttgtcaaacttcagtctcagatggaaaattttgtgctaataccagctagtatcagtcgcaagcttgtaattccatatgtctttacccttctaataaattgcattaacctactttacccaaagaagaacatatttttctattatagcccaaatacactttccaagaaatgctctattccaattagctccatttctgaaacccaacccaccataaacgttagggagacaaactttttcccaagaggccacatgaaatttacttttatcacctttgagaccctaaagaaaacatatacataatttcacaatctcccttataatactctaaggtagaataaagatgttcatccaatagttaagcaataccaataacaccgaatgaatcaattgagcttggtctgcaaaagataagtgccttgttgcccagctaagcaatctcaatgttattttcttaacaataggctcacaatcttccttcctccacttggttggtctcatcgagacccctaagtattttagaggaaaagaaccctcttcaagctccaacacctccaaaatgccatgtttaacatcatcagtaaccctgccaaaataaacatgagacttagatatattagctacaagacccaaaactttgctaaactcctcaaaagcctcattgagatgtcagacagcctggatagaccctttagagaataagatttagtcatctacaaaacatagactaatcaagttcacatgcttgcacataagctgagacctgaaggtcctttttaaagcttccaattttagatttctagtaaagtagtccatgatgatcacaaataacaagggagacattggatccccgagtttaaggcccttcttaccatggaaactcccttgcaatcttctatttaacataagagagtaggaagaccctctcaagcaaaccatgatccatttaataaatctagttacgaagttcaatccaatgagcaaatcttctaaaaacatccaatcaaaaatatcataggttttacttaggtcaatttttagcgcacatcttagaaaaatatttttcctaccatagttctttatcaaatcttggaggatgagaatattatggtcaattgatctctatattataaaaccctcctgattcaaattgacaagagaaggaagcactactgctaatcttttgcacattagctttgtaatacacttgtaaatagtagtacaataagctataggcctaaaatcaatagctttactcggcatatctacttttggcactagagttattactgtcccattgaattggtgaggaacagtacctgtttcaaaaaaatccagcacaactttataaacttcttctccaatttcaggccaaagaacttagaaattttttgaattaaacccagcaagcccaagactttttgagctaggaatactgaacatggctaccttaatttttttatgagtaaaaggctgaatgagactaagttgctggttcaaatccagtttattacccatctccaagcactctgacttaacccggacagtagcagtgctaggactccccgtatagcttttaaaatgatcaagaaagtggttcacaaccactgaatagctctcaacccattgtccctaatcattgatgaagctagtaattctattctcctcccttttcttcttcaaacaagcataaaaataagttgtgttgtcatcacccttttttagcaagaaattttacttctctggatgagaaagcttcgaagaatttttttcttgcagacaaaattcaacaactgctttcttctctaacataatgcataaaaaatatctaggattcgaatgagtcacttctttagcttcttgataccaagttttagccatctgagactgaacctcaacctccccaacaaactgcttgttaaacttcctgaacatgtgctttaatctcaacattttataataaatggtagccaaaccaaaactcgtttgaaatctatgtgctctgcacaaaagttatagaatttaaaaggtttaaatcctatattttgcattgtagtagaggacacaataatcatacaatgattaaaaaagtctcccaataagtagcattagagttaggaaataaatctaaccactcttcatttttcaatgcatgatcaattcttgagtaagttctgtctcctccttcttgattgtttgaccaagtgtagctagagccaactcttttcaacatatcagctaacctgagagcaagccaatcattagaatcctccaattcaatagcagttatagtgctcctgccaactctgtcattatagttaaaaactgcattaaaatctcccaagataacctaatgcttgactgcattaaaaactgcattttcaagacctttccaaagtaacttcctctcctccaagaaattcgatccataagcaaaagtcacacaaaaaggagttgtgtgcattgtcaaattcacataacaatgcaatattgattggtttcttcaataacaatcaccctagcaaaccttttcctccaaataagcgaaattctaccttctatgataagactcgtataactatcccatcccttcaacttattacaaaccaactcttgaaccttattacccctcattttgtttcaagaagagccccaactcctatttcctttattctacataacttgagagcaacctcttatttattaagactattgaggcctctaacattctaactcatgatgttgcgacagttcatatcaaagaattgattaaatgagaaccaatttttgacacacccctttttccttgcaacacactaaatgtattatgcaatctcttactttcttcatcctctactgacctaggtccctgatctttttttttttgcctctgagaatttgggatcttttagaagtcactcgaataccctcaccaccatcctctatcctttcccttactccattacttatcttctcagccaacccaccttcctgaacttccccactctccatttttgtaatacccagaattaaaaaatagattagcaaaaccctaactagataattatgtataatggaggaattatattattatat

SEQ ID NO: 378759 - DNA, 4312 bp, Cannabis indica
atatatatatatgcatatacacagaaagagaaactcaaaataatcaagacataaataatgatctgataccaattgttagaaaatttatatgaaaacataaagtatacataatcatataaatacataataaacgaatatatacacgatataagtaaatgattgaaatacctctaatcattgattcttggagcttcaatcccagacaatttttaaatctgcaaaagaaaatgaaactgattaatccggcttccaacctctctctactctcttttgatggatttattattttcacagaatgagtagtgagttcgggaaccgagaccttctatatttatataagtgagaccttccattaaaatctctaccacaattaattattagaatattttaataattaattcagaatattaaattaaaaaaattaaatatttaataaattataatctgaccatatatagaatatcaatcaattaattctgttcagatttaataaatataaaatattcatttatcttaaattatttaattggttttattcttaaaatagaaaatattctaatacaacacacctaacgttactaaagtataccgtgagatattaagatgtatgattaaaaaatatgagattttatcttaaaataaatttgtgataaatatgatatatttattattaagtttttgtatattattaatgtgagattttttgatgttcttcttcaaatatatggtgctatttttgctcatatctttgatccgatcacaactaataactctttttagcttactatcatcgaattagaaatgatcttttttgacttttcttttagattatttttttaatttagatcaaatattgttattattttttctgtatcatatttataattaaaatgtgaaaatatgattaaaagattagactgtaatgtgatgttaagtaattctcaaaactgatagataatatgtggagtagtacttattgtattattaaatttttacaaattaattatgaatgtaaaattctttaacaatccaattggtaatatgtaaatttgctgtaaattatgaaagaaaaatgctaaaaggtatcactagtgcttagtaccttctcttatcatattgatattagtgcaatattgaatctcatataatttaataacttttaaaaaataaccatattaagtattagtggcttggttagtttaccgttatgttagttagtctgttactaacagtattaggaaggttgttaggatactgtttatttatgttatacttttcttgttttctgaatcatcatcatgtataaataccctgttttgggtttcttaatacaattcaattcattctttcctaatatggtataagtcgcttaaaaactctttcacgatcgctgccatggcaagaactcgagcaactggttccaggaactccggccaaactctattgccgaacaattcatccttcataccagatgctcctccaaatcctccgatcattcctccgccctctgctgtcaccggagacatcgctcctcctcctcccaatgcgacaacacgacctgtccatgaagatagttcaagtccatacttcttgaattctggtgataatcctagcctcaccttagtcactcctctcctatctgacaagaattcccaatcatggcgtcatgacttcaaactttccgttggtgcgcgaaacaagaccgtcttcctcaaaggaactctacctcaacctcctgtcgatcatccactacatcatcattgatttcgttgtaaccagatggtaatgttctggatactccattctgtctcgtctgacattaaaagaagcattatgttcttggatactgatgctgagatgtggtgggagctcaattcaaggtatgatcagagaaacagtcctcatatcttcgacctcagagaatcgctcatcactctgcatgaaggcgatgactctgtaagttcttactttactaaacttaagtgcatgtgggatgagatccaagaactttgtccatggattccttgcacatgtgctgcttccatagataactttactttcttgaatcaagaacaggttcttcaattcttaacaggtttatatgaatctctttaccctgttagagcttagattttgctcattgatcccttcctttccctgtccaaagttttctccatggttatccatgaagaaagacagtgaaaactcaaatcccctcagattccatctcttattgcatctactcaagatttcgctaccaatccagctattgcacaaaatccctctgcatccactgccaatgcaaatcaaaatcgcaacaagagaatgagaccttactgtacaaactaccacaaacctggccatttgaaagaaaaatatttctttctcatcgattttccaccagattatggtgacaagaagaaagaaacacgggcagttgccaatcaagcatctacctctactgatcctctatcattcttagccaatctgaataaaccagaagacattcaaaacctcaaatataattccaaaggtgaagttgtacgatacaaatatcgaccatttgctaaaggatacaatcaacaacatggtgttgactatgttgacacttttgcaccagttgccaaattcaatgcactcaaacttttccttgcacttgctgccctcaacaactggtctcttcaccaaatggacatcaacaatgcattcttacatggtgatcttgatgaacaagtctacatgaaaatacctaaaaggtatatacatgagggggagctccctcctaatgctgtctgtaaattaaacaagagtttatacgatttaaaacaatcctctaggcagtggtttgctaagttaagttccactcaatcaccaaatgaccattccctatttatcagatcttcccataattctttccttgcccttcttgtctatgtcgatgacatatttattgcaagtaatgacttggatgcatctgttttaaaactttctaaactcaaaatttcaactcaaggatcttggtccacttcgtttctttcttggattagaaatagctcgatccaaagcaggtatttttgtccctcaaagaccatttactctgcaaattctcactgaaactggatcccttggaatcaaaacagtctccacttatatggaggccaacctatctctcagcacagacattggccccctgtttttgaccccacttcttatagaagtctcattggaaaataactatacttaacattaacccgacctgacatcacctacgctatcaaccgcctcagctaatttctcagtgaccctcgacaacctcacatgaaagctgccacacgaatcttacaatacttgaaaggtgcacttggccaaggtctcttctttagctcctttgcatcaacaccaaatctattccaactttatgccttctctgatgctgactgggggaacctatccagacacacaaatatctatccaccagtttctgcatattccttggctcttctctaatttcctggaagtcgaaaaagcaaactacagtctccaaatcttctgcagaagcataatataggtccatggaaaacaccacatgtgaactcctttggttgttcaacattctcaaaaaattttgcataacacactccactcttgcaacactctattgtgacaacaagatgctctccatatttctgaaaatgctgtgtttcatgaacctactaacacacatagacattgattgccacattcttcgtgatcaagtcagccaaaaacgcatcaaattagtccatgtaccttcaaagcacaacacaacagacatcatgactaatgctcttttcccatctcaatttagtttcctcttttccaagataagtgtcattaatgtatacacttcatcttgaggggcagtattagaggcttggttagtttactgttatgttagttagtctgttactaacggtattaggaaggttgttaggataccatttatttctgttttccttttcttgttttgtgaatcatcatcatgtataaacaccctatttttggtttctcaatacaattcaattcattctttcctaataataagaaaagggtatcatatctaaacagtattgtgcactactaatatccaataacaatattgattatcacactactacaatgttagtctttagaggctattttttcacccccatttataaaaagggaagctaaagggtgtgaaaatacccgctttattcgaaattgacatttagaggcagttttttgataaaaaccgtagttataaaattgcattataccatttagaggcggt

SEQ ID NO: 378760 - DNA, 1493 bp, Cannabis indica
agcatgagaggcctgagatgtcaaaatgacaactatttgatgtcagcatgtgcctcgaggagaatattaatgatgaggaatacctcgagtattgtaaggtacatttaatgttgctcttctagttgcccattcgttggattaatattgtgtttctctaggtgagatatgagcctgtaatttaagagcacacggattgccaaaccctcatgtaaatacaggtgagggaaaaattctcaccacttttacccttttggcaatttgaattcaatttcaagagaaaaatccagagaagaaccagagaacctcattctgcaactttagtgaatgttcgatctcttctacattgcaatccatcatcttctacgaattagagcagaggagtaccctgatgcacccccattgagtctaatagtaacccacccctagtcactagaacctctaaacattcaagcaaacatcaagagaatccttgactggcattcgcttgttgcgtcggtcactgccacccttatctaccctcacttcctccaacaagtaagttccctctattcttttaacaccataactttatgtttctgtagagatttgtgttagaactttaatctagaataactattttcatgggaatatggggtttgatcatatcaggtttgggtagtctagagatgacagggtcattttagcatgaatgtaggtaggattctaggtgtcttatctcttaatctatttttctgaactgggttgatgtggatcatacctaagtgaaactaggttcccatcctcttgtctagagtcattagggctccagatgatacgcttaggtttatgatgtttactctttgtgttcccgactggtcgtgtagaagtgtggcttccataaggactaaaatgtgaggacctccccaagcagtttgtaggggaggccttcccaatgcctgtgctattctccttgagtttagggtattaacttcttgggtttacctttctttcagctacaattagtatgtccaaggacaacttcgatcttaaagcagtggattttgtcgagaagaaactacaattgggttgcaagaggtggttctgaaagaggaggagggaactctggaacctccattgaataggaaaggaaagaagaaggttgttcccataatctacaactagtccatttgggagatggaccaaattgacaacaaattctggagcttaggaatgctccagaaatacgatgagttttggggcgtcaacaacattctgggactatactggcatcggctttcccttgtgagagagtctactgttaagtgtgccaatatcttcagagcatagagctaggcacacataatgtgtggggccacttacctctgtgaagttattttgccaacttccgtgcgcatataaggatcatgcccttctagctcatcatgtagtggtataagcttctggctagatggtgttgggttttatgccctaaagaaaactcatttcaatataat

SEQ ID NO: 378761 - DNA, 3241 bp, Cannabis indica
attacttaccatgtaaggagaaaagagtagagaaggccaaccaaaatagggttccaatttgatcaggaattgaagagtttttgatttgagggcaatggtttcgttcaatgagccatacaacaaaaccattgtagatattgacaagtactataagaagccacattgacattgtaaaaggctttagaaataaccatgccctatttgatgtttttgatcgaacaggaacaatcatcaccaatccactttgtgtgtatggaagtgtgaattcagcatattcatatcgatttgctactattgctacatcaccaactacagcatcaaattcctgcacaaactttcattagtatcatgcatgcatgcatacgaagattttcgatcaggccggccacatattgtagtatttttgtaatacttatactttgttaaaaaaactatttaagggctttttgggtataaagaaaatagtctcttttttaaaaaaaaaataaaagaaaaggtcgtctttatgtgggccctagacaggctgacttagcctgtttatgactaaggttggcccactttgttaatactttttcttttatttttttgcttttctaacactcgtttgaataattataaacgggatcttttgttttgtaaaattgaatcaagataaagatatattatgtacctttaattgaattttctccactagttcatcatatgtgccattgaaggagatgaaagtatatggcaaatgatagggaaggttttgtactatctcatcaaagacattgattacaaatccactaaaagtaacactattgaatatttttgctgagtccaagctatgatcctcaccctctttcacattcaaaaacttatcaaataatgatgtacttggtacaccaattttcaaaggcttagaattcattgatatagtccatccttttggagttttccgatctccccctggccaaaacacttgtcctaaatctttcaatgaagacttatgagtattattatagccaccttgaatagtttttgagaaactattttcatttgaccaaaaccctagctctctataaccctttccaaccacatttataatttgaaatatattttggttagtactactattagtacttaaggtatgaaaatcagcacttttcaaaatttgacctaacacttgtccatattctttgtggtcattactagaaaaaatatttttggtggtgatagctagagccattgccctagttgcatcatatgcttgggctgcaaacataccgggctcgtggctatactcctttggatacatagagctaaattttttatgaaatacttggtagaagtgttgccaataagggttctgatcatcttcttcttcttctcgaaaatggctcttaagccctaaaacaccttgcatagaggagaaagttgaggcattgaaagaatgaacaaagttagtaatggaatcggttgtgatccatacatattttgtttccatcattttcatttctcttgccttatcaaacaatttgagtgcaaattcgaccgatgaatgaaccacaaagactttactttggttttgtttgagcctttcgagttgatttgttatcgaaaaagaagaagagaaaaaaggtggaagtggcactagttggctaatcctagcaccaacttctttgagagatgaagatagatgaggtaaaacatcattgatgcttattgaatcttcttcatagattagagtcacttgatgccactcccaagattgtactatggaagctatggctttcatttggttgaggttattgtttggtgacaattgaataagagaaggccacatttgagttgcccacattggaagtagattagggttagttaatgagagaattggaatgtgatactcactaccaatctttgctaccaatgaagtctcttcccatgaatgtgaacccattataatggcttggaccccttttttaatgatgaggtaccttgctgcaatgccaaaattcatatgtataataaatagataattgatttaggattataatataacttattgtgactaagtgtttttagtcacattaatacttatttttattgactacattagctaccgtcctacaaatgattagcgatttcataattattattattaaagtaaaataaatagatctcatatataaatgattagcgattctataattattattattaaagtaaaataaatagatctcatattaaattgcgttgatatagcatctcatattaggatagatgcaaccttcaattattttagggggagggcaaagtgtaaaaaactttaagaggcccaaatataaattttctaaagaaaatcaataataattatatataaaaaaaaatatactataatttatatataaatcaaaaatttgggagaaaacaaaactttaggcccgaccttagatataagtagactaggtctgtgcttaggaccaactaagtctaggggccaacttttttttcttttaaaaatatacatgtttacactaattttaaaaaatatcacattattttttaaataagagtcgaaaaatatattattttgtatagctcactaaatttcagtgttgaccctccctcacccacatgaatccgtcccgacttcataaatgccctttaacactttttaaaaatcttaagaatacgagtagtatttataataagtcaataataatatattctacttctaataatttaatttcatcaattactataaaaatacatgctaacaaaataaatatcgaaattataatcaaataatacaaaattttacataaaatttctgttatataataatacactatataatgaatctatgcatgccttaacatttttttacacatgcaatcgagtaatttgaattttaattttgacatctttcattatcttgaaataaagataaagagctagctaaataattctcaatatataaatatatatatatttttatacatatatattcccacaagcaaacacaattattattgagagacggtaaattggattattggtgcctagtcctttttggtgtctatcagtataattaagtattgcgtttcatataatttagtacaataacttttaagaaatatcgctaatcagtgccatttatatatagagggcccgtttggtacgcaagattggactgaattggactgaaaaggattggactggactggacaagattggattatgctgaaagtaatcc

SEQ ID NO: 378762 - DNA, 4744 bp, Cannabis indica
cggcttccatggttctgactctaattacccaaatgcatatacaagaaatattttggtaagaaatttaaactactaaaatatttgatttcgagggtagaatggggtgagatgtatgaggttagtctattttataaaatattatattaagttttcacatattatttacgtgagactctctaatactattcaattgtgtccttcagttaaaaattcaaaggacgtaattcaaaaattgagaagtataggtgtcgttcggtaatatttttgtttttaatttttaattacaaaatgaaagtaaaatttttgtttttaaaaaattaatttttgaaaaacaaaagcgttctgtaaccacttttgtttttcaattttaaaaacagaaaataaaagtgtgttttgtaaagtttatttttatttttatttttttattttatttaagtcgggtctaggtccgagtcggattcgggttcaagtcataagccgggttcagcgccagggtcgtggggaggagatttgggtctgggtctggccgtaatctaaaagattgattaagaaaaaaaaaatgtttaaaaaatactgaaagtgtatttttttttttttttgtttttaaattttttgatttctaattataaaattgaaaagtaaaaatagttttatagaacatgtttttgaaaaatatttttacttttaaaatttattaaaaaagtattaccaaacgccaccataatgttttttttttgtttgtctttatttaaaaacatctttaattaattattaattattataaattcacatatagatattgctttggatttgatgaagggccatccaaggttgggtttggttaaagatgagtttaatagaaatccactatatgtattagcctccacaccacaacaaattccaaatggaaacaattggagattttgggaaaaatatttatatgaacattgtaagtatatatagtacttatgcatcttaataattaattaactactcatcatttcctcaaaattaactaattacagtttggctggttaattgtgattaattatatattgattatttcagatatacagataccatctgctggagattatgtttatgtagacattacaactagtgttttaggtatcgtacagcctcaaaaaagtccatttggtataatttcttttttattaatttcggtatttataagaattttttagtttataattgtgtgtattttatttatttaagactacctttacatttttaatttttttttaaatagttaatcttactttaggtacaaacaattacttactacgtatataaaaaataataattatttgtacaataaaatattttaattttatttttcgatattgtaaactatttaaaattttaaaaattttaaataactacaatatatacgattacgaacaaaaatttaattagaaatttaaaatgcgaaaatagttatgaggtgttcctaacctctcattttacaagagtaaactatttatgtactaatattggtctttgcaatgttaggccaattacttcgcgtggcttcttttctcaacattttaggtaatattataacatttttaataaaattggcagcgaaatttttttatgttttaatttttatcaatttaccttcttattttcttgacaatattcttttaatcttatttttttttataaatttaaagtgtcaattaaattttaatgttaaatgtcaactggtattccactgtgtacacctaactgtaaaacctcgaagttaaggtatacacagtgaaaatttaattagctagtatatatttaatggtgggattaaatgacgccacaaatttacaaaaaaatataaagttaagggagtattaaggaattttgctgtaaattacccttacttaattacatatttgtacaattaaataacaacactttttttttttgtaattatttagatatgaaaggtttatatgaaacaaagcttgggtacacacaatgtgatgaacttcaaaatttgatgtgtatagagattgagaaaatgatgagtgaaaaggaaattagaaatgcaagagtgtgtgatgctgtagaaaaggctgcaaagaatggtaatgtagagtttattactaaaataacaagagcaaatccagaactgatttggagtagtgaggtagcaacaaatgtgtttgagaatgcaattgaaagtcgtgaacccaaagttttcagccttatatatggtcttcatgacaaagaagcactagcacattttgttcataagaggtctagattcaccatgttgcacatggtggcacaagaggcaccttcacaagtaagaaaccttataccaggatcagctttacaaatgcagaaagagttgcaatggtttaaggtaataatatatatttatataaatacaaaacttcttaagtgaaggcatcactcttgcttctactataagagaattatatctcaatttgtttttatatgacatttgttgcacaagtccctattggttcagcaccgttgcacactcaagaatagaattctgaaatgatacggacacacgcacacaaacgaacacagaacacaattttgaattgagtctaagatttggtattgaaaatggtaattttgtcaatatggcaacttacatgaactaaagtcacgtgtccttttatataaaggaacaatgacattacaagaaactttaactaactataacggttagttgtgagttgatcgtgactaatcaaacagtgacacttaagctaattactaattgctaactatctctttaactgtcatgacatgtcattagttaggcaaaatagttttataacaattttgcactttgactactattgtacatatgccctgacagttttacaaaactgaggtagatagttagttcaagcaatgcttgaacttgtcactagggagagcctttatcaacatgtcttatggattttctgtaataggaactttgagaagtttaacttttccttcattgattatgtctctgatgaaatggagtctaacatcaatgtgtttgatcctctcgtggaagacttgctttctactcatatgtaatgtactttgacatcaatgtgtttggtcctctcatggaagacttggttcctactcagatgtaatgccctctggctgttacaaaatattagtattgatctttgatcactgccaagttcttttgtaattcccttaagccagggtgcttcctttacaacttcagttcaagctatatattctgcctttgtagttgataatactacaacagactggagatttgccttccaacttatggtgcagcttttcatttgaaaagtgtatcctgtttgagaccttcttgagtcaatatcccctgcataatatgagtcaacaaatcccactacatcagtattgttgttgttgttgttgttgttgtgttgttgttgttgttgttgttgtctggtccatagatcaaactaacatttgttgacatttgttgttccctttagatattttacaatctattatactgtcttccagtgctcaatccctggttctttcatgaatttgctaactatgctaacactatagcataaatcaggtctactgtagaccataagatacatgagactgcctaccaagcttgtgtaaggcactgactccatgtatgctatgtcttcatcagtggaaggaccttgggaacatgacaatctgaactgttagctaatggcagtgctaacaggtttcacttcaacaaagcgaaatcgatccaagattctgttgatgtatccttttgagatagcttgagtttcctttgttttctatctctaataatctcaatccctaggatcttctttactgattccaaatccttcatgtcaaattcctttcgcaatgcatgtttaactttattgatctctctcgtctatttgcttgcaataagcatgtcatcaacatagagaagcaagtacacctgatcctttgagttcttcacataaacacagctgccatatgcactcctattaaaaccaattttagttacaaaatcatcaaaccttctgtaccattgccttagtgactactttaggccatagataaatcttttaagtaaacaaacatgatcttccttccttttctcttcatatccttcaggttgtttcatgtagatctcttcatctagatctccgtggaaaaaagttgttttaacatttaattgttcaagctctagattttcacttgctaccaaatggagcaaaattctaattaaagtatgcttgactactagtgagaaaatctcacgatagtttatcccttcgctttgtgtgaagccttgacctacaattctagcttcatatctaggttcctcaaccccaggtatgcctactttatacctgaaaacccacctgtaggaaataattctctccaattggcttaggtatattcaagttttgtttcttttaagagcaaccatctcatttcccattgatctaccccatttaagcttatcaggtgagttcatggcttccttgtaagatcctgattcatactcaatcatctctgccacatgaagagtataattaacaatgtttacataaccatatctacctagtgcttctactactcttctttttcatgtccctgactaattggtagtctagaccttcatcttctaactcacatgcattttcttcctcaatcctttgctttgttggggttgttgggaattattttaccaggatct

SEQ ID NO: 378763 - DNA, 2060 bp, Cannabis indica
atatatgacatgctcaaatcaaagttagaaattatggtggcttaagcattaagtattgaactgtttttattcaaaaaaaaagtattgaactgtttgatgactagattgggtcttatatgtggtaatgattagtacatgttgttgtcattttaagtgaatatctgtggaataggactatacattggtgtcactttgttatgctaatttctacaaacacttcatatgagattgactgtgttaagtgttactaaatttctcagctttagcttgttttcattggtttttttatgtttatgtgcctttggcagccaaggaaagcagaagaaaagaagcaataattgtagttttgagatgatgagatttgagaagagacaggtctggtctggtatggtattagtcaatgagattagatttatattatgtttcattcttgtattgttgtttgacttcaatgccaaagcgaccttgttccattttcaagttatagacaaataaaactgattgaatttgaaagacaaaacaaaagagttgaatttcctcttccacttctagagattgacaaattttctgcttgtgggaatatatgtacttgaaaacaaagtttacatattcattttatcagcaaattaattttcacccagaacttaaattgcctcaaaagcttggaaaagcagtgtcacaattcacaagggctctgttcaaaggatagagaaataagaagacaatatttggtttcaattttacttaatatttaaataattttgatacgtatgcaataaattcatatgctggtttttatttctcacattttccctacagaccgttaatagccaaagagctgggcagctagtagtttttgttcttgtcatttttactagtcggataagaacaactaagagcttcacttagttcgctttgtgggagcagcataacacatagctggaagataataagatgttgctcccctcccactgtcttttctcgctttgcttattgcctcctttaatgtggttcgggaggcagtgctcgccttttttaatataagaaggtaggataacagaactgattttggtattcagggtccctgctcacctttcgctagtgaagctaaagtcgttctcatgggttttgctcttcctcctaagtgtagggagctctttttaatctcgtacttggtttatggtttctcgtaccattggtagggactttctttctgatcttggtctcgacatcaatactatatgtctgagcattttttcgagcttttcatcataccttgtgaggtctctcgagtctcaataacacattccaggttaaaaataattgaatgtatgaaaataaacttttgcataaaaaataagtaaatgcatctataagagagtggagaataacatagttgaagaagatgaagatgataatgttttcgtttgtaacaataaatcaaagtcttgtaaacaatattaatttatcaatttaatttatccccgaacggaggtgattaatattgttcttaatttatttgaatgaaattaagatcttattcaaaaaaagaaaagaaagaaaagtaaaatctatggtttgacaaagtatgtttttcgattagacgatgaactattcaagttcaaggaagttcatgcactatttgtagatgtctgcattgtaaattcattagtgattttaatcactacataaaaaaaatactctttatatatatttgggtaaatactattttgttttgtactatgttttgcaaaacaaattggttatattgattggaatctctattttggcagatgacaaattggactatgtaaatttcaaatagtactctgattttttatcaaagtaaaatttaataataaatcgatttagaagtgttattacaaaattagttacagaattgtctttaagttgatcggttcgtaaaattctacatataacctacccaaattaaaaaaaaaaaaaaaatcttaatccgactgacggtttgggcggtttggtcgggttaacccgcccaaaccgaattaagagggtttttttttttttagttttcaactaaa

SEQ ID NO: 378764 - DNA, 3226 bp, Cannabis indica
accactaaattatgtctattactaggggtgggtagcatgcaatctaatctaattgcaccgaaccaatccaatttaataacaaaaagttggatatctaattacaattgtattagattgaatgctaaaagttaaattctaattgaattagatcggtaattgaatgtaaatctcaaaatccaattataaaccaatcaaatccaatttatttatctatgttaaaaaataatttatataataaaagatattaaaaaatataatatatattaattatattttattggattttttttgcgttgaatttttaacacttagttgttttgtgtatttagttgcattgcacttgtaacgattgtacgtttatagagtattaaatttaaataaatggttatatttagtttatacgtacttttttttattttttaagttaatattaaaatttagatgtataattggatatccaattaaaagaccaatctactccaattaataattagactggatttgattagattttaaagtctaattagattagatcgaatgcccacccctagcaattaccttttaacttttttaaaaaaaatatatttctcattagttaactttttggaagaaaaaaaaaatcttatttttaaagacattatatataaacctataaaatatataatttaattccaattaaatttggcccaaagcctactcgagacacaactttagttcaaataaaaacataattttttttagtaaataatggcataaatatttaaagtttttgagcttgtaagcaatataaatttaatagtttttttagtaatatataaattaatattgtttgtaaatttgtaattatgacatatataaagctcagattataaatcataaaatctagacagaaacagataatattagctacttttaaatttcttttaatagatttaaaacaaatttaacagaaatgttcatccattacaatagataataactctaaaaaatcaaaccaatagccacactcgccttgaaccaaaaccaaaccgatctccccaaaaattgttactttagaaatacatagatatagataaaaatttataaaatcttcatctaaaaattattattattttacacataattaataaaaaaaaaaaaaaccagctcatacaaatatatattataaaattctacaatatcacttaaaaaggatttgtttcgggggaaaatctttcgtttaatttttttatatagttctctatattatagttatttaaaatatgtgttaaaattttaaaaaattcgaaaaaatttaacataccaaaaacatggttcaaaaaatattgcacttatctcttttattttatactcttgtgaaattatttctaacactatttttttttaaaattattttaaatttttaaaattttacatgatttatgtcttaaataattataatgtatataattatatatatattatattttaatttttcttttttatataatttgggtaaattcctttaaccacaaatgatacttgttagttaattatgcttctaaagaaaagagtaaggagtttgaattttttttgtaggttagtatgttgttgtccttccttgtccaatgaaatttaaaaatctgctaatgtttccattttggaatttggaatgtttgtttgtagtgaaatttgactacctctgctaaatttttacagttaaaaacagcaaacatgtagacataatatctataaatacatgtcaccttatgccccttatctaatatctagttaattcacgtcattcattttcttgtcttgtttttagttttgagaaccattgtttgtttaatatgttatataaatgaaataattgaaatgtacacattctccactttatgatagcacatctaacattattttcaataaaattagtaataaatacaatacatttgagaacagactatcactaccagccagcaactttacacattattattattattatttattattattattatagaaataaatctgctttatatctgataattatttaaataatgttgtgtcatgttcaattattgataacagaaggaaaaggaaaagcaaattgataattgcaaagtcgtcttgtataagctattacagaacatgaacagcaaaaaacaatgaatttgttcccaaaacatatctatggagatataccataatatttattttgaaggggagattccataattaatttatactatatttaactataaaaaaatgatggaaatgcaaatttcaatttaataactaaaataaaaataaattgaatgtaaaacgttaagtgccagttggccaccaacaaaaccaaacatgaatacaatttgggcccagttcacatgctgaccagaccaccccaatcaattagcctatccgacgtgcttccaagcgctacaattgaacacgcttttcatagcgcgtgaactttttgctctttttttatttatttatatgactctcttcatttgttattaggaaaaatatttcttttttttttctttttactttttcttttgaaccggattaggaaaaatatttcagttagaattttttttctctgattcctggtagaatttttgtttctcaaaatgcatataaaatctaatggagtgaacaatcataactatataaaaatacatgtatataaattgtggtataatcattgataatgtgtatttttacagaaacttttatctccaatttataatatacagaatatttactgttatgtattataaattatgtggcggttagggaagggacaatgaggctaaccgtggtagtttgagatcatgttgggaaggtgttataggctggcacaaagttattgccgttagaagttgcttcttttttgatgacattgaaacttgacatagttattaaaattattaagagataaatttaaaatggaatattgagaactatatagttcattataggaaattaggaatcttatattggatgtaactttttgaaagtctctatatcttttaattttgttacttattaatgaatgaagtgagcatttatcaaaatgtaattggtgtaattgaaactttctcaatcccaaataatattgtttgtaatggttttatggcctaatttgtttctgttaaaatactgtaaactctgaatataaccctaattaattcaagagaatcaaacaataagattaaggaatagcggaagcgtaccg

SEQ ID NO: 378765 - DNA, 4248 bp, Cannabis indica
ttttttgtcggtgatcggctaaagatcggagttcggtgcaatgtggttagggaattgaggtgttttcgaggctgttttgtgaaattcggtgaggtttttgctgggtattttttgttttcctttttgagattttttggcgaggactggaatttggatcttggagatttggatttgtggtggagaagacgaaaggaaaggagagaagaggtttccattgtactgaatctggttaattagacgaaagacctttgattttaatttggtttttgattcggcattgaagttagaatcacagcttgatgtagggcagagagagaagaggtgtatatgaatgcttaagagtggtagaaggaaggaaaaaaggaaagggtttgagaaagaggattgatgtgcaggtttgagaagaaggagaagaaagaaggaacaatgggatttaagtcttttggaggagagaagttgaagacgacgatgggtatgagtacggcgccttccaggtcgaaaatgaagctgtggatgatacgtgcaaccacgtcggtcttgctatggacctgcatcgttcaactgacggctttgggggacatgtggggacctagggttcttaaaggatggccttcttgcttctctcaggaggctgctacagccatctccgttctgcaagacaaggctctgaacgtacagactagagtacttcctcccaagagtgagtattttcactttctttcttgtttttttttttgtatacaataaaataattgaagccatgaaggaaattcaactgcggcctggataactgggttctttattttcgttgtttttttcttgatcctgaagggtgaaagacctgattttgtgtttgtaattgaaatatatgattgtcttttttgccatgtttgtttggggatcagaacacacagtaatttatagcgagatctaaaaagaagtatatccgaactgaaaacacttatattctaaagaaattaaatcactttcgttcataacgcttctcttattctgaatttggaacgaacgcgcatgtgttgaaatggatttcgctatcatatcataaattctatctatatgtggaatatcatacctgaaattgggatattgtgagatgtagtccacgcgatcttcttttttaccatacatattctgtcagtgttgaaataagcttataatttatcacgtttgtttcccattttgctgatggagtatagaaaagaaccgaacttttttccttcatttgttttcgcttcccattttatgaaatatatattttactatgtggattatctttgtgtggacttttcttcccccgctttctttcaaagactgcatttctttctgttctttttccatggagagtaattcttgactatccttttttctgatttcactttcatgtttcaaacttcttattttgtgattaggggtttataagaacaacggttatttgatggtttcctgcaatggcggacttaatcaaatgagatcagcggtgagtgatttgttaaaaatggaatctcctttggtgtctatgcttatggcagcttcctgaccttttccttttgtttttgcaaatcagatttgtgacatggttgctattgcgagatatcttaatgtcacacttatagtgcctgaattggacaaaacatccttttgggcagatcctaggttggtcaacttgattttcattttcatttgataatttatttgtttcctcgagttcagattatcttcattatgctccattatttacttactgctgtccatggcagtgagtttcaagacatatttgacgtggaccatttcattacctctttaagagatgaggtccgcatattaaaggaattgcctcccaggctcaaaagaagagtggaattaggtggagtttatacaatgccaccagttagttggtctgacatttcatattatcataaacaggttagctgtttatcattaccttctgatcttaagagttaaaaacccaacttgaattagttaacttttattcatgtattggcttcaaatatgcatattgttagacctctctcactctcactctcccgctccttctcttgtattctcattctcaatcatgttactttatttgttacaaaactctgttactaaagatctatcgtttacttcttactctgcagattctgcctcttatacagaagtataaagttgtacatctcaacagaactgatgcgagacttgccaataatggtcaacctttggagattcaaaggctacgctgccgtgtaaattttagtgctctaagattcacttctcaaatagaggaattgggtagaagagttatcaggcttcttaggcaaaatggtccagtcctagtacttcatcttagatatgagatggacatgttagcattttctggatgcacccaaggttgcaacaatgatgaggtggaagagttaacaagaatgaggtgtgttttgcttctatttaagattcaacagtagtcataatttattttctctcatttgctctaacaattttgtatttgcagatatgcttacccctggtggaaagaaaaaataataaattctgacttgaaaaggaaagatggtttgtgtcccttgacaccggaagaaactgctctcattttgactgcaatgggaattgatcccaatgtccagatatatatcgcagctggtgagatatatggtggggagagaagaatggcaagtctagcaaaggctttcccaaaagtggtaagccgatgaaagatgtagccagccgtgttccctcatttggtaattttaatattagtttctgacatgtaagcccttttgaatttttctaaacaggtaagaaaagagactctattgaatccatcagaccttaggtttttccagaatcactcatcacagatggcagcattggactatcttgtttcattggagagtgacatctttgttcccacatatgacggaaacatggctaaagttgttgaaggccatcgcaggtattatttcaaaaattcagttctgttcatattaacaccagtgtaggatgtttcttcttagataggcttggaagtttttaaaaagactaaaattgttgccttttgttcctcagatttcttgggtacaagaagacaatattgttggacagaaggcttctcgttgatttgatagaccaatacagtagtggatcacttagttgggatgaattttcatctgctgtaaaggaaacacatgcagaacgcatggggaacccaactaaaaggttggtgattcctgacagacccaaagaagaggactatttctatgccaatccagaggagtgtttagaattgtcggatgaacaattaagcagtacatgattatttacgctaggaatattttgtgacattcatcatcagtgttctcccacagttggtagtagcttttaattaacaagagaccgttaagagaattctctatggagaattatatagagtgggaagggattttgtttcaatcatagaggccataatgaaagattaaaagaattccaagaagaaaggatctatggatcaactggaggaccaatccattacctttattatatatgaaaatattgccaaataatccactcaaaatttatgtatagaagaagccaagggagacaacagatccaactgccacttacacgagagaaatatgcgaagaaagagggaactgctggagtcatgagaggtcaatgtccttttcttttctctaatagtttcctttcctttccttttttctttaatttttttattccatatgtaatagtaagcccatggtttcgtgcttttgtggccataaaaatagtacaattcctttaagatttttctgtttgcacatattgttacctcattcctgttctgtggcgtgcctatatatagaattatatatatacaagtatattaaacagggaatgaagtgtgtgcgatatattttgtatttactttttgcagatcacgtaaataaatttaaatgttcctagaatgttaatactgtaactctttatttggtgtatatgggtgtggggtggggctttcaagatagtttggttttggttcctcactcttaatatgtatactaggttgatattcctatattcttactttttattttaactacgtagttttttttttttgagtgaaaattaactacgtagtttataagggaaatttgaaattatatgcatattaggaactaaaattggtatcctaatctaaaactatacataatt

SEQ ID NO: 378766 - DNA, 2176 bp, Cannabis indica
aaaagaaaaaaaaaaaaaagctctgaaactctctagggatctttccctcttctctcgtccttccagctctctttcattctgagtgatgcaatctgtccataacttctcttctcaatccttccccttctaccctcatcccatgattattttgcatttattgtctctgtagccgagatcctcatttaatgcaactccttccagccagcgataggcaatctccccccaattcttttctctttttttcctttttgcccttattcccttatcactatccatttaattcttgtcactcctcaatacgatcgtgacctccatttattatgtttcctgaaaatgattggtttttctcctcccaaggatcccttcgagcatttaataaccgccatttcctcatgcagattcaagtcatcatgattgtagcctggaatagagttgggctacggtatgctacgactgaaatggcatctctccacctcctttcttcgtggccaaggtgttcaaggtactacttattattttctctatacataatgttgtggtttttcttcaaattccatctccctgtttgcctgttatattcacttctttctggtattttattgtgcaaacattcaaaaatgtctgccacttctgaaaaccctaacctcaccatccacctcacagaagaggaagcccttgttcatgagttcgatcatgtttccatctgccctgaaccccattctgactccattgtcaagattctctcatccaaaactatcaaacctaaatggattagtaaaactatgaaagaggcttggataactcgctttcctttcactgtttcaaattaccattctagtgtttttctaatttagtttgggtgtgaaggagataggtggagggttgtcgagggtcaaccctggcactttggcagatctctcaagctcttcgccatccctgatgggtttgacactattctcccctctcaactccgatacattcccctctagatgcaagtcaattttgtcccattcaggaatcgctcatatggtcttccccagtttattgtcgatgccataggtgaacttattgaagtccatctctcgtccctctatgactcgattactcctattatgagaattagactcctcttcgacaccactaaaccacttcataggggtatgaatgttcgtttcacaaagttggccattactaaatggctcaaatttctgtacgagggaattcaaaattactgttaccattgtggtaaactcgatcatacttataccaaatgtgataattttctacagcactgtgatacttatgtgtatcatccttctctgaactacaaagatactctcaaggcccctgcaaaatctgtctagaaaaagagtatttttgagttgtccaaactctattccctttgaagaacagcctttactattgaacctttctagccaaggccttcaagaagccattgacaagttccttttcccaagtattggcaatgctactttagctcaagctccaccaattgtaacttgccctactcctgtttccttaaaccaatcctcccaaatttctaatgtctcaactgtctccacttagactaccatggtgccattcaccggtcccaatgtttctgctcctatcatggtctctatgttgtgactgttacctctaaaggcaagggacctatgtatcttgaatctttcaggggttccacccttttcaatcttgttcctcttgttaaggtggtggcttgctccaactctagaatcaaacaatccgtcaccagacttaattgtcaggtgggttcttctatccgaagcatgtttaaaagagcccgatcctccaattttgactttgctattgttccaactcttccagactctgatgaaaaaattgtaaaattgcaagtgttgggcccacatcctatggtcggccactaaagcatatttttaccatatttttatgaattttttaatgctaaaaaattcaaacctaatcatagaaggattcctataaatagatagtgatggactcaaaactgataattgatgcacataaatcttttagtcaaattttgagccttctcaacttctctctattttgaatctttctcactctctctctctctctctttctcttcaatttttgaacccttatagtgatagagtacatgcccacgcatagc

SEQ ID NO: 378767 - DNA, 5819 bp, Cannabis indica
acttctctctcccttcttttttatcttaaaaaatttgaaatcccttgtttaaagaggaatgggaattaaaaattcctaatacaacaagaattaattgaagaaaagaacaaaaaaatctaagattgccaaaattgatgtccacctggtagtatcaagagaacaagcatattagttcgagacatggatttaacctaacacaagtttaaagttaacttgcggggaaaatgtttgtcgaaaaactaaccctcttaacatggacatcaatatttgacacatgggaagaaataaacagcctaaaattgagtagttttgtgtcatagtagtcgacctacgaggggtcctagccctgcgcccaagttgactctaggaactctgaaatgggtgtttagatcctaccaagttatttccaactcaccatcaacaagataagaagaatcaagtccaaggcttgggaattaaaagacacaaaatagaacctcagaagttaacccaggtgccttagggttttcacctatgcctaagttgacatcccaactagggtttcaatttttgggtctgtctttgtgaaaatggatcaaactttgcactttggcatgaataagatatgtcacaaacatatttgaggtaccaaatttagaatcaaaatactttcagtttgagcacctaatgcacccggtgcctagggcacccggtgcctaggttgacatattgtcaacctggggtgattccaaccataatattgaagaagtatcccgagcattatatttgtctccatccaaaacagggaaacaagttctattggaaataaacaaatcaacctgaaggccaaaatgaagacccaatgccgacactttgtcaacatgggctagttctaaaaacagttcagaagaagtcttctaggcatattctttgtattgatcaacaattaaaatttgggtactttcagggaaaaaaacagagtcatctgggagcaaaaattggaacccaacaccgaagttgacctaggtattgggccctgttcctagtttgacattttgttatcctaggctatttctaattagattttctgagaagtcttctaagcctattctccattttatgaataactaagatacgagtatttctagaatcgaatagaaccatatggtggaaaaaaactggagccaacatgtaatgacttcatacttagaatatgaattagtaaaaattagaactaattaattatattttatgattatatgcgaatattttattatatgggccctattttaaagaaataggcattaagattataatttctcaagtactccagtaattttatttaaatctaagtgtattatatatgacataagtgagaaatatatttttgtgatttttgctctacaacgatggaaatgcgactatttggccattagagtcacacgggtttggtttagaacttttacttgagcggggaaatcataagtgatattttgaatatcgagattaggtgtggttatagtgatataccattttactcctaggcctgaagattacttaagtgagaaataaggggcaaattggtcatttttccctaagaggtggattttgtctttttgtggttttgatactgttatgccaattttttttcacctaacgtggttaattggtccacataagtcaagactaaggacacatgttatagccttgtcaatagcaggataaagtctccttacaaggcatggcaaaaccatcaagcaagaagcgaaaggtgttaagcaagccgtaaataagttgtacaacaatgtctagccagccaaagggagtacgcaagctggcaaagagaagcttatttgcccgactagggtttcaacacaagttagccagccaaagggtgattgtcaaactaaaaagagtctgtttgaccaaggaagcttgacctttggcaaggaatgttgtacaaggctggccaacacatactaaggctgaccagcacttgccaaagctggcaggcacatggaaaagcaggcaagcacatgggaaagcttgcaggcacatcctgaggtagtaagaataatacttggtcggccataggagtgcataggccagccaaaccctacaaaataagggtaggctggccagttcctcttctagcaggcactttttgtgcccctatagattttagcctaaactacactctcaacaacgaatggacttcaataacccacaaaaataggagattaacttaagttatttacctattcttggagaataattaacatattattttcttatatatttaatatgtaaataagaggtgatatcttctcattttaagggatataacctactttgaactagatctattgtaagccctacattatataaagggcattaggtctcactcaaacctaagtcatccttagtcaggctaagtcatcttaatctaggctaagtcattccatatactacaaaggctttcttaagcctcatactagtcctcctctttctccctctctccctctctcacgtctcatatctcatctatgcctcctagacactaagtcttttcttctttggtccttcacaagaactcatcagttcttggtctgcctagaattgttctcactattgtactattcaaagaaagccatagctagaatcataaggttctcacctatgatctgtatggtattacctctagaatcaatacaactaaaaggagagtaagtcattacccgctaaataagggggacaaatctctataaatctttgtgtctcttttataatttattattacatcgtggtgattgtctatcataaatacgacttctttgttagttgaccaaattttgagtcatcaaataaaataaccaagctgatttcaaaacaaaggttaagataaaacctttagaaaattaatagagaaaaacttaagtttatgcctttatctccctctcttgtattcgaccctaaagaaataagaagaacaagagtttttcttcgactattcttaaggaattcagcaagaattcaagggaaattgaaggattaaacacaatgtaaagccctagcacctctcactttgattattggtagtttttctttggttcaagtatgtataattttaaattgggttatgtataaaccattggcgtttaagaattgtttcttaaggtttattaagttttttcaagcttgcttaagttgatttttatggctagttgtgtttcatcctcgaatttcaaccaggttactttccaattctgctggagataactcacatactatttttgagtacaaaagtatcgatggtaggcttctttctcagcttgaatcataaccaaacatctcgggttggcatcaagttcttcttgagcattattgaaagcctcttttgctttcctgtatgtgttagagatatcacccttctcggttttatgccatctttacaaagagtgttttactctatacagcttcttcactatgttcttgagattggtttgattggagtctttctacccgccaagaataacatctttaaatccctctgtaaaagcccaatggttacaggtgcaaaaggacttgtaccagtgttactaccttcaacaagcttaagaacgcaatatctatggtccgaaattgcccccatttgtatctagctttgatgttcgggtactgatctaacaaagcctcattcgagaaaactgtatcaagttttgaataaattctcacaccctcctcatgtttgttagaccaagtatagaaagccctaatacttttaagctcatccatttgacccaaagcgagccaatcttgagcatcctgaatatccgaagctttaacttgtctacctccacacctgtccttataggagaacatagcattaacgtcacctagaatgagccacagtttttgcaaagtaccgaagctagcaagtttgttcgaaagatctttcctctcagttaatgaattacttccatagacatcgattatgaagaattcttcttcgaagccaaccattttcactttacaatgcacaaactgagtatcctccaagatcacctctacctttaccaacttatcaatctaaattaacataatacgataggataaaatatgactagaataccaattctaattaagaaaaatattcattacattctcaattctttcatgtctaattttggtctcaaagagagcaccataaccaactttattttctttacaaatatcaaacaaatctagttgtttctcttttttatgcagccctctaacgttccaacccaaaatgttatacctgtccatcattagaaaaatgaagatcattatctgaagcctcagtctcctcatcatttagcacctcatatttgttacttgttatggctttagaattcgattgcaatacatgcttagcacctttccttcgaggagttatccactatcctgtgtctttgttcgaacccagcacattctcactagcaccaacagaagactgcttctcttttccatatgttaaactcgaaccagcaagctgatgaacaactccaatctcctttgcacaagtaggaagttgttatattttcgaacccaaaacagcatgctattgcatttttgaacctaacagcctattgcttcatcacaggatcagcttcttgtaagtcttttttctcatttgcttcaactttcttatcctctagctatttcttcttccaagctactggtttgctcttattatagtttgatacaatgtggcccaaaaaatcacacgcagcacattttgagggtaagcattcatactcaacagattgcttcattaattgttttctttcattcatagacctctgaagagtgattttataaacttacttatggtactaaccaaggcactcaaaatgtctttcccaatattgtaatcccaacctatatttagtcttatccaatctggaacacatttaaccatttgcttagttaaaaaatagtatttaatttttgaaaccattttaaaaatataataattaattgaaggcaaaacatattttaaggctatccaccaacgtcaaaagattattgccaatcccaaattactattggacccacattttaaattcttattccttacaaaaattaggaaggtaaacagaaatttattcctattttcatttcattctctatccccacaaataaacacatgattaatattgttctaattaatgcttttgaacgataaaataaatttttgtaactaaaacagtatctgcatagtacaatattaaaagaaaagaaacagctaccaacagaccaattacttcaagtcactaataccaaagcacagccctttacaataaaagcgcgcgtacgtagagagcgctatagatcgaatttgttgtggccactaataataataataataataataataataataataataataataataataataataataataataatctattcaaaataataataataataaagaaacaatccccaaaatttaagcaaaaaaaatatatgaatttaaatattatcagtccaccgtttgaaagtcacaagagcacaattaactacacagataactcttatcccaattccacaaaatggcaggaaacggaagtcacttcacttggagtagtttaaagttaggagcagctatatatatatgtatagagccagccatccagctgttctaggccaccaatctaagatcactgtgaggaccataccctacaaagacaaatgtgaatagcaaagcaatactactacgtacgtactggcacaaccttggaattagaaatgaaaaatttattattttaaaaataataataata

SEQ ID NO: 378768 - DNA, 4017 bp, Cannabis indica
ttttttaaaaaaaaaatagattagcattatcctttgtgattacactcaagagcaagagaaactattaaaattctgaggttcagctgctacttgagggtgagtgtgtgtggtccaggattcaaagtgcccgtaataaccttagttgtctagctgttgttctgccaatgggaatgtctcttatagcttggttaccaacattatagaatggttttaaccatatgtttttcaggacattatgtacactatctatatcatctccttttagatagcataccagctcctggaagcaaagtttgggttttgcaatttatgtgtggtttgatcttgattacttaaaaggcactcatagaatcaatagtaacttttatgtcatttggtgtagcataagttttttgaccagatatctatttagagaaataaaaaaccacttagctcatgttacattcttgaatgttattgctcgagtaaattattatagaagcatagtttttcttgaatcgttagttaccataaattaaaatatctccttcatataatattttaagtaaacctagaaaatggaacttatgtaaatatattcttgcagaatagaaccacttgtgtgtaaagaatacgttagcaaacgacctgttattgtaccctaccacaaaggtggaaggaggttgtacattggatttcaggtaatgtttttgaagtatatatagtcattcctttgttactctcttcatccatccttgtggtttttgtgcttatatgttgatactattttgtgtaggaattttctgaaaatgtagctgctcagacacaagcttttatggatcatctctactatataagggtgggctttattattttcatattattcccatatataacataatttaaagatattgtaatgagttacttgatactttctttatcaagacactatttttttacttaatatcagggtctaacataagtgctgttacatattcaatttgttaagtcacccttaacatgtgtggctggcatttagtttcttgcaatctatgagaacatatcattgtactaatactaattttcttttgttgaacaggttaaagttttgactatttgccagtctcaaaatgatgatagaatagaaggtattttgctttacccctttctgtagttactttattttctagcatatggagagacgtatgtgaaggttaaatacttcgaaaaagaggaagctgataatgaagtatgctctttttctgattttgttttcttttcacagatgacgctgaaacttcggatgaaaaagagccatcttatggttctcttatgatgaagagattgacaggaagtgtggaagggaggattgattatgtgcttcaggtgtgtagcttcacccattcattcacttatttatgtgcctttgtatctcaacataatatttttggtatcagattaaggttattactttttgtgctgaaaatgacacccaaatctcctctgtgttgttattttattcttagaataaacaatttgaataagaatttatatacttttcttcccccaagatagaaaccatagatgacatgtactgtgcttaaagccctagtactacactgacacttaacatcccaactttaaatgttaaactaaataaaccttttaagaattaaaccactaagttgactattggagctggtggataatggaacattgtaattctgctgtatagcgttcatgagctttgtgccttcttctggttgaaacatctggctcgatttaagtatgcagcccgagcaaaacatttctgccaatatcactcaattcaaattgttatgttgttgaaatgctaggggtttaattccttgccagtgttcatgcatattcctattccttttgttgcatttctaatgttcggctaatattaattatcttagttagaccctgtttgactccctctcaggttttgcttgaattagactaatcctttttgattttttcaaacataaaaatgtcggtgtttgtgcgcttaaatgttaaaattaaaaatcgttttctcaatgtgggtgcttttgtgttttgatcatgcaggatgaaacatttcgacatccatatttatcagccattggatctcacacgtatgtgtaaatttactttaatttctatttacttgcttggtatttagggctccagagttttttaattgatgaaaatgaagcagactgcaatggagtttgatgtcatttatagtgttatttactcaataagcatgccacatcaattattgaagtgttaagtgttattgtttcacaaacaaaaattaccataaattcaactaaagagcgttaacaaagtctgaagttttcgagtccctctacatagcaattactattgtattctggtctcgaaatattgtaggattaggcggggatcctaaaaccataaatttatgctctgaactgtatcctttttattctcataattctacttctcaactacacttcattttagctagagagacgcataaatattttaactcatatttgtatgttctgttgctcaaagtctctttatctttgcatcttggtctgcagaaagtactggagggatttcgatactgctctgttcatactaaaacacttgtatcatgatatacccgaataccccaactcatcgaaacattttaaactacactgactaactgatagtggattaaaagaatggaggagaagccattaaagaacatcatacaatgcccgaaaacttcgaagaagtttttgaagaagcgctgccatagatggatctttctggttgtctgctgatttaaaatgcaagaagaaccattgtttacattacaacttgaatcatttgctattcccttgagcaaattctccagcaactaattgctccgtcgtctcaggccgaaatattccacttgttccaacttataataagccaatctgcaactggggtttggacattaaggaaagttactgcccctttggaatggaggagaaattttatctgaaggtaggtagctgtaaaggtgttaagtgttaatatttaggtactctgccatcttttctgtgtatgtaaaagaaatgtttgatatgtaatacttaggtgcttacatataaaagcattgttagaatagttgttagattatgtaattaactgcactgattaatttaatggagcaatgatgttaatctcaattaggaggaaattgtcaaaataataaagcattgttattaaatattattagtgttcaatactactattaaatgtcgtcttgtaaataattaatattttttcatagtaattattacattaaaatatgttatgataaatgtaagtattcaataaaattatatttttctataatttaaaattacaaaatttatgaaaatgaacattaattaaagaattacgtgaccaactatttcattgtctatggtagtcatatatagatgacttttaatttcacctttcaatgtcttggctcaaattatcaaattacttgatttatttgatatcacacaatgaagacaaattaataattgtatttatgataagcactaaagaaagtctacagttttaatatatgttctcttagacccactatataatatctatctattataaaaatgaatatagaagcaaagaaatatatttctatatatgtcactatctcccaaaagcataagtaagagctaggaagtatccattatgtgatatttttggatagatttttctcatatatgtgcagcctctaaatatcatgatctcattgcaagtacacaatatgtataaaaaggaaaaataactttgatgcacaaatatcattatataaaatgtatgatgtataagccactaataattattagagggtattgctattagcagtgacagactctagaattttttctttgtgagagttttttattattaaaaaatatttatatattttaatcattcttactagatttatttaattttatgaagaattttttttttactattttagtctaaaat

SEQ ID NO: 378769 - DNA, 3035 bp, Cannabis indica
tattattattattatgtgactaaaaattctgttactaaatgtattaatcacaaaaatgataatttgttggaacttttttctttgaccaattctttaaaatttaaagattgctgtattttacagcagctattaacagtgctagctcttacttgtaataagttttggttagtagcattagcttttgacccaaccattgtttaggcatggggaatggaggctagcaacatggctcaccttaacctattttttttttgggtcgaagctcatgacttaacttaacttgctttctcttcatgatcatgcgcgccatgactctcgatctcgtacttgtatttgtatatatgttggtaccacacgcatccatctatattaccttattttttcctgaccaacaagtttgtactcttttctttcttaatataaccacgtgggatcgactgaattaatattattgatgagaccgatcttagccaaaattcctttttctctatgtatctctgtcttatcattgtttgtattttgattgtcaaatcacttgaattagaaaacgatagttacggccactctcttcatgtgatatatctagtacatattaataccaaccaattgttcaaaaaaattaataatgttagtgtttatgatcaacggccacaaactcacttgatcaaaacgtcatatatatatatatatccttgttctactcatattcacttttattattatattaaggaaatactaaagagtattctacagtacgtataccccatgttattgtatgttagtgactaagtttataaaatattaattaattaacacttgcattttatatgcatggtagatcaaccctttggagagagacataaacagagaaagatgataggagagaaataaaatatagggggcgcgtttagtaatattttgcctatatacacaataattaattttgggagttgaatgtcagtgttatagttagttctgttattaagttaattagtacaaatgttatatatttgtaagtttgtaactaactcttaccttgtaagtacttgtaactaacttatcttataaatactctgtactatgcttagcatttcttatggttgagaaagttgaaatcaagtatgtataggataagcatttcaaaattaattcacaaacgagagtatgcttattttattttatatatagtataattttttctacacaataacacaatatgagactaattctaatacatgcatccaatactattagtaatacaccctctttatatctggccttggaaagtgtgagtataataaatgacctttaagaaattataggaccgaacgtgacatttgaaagaatcctataagaccaaatcgagaaatttgtgagtgtatacatcgagaaatttgtgaattttttaaaacaagtcacagaccacaacacactacatgaaaaaagagtttttgccagcaagtaattccaccaacaaaagttgctggcaaaaaatgatatttcgccagtgaaagtcacatttacatgtgacttaaacattggccaccgacattaattgactcgacgactaaagcctcgtcgagaaagttttgctgataaaaaaattcaccggtaaaactattttcatgtatttccttattcgtggaaaaatttgccaacgcataaaactttgcaaaaaaatattttaaatagttttattggtgctatataatgcgttggtaaaatattttttatataattattttctaaaatttatttaattaaatgaaatataaatgtaatttgaatttaaatttaaatttaaattaaaatttcttaaataataatatactaatataattccaatcgcatattataatgacactaaattcaagtaaacattatagaaataattaaaaaatagatgtcataataaaatactaaaatttacactaaaaaatactaaataataattacactacaaattaacagcatcattgtcatcatcgtcattctagttgggaggggagtgttaagaatttgaagaacataacagctccccaactccaaattatagaagatagaagtcttgagcctctcaacagttcaatatgcagcagcagcagagtataaaatcagagtatgctacagctcagcatatcctttttatctagaatattcccaacgaccttattatatttttttgccaatgatcatactttttgctgtactaattttctgttatgaatatgtaattgtattgtgccatttcttaatacaacagtggccctctcttatattaaacctctatataaggaaatgcatcacctcactcatatttcagctgaaattttcatttatcaaccattactatttttactactaaaaaaattataattctcgatggtttcacaccgtcgggtaaaaaattcttgacggtttataaaatcgttgcctatacaagcgtcacgaatattgggtagaacaagcgacggtagaaaaaagtcgaggaaaataatttctgacagtttaaaaccgtcgactatagtcgatactataggccacgatatatagttgatggttttaaactgtggcctttagtatagccgacggttttaaaccgtcgctatagtggatacccaaaaaatcttcatcttcatcttcctcaaaaccacttctcgcatttatcgcatccgctctaaaacctttacaagcttcatcctcctccgttgtcgttgtgcttgtcttcctcctcattgaaactttcttttacaagcttcaaaatgcctttcatttgacgatccttgaaattttctattgatttccaagcttcagatttcttttacacacacaaggatcaagatcatcaaatcaaatcatggctaataaaaatttaaacaataaataagagaatattgtgcttacctttatgctgccacgagagagcggacgagagggacaaagcaagaaagagtggaggggaaggatggtgtggctcatggttgtggaggagagagagtcgggaaatgaaacgaaacaaaatttataaatgactt

SEQ ID NO: 378770 - DNA, 5923 bp, Cannabis indica
ctaaagtccctccgtccctggtaatatgtatagcttacaattgagttgcttttcataacttctagtcttcattttgtgattttttgaaggttttaaagctcaataaccatagatagggttaaatggttaatagatatgggattagatttctcaatagcctcacctagtaatgtgatctagcttttattagtattaaaaagagggttggtggtggcaatgttgttgatacatggatagcttttgcaaatgtactatagaaaaggaagcatgatacttatggtgaaatcttgtgtggttgtgtatttatgacttcatgtacaggaagtttgctaattggtagaacccctaaggagtagatggttttaaaaaaacaggtgaagtcgctacaagatgctggggtaagatcggagtttctgtctgctactgatttgctttcaaaagaaccttctctcctgattgaaaatgatggtggggctgcttttctgcccggagactgtcaactggatgctcatcgtgcagttgaccttattctaaaggtttctttaactttcttatgaagtaatgtgatatgaattatcatattgtggctctgtgttttatgttatctaccctctgatctggtgtcttctcactatagttatgatccatatacaggctaacagacattttatatcaaaaggcagatatgcagagttcttttatgatccagttacaactctaataaggtttattattatcctattctccctatacttaaagttgtaagggccgacaagagatacaaatttaatttacaatttggtgggcctgctaattgcttggataactgttattctgtacccagaacaggtagcagtggcaaggtcataggtgttaagactgcaaagaatacattgttctgtaacaaggcaattatagttgcggctggctgttggagtggatctttggtgcaggacctgtttagagattcaggaattgtattggatgtcccagtaaaacctcgaaaggtttgattttctttcccgtgctaactaggtggctgaatctcttatacaaataagtttttccatacatttctgttctgcagaattagggatacacagaattaatttgtaccaggtacagataaaatcttttcaaagggttgttaatttgatgactaaatagtaggaacaaggattagagtctttatgtataaagaattggtctattgtaagttggggagccataccttttgtttgaacatgagacacacatacataatctagatgacattgtgtatcctggaaattagctggagctaactataattaatttatatcacagggtcatctgctagtgcttaagaatttcaattttcttcaactgaatcatggtatgatggaggctggatatcttgatcataaaactgcaactcaacttcctgatacctcaacttcagtcatatctgatcatgatcaaaacttgtcaatttcaatgactgccaccattgattcaatggggaatgtagtcctcggtaaacttttcttcacttctgctctcagtttatgaattccagtatttgaagataatttttttaaacagatttagtatgtgttctctgtcctgtaatgccatctttttctgtatttcaatgcattgattgtggctgttcagccttcaatctcaccaagtgccctgttcctcaaattggttgtttgccttcagggagtagccgccagtttgcaggtttcaacactgaaacagaagaatctgtaataaatctcatatgggagcgagctatggatttctttcccaaattaagagaacaaaccctctctgattttatcgaaagacgtgaagttagagtaggactacgaccatacagtgagttccatttttgtttaacctattgagagagccagatctagctgatttagcttacggttatgtgaaactaacaaagtaatccctgaatgtctcagtgcctgatggaaaaccagtaattggacctgtcccagggctgtcaaatgtgttgcttgcaactggacatgaaggtggaggactttctatggtaatgtttgtaactatcagcttattcttgaaacaaatggcacttttttagtttttacaataatagatttcctggctttagctagctagtattaaatccatgcatatcgttgcctgtctatgatagagggaaaatgatttatcatatgatcaagaagattgcattagcattaagtaaatgtcttatctagcgctatttatagtacctgaaaactagaacaaagtaactaatctgtccaatttctaggccctggggactgctgaaatggttgcggatatggtgctgggcaatccagagaaagttaaatctgcaccttttgctgttcaaggtcgatgttgttgaaaagtatcaaccaatcaatgaacgcactttcattttcctgatcattggtatgtttgaaagcactcccatgcatttcactctaatcttttggtcacacctgccagagctaaatcatcctaagttttgttttgaggataatttgtgttcattccttgctattttacatgccgttgttttcgcccctactaaatgtttttatttcatcttgctgaccatatgtgcacaagaacaatgtaccataaatatttgctcagaaattttgctatttcacaataatgccacggctaaaattgaactgtaatatatttagcttagtgttgaatttaaaactgctttttgtgtttagctatagctaaagaagtggcttataatgtttgggcaacacaattcaaacgaatcatataacttgttttcctatgttctcaagcatgtcaatggaaaatcagctctcttgactcttgctctttcgttcataagtaatcagaatgaaaccttatgagtaaatttcttcatcaaaatctccactctgcagcacaaaacaaggtcttctgatggatttctccactcatttgtgtgagaagtgtccttgaaaattagggtatggatgtaatagccaatgaactggattttgtatttactgcatgagttttaaaccttttttcttttacagaagttatgattttgtttttctaagcaaatgtaccttgttcttcgtgtactcaaaattcaatatatttgaaagaaaaaaatatatgaaaataattggttaagaatatgtatacaaaatttatttacttacaagatatatatacaaatttaaaagggtgattttgtaaaagctattatttagagcatttttcaatggtggcactttgtaaaagtgtcagtgtcatctaaaaatataatattttatttcatcattcttttgtattattttttacactcttacttttaaaataatataatgataaatgtaatgtaagcattctttaaatttaactactgcagtcccgcataatattatataatatattagttattttacattgtgttgtgtattgtattgcattgcattgtattagtattattcaatacaatactatggttggtattgacttataaaattatattatttttactatgaactcgatctaaacccttgactcgaatccctggcaaggttcgggtaggtgttgggtaggggtgtgcataaattatccaatcaaatgacaaccgactgtcaaacattggatatccaattgtgatcggatcagattggatgttatttttgaatgtacaatttgatcggatcagatgttggatttcaaaaatccaatacatccaacatccaacatccaatcaaactaattagtattttcatttaatttggataagtaaatagattttatattgtcatacgtaaaatattgtcataccattcaaaaaaatattaaaattttactcttgttttcttgaattggatgggtccaatccaatccaatacatattggacctaaaatattggatggatccgatccgatctaaaaaatactaggtctaaaatattaaataaacccaaattaaaccaataaatatatatgaaatacatccaaaggatagaaccgatccaatccagcaatgaatggatgttggatcaattggatgactgaaattgattggatttgatcggatggtaaaatctaacatctaatatataattagatcggatttgaatagacctaaaaacatttgatatgatctaatgaacacccctagtgttggatgtgaggtcagggccagggttaggatctaaggttgggttcaagtccgagcttggggtctagttcttggtttggggccggggttcaagtcctcaaccccggaccttttctaaatattatttaatataatatgacctatcaaacgaggcctatatttcttaatcatgaaggagtcttttattgtcaccagctacaatttttgttgtaagacttgtatgcaattttttttgtggcataagtacctaaaattttgagtttgtaagcgacataaactcattggtatttttcagcgacataagtatttaatgtttgtaaaactgtaatttttgtttaattttgtcagtacatattttgttttgaatagaagaattggaagaaactgatacttcatgtttccattcaaatctaattattatatatttttttttgagaaaaatgaataattccattaaaaaaaacataaatccaaagagttccagcgaccattagtcattacaagcatgagaaactaaagtaagttaggtagaagacccgaccacaagactcgagaatcatttaaagtgagagccaatttagctaaagaatgtgcaatagctttggatatttatactgttatttacgttttttaaatagaaatagaacttcattaagcagacaaatcgtcaatacaaacaaaaaagatcaggaaagtctaacaaactataagtcattttgttagcagaacgttaaacaaacaaaaaatggattccactaagcaattaatcaaatgtttacatttatcaacaactaaaccaaaaagaaagattcatcatgaaatgatttcgaatgacctcaatcgccactaaacaatcaaactcaaaaaccattgtcgaccatactttgtccttgatcccactgagagcctcccggatacccataatttcaagggtttattttttatttttacacttcatcctttttttatatatttttacggaatttcacatagaaatccctatagcaattaatggggcaacttaaatcgcaactaaaatccgtatagcaactcacatagaaatcacggaagaaactaccagagcaatctaaacccaactcaagttccacatcactagaacccaactcaagttccacattactagaacgtcaaatgatacgggcttcaaccaaactgataagttacaagaaacaatgcaacatcaacattcattttaataaatatgtaaatactaataaaaagaagatgttagaggttgtttggctttatagtttaaaaactgttttctgttttttaaaactgaaaacagtttttaaaaactattagcagtcgtttggcagaaatttttaaaaactgttttttaaaaatgagttttaaaaaactaagaaaacagaaaacatcaaaacgttgttttcaattttcaaaaacaatttttttttttgtctaacatattatattttatattttgttcacatactcggatcctagacccgaaatcataccctgacctagacccggatgggttaatgtcatggtatggtgctaaaatattgattttttttttttttcgtaagtaaaaaatctaaaaaatagtttttaaaaatttgtaacctaaacaccattaaatttttaaaatagacaaaaaactgttttactattctcactttaaaaatacaattttaaaactaaaaaactgaaaacacagccaaacaaactcttaatatgtaacattttttttaacatatgtgtgag

SEQ ID NO: 378771 - DNA, 5977 bp, Cannabis indica
tttggtgtttttgtccctgacatggagccagttaacactagagtgtttcttccaataagtttcttccttagaaaggagactatctaaatttgcctacaacttcctaatattcagataggaggcctcagagttgtcaagggagtttctagcattctcgaggcacttttgggcattggctatttctttaggaacccaaagaaagatttatgcttccaattagataggtgatcagcacaagctttttgtatggaacctaggctttggatgggaaaattagagctagcactatgagtccaagccttaaggataacctcatcccagtttagttcagtcaaccagacattctcaaagaggatctcctatccccttcaaccttactaagatttgggggagaattatcaagcttcatattgatggctttatggtcagagccaaagaaattgagatgactaagggaagcaatgagataagtatccaaccaattaatgtttgttagctaaagcccagtctaatctttcctgtacattcctgtgaccagcatgattattgttccaagtcatcctaggcccttaaaaatcaagagcttcatcatggaatttgtcaataaaatccctaaagcattcagatggtcaatttctagtatttccattgcttttatcatcccaagtcaaaaaactattaaaatcaaccataagtagctacgacaaagaaatacaagctgattgacatattctattaagaagttgcaaagtatgaaaacgattagtgggacaaagagccccataaaaacaagtaaaattaaaactagaaaaattgacaccagagacataacaatgaacatgattaatagagtaattagtaataaatacatccaagtctaaagtccaaaaacacaggaggccccccaaaacctactcgagggacctcaaaactatggacaaaactcagctttaacctaagactatcaacaaaacccttacataatctagactccataacaaagagaagagaaggcttatacattttgactaagagggagaggtttaggaatgctcaatcactcctaaggcctcgagcattccaacttaagacattcatttctgtaggcaggcatgttcctccacaggacctacctcttcactggaagccacttccactatgtcctattgtggtaggggccttgatctcttcagcatatctctctgcttattacctacagtagttaattgtctcttgaagccaatagtgctagtttgcgagcctcgccttgtctaggtccatttgggtgggccttcggagctgccaacaacaaaagtttgggggttcgaggctcctacaatggtaaaattattggtggggaatgtcgttggctaggattggaagtcaatagggagaattcattgggctagcagtcgggaagtagaacttcttaagttgatggtggagttttgtctgggggaggtagagcatgatatggattccccagaagcaacaatcatctaggcagtaaaacaagggcttgggtcattttggggttactgggtatgtgggggaatggtaacaatgggagtggtatatatgtcagcattactgtttgggggaggtttgggtggaaatatagaggccaacaattccagagtgatcttcttcattgagttagaatgagaaatcttgttggtttattggtctctgaggggtggaggtgcttgcaaggttcacaaggttctggtttggaagttgcatgagctggattgggggtcaaagtgtcagaaaaacacggttatttatagtaaggtaagattccaaaggggccaaggttggtttgggcaataccatgcaaaacattttcatatgggagcggtggagagtgtggggactcattagaagcccacatataattagcacagccattacatgtatggccaagcagccgcagaagtaatagtgaccaaggaggtcttcatacttcaactcaagccaggtaggtgatgccattcccagaaagaggattgggacacctcttgggagggtcttggtaacgtcaaacataatacacgaactcttatgtaagagcccctagttttaagaagggagggttggttggatttccagaaggatcccaacaatttggccaacaaacttggctaaggaaatgaatcgacgtgggaaaggtatgttgtggatttggacccagaatgggatcttacgcattgattccaagacaagggcagagtcaggatcagggatttgagaaggacaggacttttatcaaagatccaaggttgattaatgatggcccttcgcttgtcgccttcacagtggaaagtagccaggtacaaattggagttaggggacctttctttaacactgacagagaatcttcccttcccttcctacacttctctaggaaatttttcaaggagttatggttgaatgttttggtggtgtataaagttactataagatggaagagaggtggagctagtagaagtccttaataagtatcaacatgatcaacgagtgagtgcacagtgttttctgtgtcagtgagatgcaaagctgtagaaaaagaacaggctaagtctactatttctgataaaataagagctaagaggcaaggtaagtgtttgtgagcaaataaggtaagaaaaaaattctagtactttggacttaaatagccagacacgagcaaaatatcaatcaaaggggtacaaactattcatcataggtatactcgagtaccatagacggtagggataacagtcataaatggtcggtttaagcaggggattatctaaatctatccataatctaggttggtagacacaataattaaagctaaccctaaattaagatttgaaaggatgctcaaaattaaatacaaaaaaaaaataataattaaattttactctgaaaatagatcaaacctaagatatgttcattaataccaatctacgcttgctctaagatcccttgtgctcgagattgagctgacctcatcacctccaccttgggtggaggcagttgagtgtcaatcgctataaatgtagcgccaccaagaaaagggtggaaaagatgcctaggaagacgaaaaagttgcagagggtcatgatgatgatcgccattgtttgaagaggaagaggaagagatctgagtagaaagcatgctcggtagaaaaggtacgaagggtgtctccaagattcctcttgatctcttataattcccttattaagttttatttattgtgtatattattattaagcatccttattaattactatcacattatttaaaatttagctaggtatacgccgtttctcatttttgtagttcttattggatgggggaaattggtgtgttggtcatatataagatataatcagtgatgacactatctgtgacaaaacttcaaaatttctacccgcaaaggtaagtcatgtggtctagctctatatccatagcaaatccaataaagagagtaaaaataaaagaaaagaagagaataacagaaaattttacaaaccccacaaagcaaaagcaatggcaaacctttaaaaaaaacaaaagtcaaggggtaaataagtaatcaaatctctttatatatccaaataatctgtttcaataaagtcccaaatcccatcatagaagctctctctctatctatctctctttctctcactcaataaaataagaggaaaatagtaataataataataataaatggttggagaagcatcccataataataataatcccaaacctctccaccttctacaactcttctcactcaaaatctcaccttcttcctctccaacttcaaataactcatcatccattatgaagctcaaaacccttgtcaacacactggtctggtgccacgtgcgacgcttactccggaccctctcaacagccaaatcaaaaaccatctccattgtcgtccacaccataaaagaagcccaaacgatgcagctgattattcaccccttaacgaagaacaaaaacaagaaaaagaagagcaccaagagcatattctttggctctttcaggctccactacaacttttgctcctccaaatactcccacgtgcttcccgttccggccccagttttcgacggcttatcacagctggcgccgccggctcatggcagcacccatttttactatgactccacgtggaataattcagttatacaaactgggactagtggtgatcatggtcacgaggatgattctcagctctctggttacttgcaatggcttgaggagaggaaggtgcatggtaagtcatccggtgggtgcgcaacagattttaatcagacgggtggggatgcgccagctgtacccaacgacgacattgataagttggctgatatgtttattgccaattgtcatgccaagttcattttggagaaacaagagtcagctaggagattcaaggaaatgttggagagaagtgcttaattaattaattaattaatgtcaattagatctctcccacttattaaggatcttttttttctttgtcttgggatgtaaaaaaaaacgaagaagaaaagcatatatggtggactggacgatgaggaggaaagtgtagaaattaaaatggatcgagtgagagtttttgtgctcttattagttaaaatctggctcttttggttgttcaaaaaaaaaaaaactctccgttttggttattgtgtatttatatgtctttttttaataattttttttttttgggtcttttgagaaaaatggtggggttttggagtttggagagtgttgtacatgatgatcatgaagaggggtgagtgatctgggtatttgtgcaattcttcttaactaaattaaaatggtgatgatattgcatggttatggagcttcttaatttccttgatcttttaaatttttttacctacttttgttttcattgaaagaaaagttcttcagcattattatatacgtgttatatatattttatagatgagtatctacatatataacacacaaaccgcatggtctacttactacatgatttattaccagctgtgaccataaattaatatatctattatctttaaatatataacaaatattggtgtgtacatgtatggtatacaatagatagataggcatgcaaaaaaaaaaaaaaaactaagattagagaagagaaaaaaaatttaaatcgttattagcttaagatgccagcagtttcaagtattaataattgtgtgggaaaagaaattaaataagtgatgcacatgcaaattaaccctatcaaattttatatggtgccaagtaatttaaaattcaatttttatttgttctatcatgatcaattttaaaacttggggacagcttgtcattaatttggggtgccgctcactttagttggtattactctttttcaaggaatttgtatctttgttccaatttttccaatttatcaattttaatttatttaattaattagtcaatgttttggatgattataaacttctaagcctgtcctttttattgttaattatatattttatttaattatttgatttacatgtgtttcttagacatatgtttatattgtttgtctttatttgatttattgttactctctttttggacgtaggatttcgtttgtcgaaagctaactcattaaattaaatcatttgggtaattaattgtcataattttgagtaatattatagataaagtattgttattggagtgtctagcatctctagatatgtcgtcttgcgattgcgattggctagagatactctttaaattatataggactcaataataaattagatcaataaaattaggctaattaggatttttgtccccgaactttgatatgtactaaatcatgtccctgaacttttaaggtcgttaaaaattccacctgaactattgaaattgttggatttaaagacttttatccaaatttagtaaaaaaaagtttaacatggatgaaagttta

SEQ ID NO: 378772 - DNA, 4551 bp, Cannabis indica
aataggtaaataactaacagaagtgagatttgaaggattttaccacaaaaaatttggttatgtggttaaatataactaatcatagagttttgataattttactgctaatatcccttatcaaaactttgcactatatttttcttttcattaatcattacaacatcacacatttattttatttttaattatttattgcttttattatattttattaatattttatgttcaatttttatttcataaaactttacactatttaacttatttcatttttttcaaaccactattatgtttttctttccttaacattctacattaaacatcatttattttttacttttactcgacatttaaagttaaaatttaaaatttaaactaaaactaaacatatgtgcattatacctaacaataatctaatgtgtatatatatatatatatgaaaaattgagagtaaaactaaacataataaaataattaaattaataatttgattgaatttcaaataattttcttaaatagttaacactacttttataaaatttgcctaaaactttttggccttaatttgtacacaaatatgtaaacaaaaacaaataagatttaaaatttattaattcatttggtaagtccacaattaatatttgcacatgttggtgttgcttgcattactagttaaccaatgttctccatatgagatattgttctcttaccaaaccttaattatacacatttctttgttttgtttttcttcttcttcttctatttatattatctaaaataaactaaaaatatataaaaattcaaaattttgctaagtacaacaaaataatagctcatgtacttgtgattctttaatcaatacaaccatcataaaaatgatgaatacatacggaagaagtacattttatcatggaagacattatatataaattgcaaaaaatcagtcacttatcatcataaattaatcaccaaataaattagggcaaaaaaaattagttaaagttatccatcatgaatgcatgtatgtagttagaaatctttccattactatacttgactttcctaaacatatggaacaatcaatgagaaatccaaaataccattaagaagtcccatttgtaaaggaaattatgtaataaaaacatttatagcacatgcatatgtgtgtctatatttatatatatgctaattaacttcttcacaataatcaatcccaaatttggttaaaggccaaaacttttgtctcatctaaatttggaagcaatgtttggaaacagtgttattgtaacaacccatttgttcctccttaaattatgaacccttgtatgtctcttgatataacattttcttttcttatatatagcttgttaaatgatccaactgtaaatgtttgaaagttaacatagaattattagtgtgtgattgaggcacaaggaaaacgtttcatttgactaaagccattatggttgcatgcatgtgcaaactcttataactaggaaaatatactagttttggtgcttgtcttagctagggttagcagcaatataatattatataatgataattgatttgtatttaggcagttcctaaattataggatacaaaattttactaagtttaaatgattgattgctagatagagtattaaacaattgtaagtaatgccattggtaagatcccttaagtttgtagtgccattattcaacggaatattaattagttgatgtggtttagctaattaatttgcttgttttaatatttaaggtgtgtttgcttggagtaatagagttttcgttttttgaaattttacatatattaaattatgcatcttaaactttttaggtcattaaaaaaattctaccgaactattaagattgttgaatttaaaaaattttgtccaattttaataacggaagcctaacgtggatgaaagtttaaggagcaggatttgataaacatcaaagttcaggatatagagtttggtagatatcaaagttcaagagacataatttagtatgtggacaatcgacgagttagtaaaattgaacagaattggacagaagtccttgaatctaacaatctcaatagttcgggggtaatttttaaaggcctgaaaagtttggcggtgtgatttggtacatgtcaaagttcagagggaaaatcctaattgtgctagaatgaatactattttgttccgatttttgtttgattactttacaaaatatttaagtattattctaactataatgaatcttcttctattttggtagaatacctatcatatctaatgtgagaggcatgatcatttctttttttttttttggtttttggtaaatcagaaaattgtattccacaaacatcaattacaaataccaatgccaactattaattacaatctatactaattgtatacatccaatctttatgtttactactcattttctttttgtgagtatataaaattctatgtcatattgtatttacaatggtgtgcacaaccttctttactgttgaaatttttgctcccaaacaacttcatttcttaccttctaaatgtagtaaattgtagaagttaacatacatgtataaacttggcatctaaatctgttatcaatactattcttcatccaattgagaagcccctgaatccgagagatacccccttgaaaaccaacccaaacctagatatctttcaagatttgtctgctgtaacaacaatcaaagaacaagttattagtttcctcttaattgccacaaaacaagcaactattttctgtcaagattcctattttcatttgccgctcacttgtattgagcctatccttcaaggccaaccacataataacacaatgctttgggatacaaaacctatccgaaataaaattgaatctccaaggattaagaggttgttgtagctttatacaaacatcagctatggaaaacttatatagaataaaattttccatgagagaacaccgattttaataagttattggcatggataactttcttctaataccaacttgtgtttgtgggagcctcatactcccacaagtccttatcctttatataaaccaagttaactcatttaacccacaagttatccttaattaaagagatagcctaaacatattttccgattgcactaatgttttataaggcaatatttttgaagcctaaacaacttttattttttggcttacaaaaatttacccaaggaatttttctagtgccaatagacttctcttttcctttccaaaggaaagaactacaaatctgagctattcttgtaacaattcttttaggaaaaattataaattcaaatcaataagaattgatcattaaaaggattgagttaataagcacaattcttcctgcatatataagaaagatttctagagctctaagttctaattctagaagtcatttttctaatcaagcattcacagtcggtattggatagcttttaagaataggttttcatgcctaaatactgaaaaggaaatacttctggaaaatccaaacacgtcaattattctatcagcctcagaatgaatcatacttgccatataaacttcagatttccttttgtttgcttcaagacctgagttctttaaaaaaatcttgaaaccccgaagcaacaaagtagcagccttaaaatctcccttgtaataaagtaacaagtcatccgcaaagcacatatgagtgagattatgaccatgacatcccgaatagtatttgaagtcataatattttacaattttgcataaaattctagaaacatactccatggggatgttaaacaagagcgcggacataaatcgccttaaacctcttttagtttgaaggtatccatgaggcgtaacgtttatcataaaattaaatctaggcgtagtaatgcacataatcatcattctaattgttagattacaagtcttcacataaaacctatagagactcatccattaggtcaagactcaagacctaagactttctaactcagattacaaatttaaagactctaacaaaccacctgaacctttataactttctatttcaagtaaaaggctcatctatatatatacctgtaactataataaaaaaaaaaattcagtagctcaatacctagaaatgttagagacattactactaaaaagactttttgtttcaatttttaagtgacatttgaaaatttgcgtctggttgtttaatcgatgatgtagccgaagacgtaaataatgttacttttacttaactttgtaatcgaagccaaaagttttttgatttatttgataatcgacgccaaaagtaatgtacattttgcgtcggtccttaattgaagcatacaaattttagtcatttaataactgacacaaactacatattaaaaaaatataaagatggttaaagaatatttaagacggttcgacatactaccccaaacttgtcatccccaaaaccagccatacgccaccatcccaaacctaaaacaaaaagaaataccagatgtggtaaattgagagagttgagatatatatacatatatatata

SEQ ID NO: 378773 - DNA, 972 bp, Cannabis indica
aaaaaaaaaataaaaaaaaaaaaaaaactagctaataaaaataaaatcggcagcttcaaaggttgaagaagatataatcatttaccctaaagttcaatttatttggattgggccaacaaacaaatgggcttctgaaattggttttatattttgtatgttgtttgtgtcttgcttttaattttctttttatttttaccacctcgagggcaaggtgattttgaaaggtggaaaagtgttagactatgaaatagtgtaggagtttattaataatttaaaaaattgtgtagctattgttagacatgaaaataaaaaataaaactttggttcgattggagtttgacactcagtcgaagagtgcattttaggagatttgtcttgtctcgatgatgaatcatattatgatgaataagcagttgttactcgatttgttttatttgtttaggaaattaattcctatttcagtaaacttttaacaactacaactatgcagtcaaattcaatatcaaggcagtagctctctatttttatttacagaaagaaaaagatctttacaagctcttatgttaatgtgcaaaaatctttagtagtgaaggtggcaatcgaaaatcaattatctcattcaaaaattagcttttatttatttatttatttttaagaaaatatcattttattttatttaatattaccattcactaaattgaattgtaacatattagttacatatcatatttagccgaggaatgccactcttacctctggctaataagatggtcacactagttttttaggaattttgtattttcattcactgctaggcacaatggaattatggaatgacatttctatgattattattgggaggattcaaattttggaatggagagagagtgtttaacctcaaacgggactgagcaattctacaaaatcagcatatataataccaagctaagctagcctcatgatatgagagga

SEQ ID NO: 378774 - DNA, 5869 bp, Cannabis indica
gacatggacacaaacaaattaggtactacatccactgatttgccagaagaacaccaacatgtattcttaacagaggaccaatgttttgatgaggagaacttggtacttactaaacgatgccattgtggattttcaattgaagtagaggaattataatatcagcaatgagagtatagattcggtgttgtagagtgtatcagaatcggttttgtatatgatagtaaggggagcacaaatcttgctgagatttgaaacaaagcaggcatggaaagcctcatggttgcggaaaaatctcacatgtactacaaaatataaggtttattatttctctctttatcccctttgttaaagttaattatgtttacactttatacgtcatcagttttgatttttatcccccaaaatacatcaattccgtacttttttattttattcaaacttttacattttaccgtacattaactttctaatttttttcactaatatcatttaaatattctcatcaaatatattttatcttttaaaatttgaaaaagaactgatggaaaaattatgcagcagctgatggagtattttttttttaattatatatattattatccaaatatttggagggagaaaagtttacaactacacttagtcataaaagatatgctagatgatcaaagttgttccaacagaaatagatcttagcttttctggaaagcttgaacctactaaaatacatgtcatagaaacacacaattctgatccatatttatttatgccccgcagatgtcattttaactaaccttcaaaagatgtagaactgaataataacaggaaagatgtagaactgaatgataaaaggaaatcgtataaacaaaatttgtcatatgcatatggtatgtgtagataaatcattcaccaaacacacgtaatgcacatgcttcttttcatctcacttcactttcgttggatgaagtgtttttgaaacttcgtggactttacagtaacatttttactctaaattcaaagaacaaactctgacagcaaataaacatggggccttcatttctttctttggcctgcattccgatcacccgtttaagcaagtaatattactcagaaaaatctctctacaccatttacatgtcaatccacaagcccttccggccaaattctttaaaacagacataatcagactgaactggttgcatctgcatttattgaaataataagttacacctcagctctagtagttctttatgtgttgagacaaaacaatatggtctgtccatgtatgttatccaaattttattaaattggattagaagagcatacgacggggtaacttatgataacataattacaattaaacaacgaaaagtagctcatattaagaaaagagaaagggagagagtgaaagtcttaccattatattacttcaatgcaacttcaccaagaccttcattcatcatcattagtattcctcatttgaacttcaatgttttttagatcccttaaatgctgtaaaatctcttggagaagatccatccctttgtctccctttttaatggaactcatgcaattcttgaggaactccttgtctgcttcaagagcttgtagcctctcatagacatgatctacctcctcttcaatgcctactttgttgctctccaatgcaaacatggaagctgaggagttttgcatatcaacaggttttgatgtgaggttttcttcagttatgaaatgttcattatactcatcgccttcacctgcagcatctagaagtggaaggagcttctttgccatggaatccatgtatttcttcctctcagtgtagtcgtaattcatttgattgccaacatctgataccccattctctcctgtacttctgctaaaatcatggttcccttcaaagtcttctatgtttgacctggatgaatctgcaatcagtttaagatcattggaaaatccctcgtcttctcctcccaattgtattatcttctcctccaacgcttttagctgatccagaatagacagcctctcctcctcaaattcagtcaaagagtcatcaagaatgcttatgtgcttcacacagtctagtgctatttcctctaaaattttgtactgcatcagctggtgtgctgatgtcgtttactgtttttcttggtcggtcacagaggctgctatcttcagctcttaattcgtggtttagatcaatagataggccatcactatcccatgtatggctgcaagatgcagagaattcctacttcttacgcttccatctctaagccttctaatcatcctcattttctctttttcctcataatcctgtaccttctttcgatattcatctagttccttttcgagttcttgcttctccttctctcttttgaccatgaggtcattgagcagctgcaaggcttcttggtcatactcagattgttcctccatcatcctctgatactgcaacgcctccatctgcattgcagccttctcttcttgaagccttgttatcattgccatagtttgatttgcagctattgcagaagcacttctctcctcttctaattctgtatataaggcacttaatgcctttcgttctgatttcagtgctgttttaaggtgttccatgcttataactccatcaccaccttccacctcacttaaaacacttccatccaaggactccttcgacccagattctcttttttcagaaagtaacattttcttatccaagtgatatagactatcggtagaagttggcgtgtcaggaaatttctcttccttcactgcattaggctctgaaagaatgcatgagtgatctcttctctcttgattggtgtcaaagaagctcgttgtttcttgttcttttggtttcgcagtaagctccagatctaccaaaacaagttttgtattagaaatctcttttaagattcagcagattctgcattagtacaataatatgattcattgagaaattacagcatcaaaattgaggtttaccaaggtcggtctgagccacgaatgcatcgcaaggtttactagaattgtcaatatcattgtgttttgcaggagagtgttcttgatcagcaacacaatcagacaaatgagctcgctccacagttttcgattcaatcaactcatccaaagaatgttttgcattctcaacttctgtttcttacattagatcaaagagattagcatgagaaaaagccagccatgcctaattgtagaacaatgtagtacacaaataagaaaaaaataaaagcattttctttgtacctggactgatatttggtgttacaattgcttcttcgctcgcattgatttgtatagcatgtacttcttgagtacaaccaacttgttcactttccatgctgaccaatttgtgttttccatcagcagcagctctaactgaagattgatcagctacagtcatgaccatttctaggtttccagctcttttgctgtcactctcgttcgtcttgtttattgatccttcttgagagactttgagtcccgacaacatcatcgattcaaaacgtaatttctcatcctggcgattaccttcctctttcaagttttcttcttttaagctgctgcctcctcggtctgcttgagttgaagaatcgatcaactcaataggaaccaatctatgattgaggtcaaatattctaagactattggtggaggtgcattgaacatcttcaatcaaaatattttcttcttctggacaatggacagtagtaaaatccgagctctgctgaacaatctcactgctgccattagaaccttgtcgggcaatgtcaaaggaaccacctttgctatcttccattgcttccttctcataacatataaacattgatgaggagcttagacaatcttcttccatggtatctctcgagttaaagctacaaacattagaaggaaaatgatgttcatctgtaacaagttctgcctcatcatgttcttctccattacttctcttatgtttttttagcttatcagaaagtattctccccagaaactcacctccattgttgttctcaccttcatcatcatccacagcttccataaccaaatctcctttctgaccatactccaaagatccccaagaaggcctaaacaataagtatgaatctaagttctgtctcctactcaagttctcattgcagcaacagcactttaaaacagtctcttcatcatcatcaccatcatcatcatcattttcaagcttgtcattacggctcggctgagaagccaagcaatcccagcacattttgcttgattctgccagttttcgatgatttgaacagaacccaagctgggatatctcagcagcatggttatcacagaggagatctgtaacatatgacctcttgtgctctcctggttccaatatgtgatcaactcttgaacaccataaacatggcttttgaaggccaaagtagctagcaaacttggtgatcatgtaactgaacaaagagttaaggaggaggagcagtatcaacacccattcaaggactgcataaaccagaagtagcactagtttgtgtgtgccgtttctgtgaagcatggttgcaaacctgttggcagccatggattttgcttctgtttatttgttctatctatctatctatctatctagagagagcagagtcagtggaaaagagagttttctctgttaaaagagaaaaatatgcctctccatatgttgtattgtttttttgctgcattaccactacaatagtattgctactattttatttagaaaaggtaataagatcttttgtttggtgacaacagtaaattacacctaaaagtaactatatgttcagatactttataataaattgttacattacataattaagaatgaatttgcatggattgatattaatttaaggaaaaagaaaagttcaatgaagctaaaggtaacggtaagaggcgcctatataaagatgtttcttccttctttttggaaggtggtggggtctacaagactacaacaactcaatagtttttattaatatgtttacaagttacaactttaattctgttaagatttgtcttttgctgggttcacctttcccttttctcgtcattttttcattttttatttgtaatttggaaaatgttttttgtccgaatatacaagggtacctatatatttagagcaagattttttatttttttatttttttattgcagggtgttagttgcagcattagactagtaattaattaatatgatttccacgttgagttcactcaagacttcaatgaattattttggcacggccacatgatccgttgtgacaaaacaattaggcataagcaataatcacataaaaatgcaatgaatgggactaatttttcttaaagcaaaatgtggggactaaggaatgatgaaacatgggtgtcaaatagtggcaagcatgagggaaaggactcagttaaaagaaaaagtgacatgaaaaagtgagaggaaatggatcaacatgagactgtgatagtgagttgggagctttttattgtattttatcattattttttatttatttataataaatggaacaaagataatgatggttaagtaagtgtattgctcttttagacctctctccgctttcttttacttttggaagttgaataattgtatggaatattgtttcaaaagtccaactaaaagcttaccaaattaaagcttaattgaaaattagagaaataatagaagaaagaaaaacctaaatcttttaccggggtaaatttagagagagaaaataatggcacgtttactatagagtattcagaattgaaataaattaatggagaaatgtaacagaataaataaaaaataatcggaatcaatatttata

SEQ ID NO: 378775 - DNA, 2810 bp, Cannabis indica
ttttttttctttctttttttgtatggaaaaatcataacataaaagtttgagagagagggactagtaatccttaatagagattttaatcatttgtttattttcggtctaaataaggatagatttttagttagagatgtgttggattctgatttctatgatgattatgaaagaagttcacatgtggaagagttggatggaatggtccatatgggtatggcccatttttgctatttttattttctttttcattaattatggaggttggaaaatagagaaaacttgtaggtgtgacccttctgagagttaggccataccaataaaatgggacccacttagaaggcagcaacaggggctcatttgttatttgatttgtgtatttagtttagtggctttgagccactaaaagtttttttattcaactacaaaaacaacccatgactaatgactttagtattttgacataatactgtttgttttagagcccccctccttaaaaagttgaaaatattagtgattagttatgaaaaagcattaaagtaagcaacatgtttggaattatctcttgaactgaatgaaatgaaggcactaatattattaataaaaaccaagacaaaagaatgggatcaaccacaatttggaatatagataaaaacaggcacaattatgtgatacaatgttaacagtgttttgcaggagtgttaatggtggtgagatgagataagagcaggggaagttaagaaggcactgtacaactacaactgccatgttcagggattccttggagtagcattaaagactatttctctctctctttcacctataccagccaaataagttttactatgtaaggaaaaacaatggaccagaaagaaaaaaagaataataaagaaaggaagaaagaaaagtagcagaagatttataagttgcatattggattgatgttttgatgatttttatttttcttggttgaatgagaacatgggttctttttctcagacactgctcatgatgattttcataataatcattttcatgcttttatcattaaacagttgcaacaccaccatcatcccccacaatgctgatgataatgatgcttctgctgctttgtcaaatgcctatgcaccagagaactttaatgttcataataatcatctgaatgtgattgagaaagtttcaggaaaagatgagaataatgaagaagagcctaaaagttctttagtggaaaagttcagggttttacttgggctaagaagaggcttccacgtcagaagaacatcaaatggtgactatggatatttttctccagccccatctccatcgctctttggtgaagctgaggctcctgctcctgctccagctccggtgcttgctcctactccggcgcctatgcatcatgttcatttgattccccatgctgcaaaacatggtttgaacaaagttcatccagctgacaagattaaaaaagatgatgatgatgatgataaaagaaaagtcaaaaggattcttatggctgttctagtctcagtaggagttgccactttggtttgtgttgttggtctcatgtgggcttacaagaagtacagaacagatcaaaataagcacaaaagaaaaattactgtgtatggaaaaaaaggaggcagatccaagtgtatgagcttcaacaaatcagctagcaaggtgagcttaaatcctggtcttgatctcttttatcttgattcattaggaaaagatctagagcaacaaccaccatatgagccttctccttatctaaagaaaatttctgaaactattgtcacatcatcaccaaatcaaagcagaccaaatgatactactacattgcctgagagagaggagtctgtccaagaatcagtgaaatctgaatttgagaacatcagtagttctagggaaattaagtcagtacatgaagatgcagattcaaccaaccaagaacataatagcctcacttcctcatctggggttaaagttgttcctatagaatatcattcctctgatgaagatgatgatgaatcttttcactcctttggagattcgaactcgtctaatgccattcgtctttccaatgcttcagtaggtagtttcagtgatgccttagagaatttcaacccaaatgagtggaacaaatctactttaatgtcccctcttgtgaacttatctcaaaactcttctccatctctggatttaaaaacaccaagcaaagatgaatgtgacaaatcaccaactgcagcatccaactcaagtcaaaagagtttaagccctcctcctcccccaccaccaccacctctgcctcccccacgtgtaagttttctttctttttgctcaactagagctgagtctaaagcttcaagctcttccacattgccaaaccaatcatcttctaaagagccaaattccctttctgaaccaaacaaaactacaatgcaagttaatgagttggcttctccttctccacttaggaacccctcaaaaccaccaccaagctcacccggaattcctccgccaccatgccctcctccattgttcagagctagtaatgcattttccaagggcaccccacctcctccaccatcacaatttgatcagctttcggcattgggaaaagatggaacaccgcttccaaaattgaaacctcttcactgggacaaagtaagagctgcaccagatcgttccatggtgtgggacaagctgagatcaagttcatttgagtaagttatatcaagcgtgtttgttctaccatattatgtcgtattgtattatattgtatattattatattgaattgtattatat

SEQ ID NO: 378776 - DNA, 5109 bp, Cannabis indica
ttttttaatcttaaatttttcgcttactataaatgactcggatttttttttataggtcttatcttaaatacatcattataaagcaagcaccaaaaataaaaatgattaatatgattgataataggagtggcacatagattgtttcaaagaccacaaaatggcatcaactaacactgaaaccaaaggacaaaatttcctttttaaaaaataatttgtattggattttgttattaagattaggttagtttcattattttaagcaatttataattaaaaatgataatgacttaataattgaagcaaacatggtaacttgatctttcatgataccaccataactcagataccaaacattaaaagatttatcattattgtttttattgtataactatttgggtttggttggaagttatcctttctttattcccttaattaactatttttattttttatttatttataatctatttttttttcttagccataaaataggatgtgagattgttgactaaacacacatacaggtgtaaacaagagagacaaaacaaaagaagtagaaaaatctgaatagaagaggagcgtagttttactatactagccagctactacataaaacaaggagaccactgtaaaaccctgttctgtgctccaccatattagtccacccaaaagggagggaatttctctctcttctctcttactactgccaacttccggatcagtctctttttccaatctcttctattacaagcaattattcatcattattttacttcttcatctttctcttcctagttcctcctcctctgtcatatataaataaataaccgaaaaagttttcttctttcagtttcactcttcctcaccaaacccatccattggactgccttcctccggttaccggagaccgccttaaccggacagaatcccctttaacggctgagtagaatagactaaagtcaaagtaagtaattttttttccaaatgggttgcttcaatcttcatcttcgtgtcgttttcttcaaggcttcttaactttatccattcaatcttactgtagatgaaaagtattacgctcccaaggaagaaaaaaaaaatcccatctttccttttgtaactaacaaaacgattttttttccatatattatacatacccgaaagctcaaaaggctttcttttacttggtttgatgtattttacgcttctcaaccaactgggtttagctaatttggtcccattgttgtttttttgttctttcttcagatctccagcattttgtcgtacagatggggaactgtttcgccaagccgaagaaactttcgtctccggtaatggcgccggtttcagtttcggttccggtaacgttggctaaaccgagaaaaaatctacggcggagatcgttccccacgaccaccactcgaccgtccggctctacggcacgcccatcagctcccacacggcttacatccggttcgcattgcaacacaagggagtcccggtccggttcaccccatcgatctccgacccgcccttaattgaagtcgggtcggagcgggtttcgggttcccgtgagtctcttctccaatacattgagtcaaagttccctaatccgccgctggccgttaaaaagtgtaacggcgaggatgcgaagccgtgggtagtgactttaacggcgttacagcacaggagcatgacgtggcacgtggagaggcttttgaggtggtcagaggacctgggggcgcgtgggggaaagaagagaggcggctgtggtggaggaatcgacccgcgcgtggggactccgaaaatggaagtgaagaaatttaacaggagctactctcagttgctggagttgatgcttgaacacgctcagatggaggaaagagtcctctttccaattctcaactccgccgatccaggtttccattttcattcttattattttaatttttaaccaaaaccattttagtataattattttcatttttctgtttttttcatcaattttattatagtaaaaaaatagtttagattggatttttttttccccagtgatttttgtgtaggatggaatgcaatctctctatattaattcaatgatttttcttgtgattttaatgatttgtgtttaacagtaattaaaaatctgccatggaaatttaatgagtataaatgaaattgatttggattttttttttattgtgcgtgtgtatgccataattaaggtcatgtttggtatgaaacatttattattgtatttattaaatcttgtgtgttaagcaaggaattcatttggtattttggatgaggatagggtataggattatgctattattgggtttataaagagacagtactatttccaatgttttgttgttatgtaaaatgttaattgtgttgatttgtttttaaggaaagctgttacacaagtttacttaacttttgtctaagtttatattctaataagaaaaagaaagaagaaaaatacttaatgattactttggatgaaccatcttttttttagtgttatggaaagaggtcgcctctctatgaagcaaccctttttgtgtttttggagaatattgtgtagcctataaagctgacaatgatgatgatgataatgatggcaggaatatgtaaagctgcaaatgaggaacatgctaggcacctacctattatgaatggcatcaaagaagatataaaatccattggagttttggacaatggcagccctgcctatctagaagctttctccaacctttctaaacgcctcaaaacactgctggtgataacaccaaactctcttatataaaagtgaatatggtactgttgatttatacatcacatcgttgtttttaactaacaatgctttattggggctaaaactaacaggaacactgcaaagagcactttgtggaggaggaaatacaagtacttccctacatagaggcaacggaactgagcaaaccgaagcagcggagagtgctagagcagtcgctggatgtgatgcaagggactcactcgcgcttgttcaactttttcctagaagggcttcttcctctcgacgcaatgcagtacttggacttggttgccatgtgtcacgacgaagaacgaatgtcctccatgcttcagatgatcgaggagactaataatctatgattgaaattgcagagatgagttgctgtgttctgtttttgcttatgttaatacacagtgagtgagtctctcctaaaatcactgacttaacaagacatgttatgggttcttttcactgctttcttagccaatgtgagctccattttctagtttgattctgcaaattgtggtcaatgcacaagcagaagggtccataaagaggagcatgtgtgaactgaagaggagatgttttttactgttacttttttttctttccttaaaacaatattagttcagtgtgcattgtaaatatattagtacttggatcaacttgtaacaaaaatttgtgctgttttgatattaagagaaataagagtgaaaaatgagacttttgttgtgatcgtttgtttctaaccaaaatagttataaatgaataagaattttttgtaggagtcacgtgagagtgacatatctcctgagatggcattgtttaaagcacattaaccaatatgatttgatctctcattgtggataatatatacacataaaataaaagaaataatatcagagaccaattattatggagttcagatatttgattggaagatgcataaaagttcacatggcttgcagagtttgcagggtaagttcagccacttgttaatatgaatcaacatttttttagtattaaaaatgattaagaaaagagtggaaatgagatgaacatggtgtgtggggggtggtgtcctcttttgtatgttttaaatttatgagaaaggggtagataaatgaatgatttaaacttccaataaataaatgattgtggaaaatgacattcactagaaggaaagtttgctgggtttctgtctaaaagaaatgagggccccaaaaaccgaagataataaaaattaaaaatagtactaaatgcaaagaaaataaaatactactagaagccacttactgccattatcaggatagaaactaattaaagtcaaatgggaaatcatggtaagtatgaaggagccataagtacttgttgaataattccacactactttcatttcccttcaactattcacatgagtcccaagtagtgctttaaaatatggctggactttttgccacatgaaattgacacgagtttggaaggcacgaacacaattaggcatgaaaaaatataggtttaaacatgatacggtacgatgctacaaattagcacgatacgacacgaaaagtatgtccttaagcacaatacgacatgagaagcatgaaagacacgacacataaacacgaatatactaacccgaaagaaacgacacacgacaaacctaaaaagacacgacatattataaaactttataataataataataataataataataataataataataataataataataatatgtaaaaatttattaatttatttatagggtatattaaatttaagtatttatatgtaaatattcaaactttaatgatactaataaatttttttatatgatcatctgtaaaatattattaaaaaattatataaatatatgtaaagttataaaatatgcatatattatattttagtaattgtaaaaataatgaaaaaataaagcacgaatttaagcacaaatatgaaaacaagatgccctatttaagaaatacagatcgccacgaacaaaacatgatacgaatccgagcacaacactaaaatactaggcttacggaccgtgttgggcctactctttaaaagtatcgacacaacacgacacaatttatattttttgtagcacgacacgacacattttttgaaaaacatgaataattataggtcaaactagcaagatacgcacaaacttacagtcctagtcacttgttttatgtagagagttcatgatttgagtattctttgttagataaattaacaattaacccaagatctatttgtatataacatagaacacaataataagatataat

SEQ ID NO: 378777 - DNA, 2129 bp, Cannabis indica
catttagaacaagaaccaacaagaacaagtatacaaagaactaatatagaaagttaaatgaataaatagaaacaaaaacttaataaactgaagacacaaaccatataatggagaaccgtcttactgctgaggatctttatttaataattaatgttcaaacacaaagaaattacaagcaaagataagaaattaccagcacaaattcttcatataagagttataggatcagatacacctatactatgtacaactctcttctctcttagtttctcttatctctgaaaatgatcacttaggttccctctttaagacttaaactaggagttaaatatatatacttatacagttagtgagctgttaagaaaaatcaactaacataactgactcttatctaaggggtcctcagtcataactggacaatacttgaaactgagttacagaacaattccaacttaattcagctactagtattgaaagataacatgttctcaaagagccagagaggctcatcaacatttgtcaatgttaagtaaactcagacaatatctaagttttggtaagctaacacttttggtgagcatatcagctggattttccttagttttaatcttcttggcttgaacttcatctctagatacaatttctctaatgaaatgaaacttcatgtctatgtgctttgctctctcatgaagcattggatttttgataaagtgcaagacatttttattgtcacagtagacacagatttcatctaagttcagaccaagttactttgccaatcctttaatccaaactacttcttcgaaagcctctatagcagccatgtatttggcttaagtggttgaaagtgctaccactttctacaaatttgacttccagctaacagcccctcctaggatagtgaaaaccagacctgtcaaggatcttctggtatccaaattagctgcataatcactgtccacatacccaacaacatctcctttagaccctgcatctccattaaagaccaggcctaggttgagagtaccttttatgtaccttagaatctatttaactgttgtctaatggtagtcaccaggatctgccatgtatttgctaacaacacttagagcatcatccaaatctggcctagcacaaactatggcatacattagacttcctactacactagtgtaaggtacattttccaagagcttcctttccttttcagtcttgggacattgcttttgagacaatttgaaatgagcagcaagaggtgttgtcacaagttttgaactgagcatattgaacttttctaataccttcttcagatagcaggcttcagacaggttgataacaccagcaatactttggccaatgtcaattcctaggatcctttttgccttgccaagatctttcataacaaactccatgctcagtctctgtttcaactcaaaaatatcatttttattatttcctactattaaaatatcatcaacatataaaaggaggtaagcattgttatcaaagtaaacacagtggtcaaatttacttttgttgaaacctattttagtaatgaaatcatcaaatctgatgttccatcgccctggagcctgtttaaggccatagagagatctctttcggaggcacacttgatctggatttccatttgctgaatcccttaagttgctccatatagatttcttcctcaaattgaccatataagaatgttgtttttacctctatttgatccacctctagcttgtctcttgctgctttggccaatattactctgattgagatttgtttcaccactagtgagaagatttcattaagtctataccttctttctgtgtgaaacctttggctactagtctagccttatatctttccatttcaacacccggtatcccatctttgtgcttaaatatccatttgcacccccacaggccttatacccttcggctttcgcaccactatctaggttttaattttcaccaatgattccatctcattgttcattatgttgggttttatgccctaaataaaactcattaaaatctgattagttatcaatttagaagtgaagcatgtttgcatgtatgttacatgtttatggtttaatacatatatttgatatatgcacaaaa

SEQ ID NO: 378778 - DNA, 1678 bp, Cannabis indica
tcttcttcttctacgggaagcatggtcatggaggttagatctagatggagagaggacacaaatagacgtcttggtagttttagatttgggaaaaattgatgtaagtggtgggggtggctgaccagagagggattagaaattaaaataagagtttataagtaatgtttaagtttgactttgtgattagaagtgtagtggtggtgggtgatggtggggttgctggcaagaatggtggtgttggtaggaatggtggtattgtggtggtggtggatatggtgttatagtggtttggtgtgtccacgaaaacaaagagagagtctttattttttggaaatataataaaagaaaatttaagtatcgttaattgaaaatattataattatagtagtaagaaacatggttaatatacatgtaatactttctgctaatttgttctcatttttacatgcagtcaacaactctcaagtgtggcagtgtgattgtggtgagcctttttgaccatagtattagtgacgcctactctgctaacatgtttatattatcatgggctgaatttgttaggtctaaacctctcacctatgatcccccctcattccgccgatctttgctaaaccctagccgcacctttggtagcattgacacctcggtttacgacaagtatgttagtgttgtcactactccagaaaacacctcgccaagaaacaaggacaatcctatcaatcgcctctactatattaaagctgaacatatcaacaaccttcaaaccctagctcgcaaaaacaacaacaacataaccaagattgagtctttcagtgcttttttatggaagttgattgccaaatcttctactagtactgatgttgaaaagcaatgtaaaatgggcattgttgttgatggtcgggagctattaggaagaggcgatggaaaagaggatcataacgcgatgagtaacttcttcggaaatgtgatgtccgttccagactggggaaaaaaaatttgtgatctcaacaaagagccactcaatgagattgctagagatgttcacaagtctttaaaaggagttgtgatgaaggagcattttttgggtttgatagattgggtcgaggctgttcgtccaaagtcaggaatgttcagattatcaagctacacaatagatgatggaccatctattatggtctcatccggactacgattttcaatgggagttgtcgattttgggtggggtagacccattttggggacattttattttcccatggggatagaaaccattattaaaggttcctacgtgcacccgacattgagtccaattggcaatggagattggctggtgtatatgcacttatttaagtcacaatttgagttcatagacaaagaagttttcaattttttcaagccattaacttttgattaccttagttcaatcatggaccagctgccttacctgcaaaaagatgatataagcataaagagtaaaatataacatcatataagtgatcatgcatacatatatatatatatatatactaaattaatatttgtaacatataatgcatatttgcttaaaattactattatctaattattaatataaataatgatgataataattgtaagaactcggttttgatcgagttaaaaaagaaaaaaatatataatataataaaataaataaata

SEQ ID NO: 378779 - DNA, 2052 bp, Cannabis indica
atatatatactctataacaaataaaatatttgtaaattaatgcatatagtttatacgtacgagggcgtatacatcagatacttgagaggagggaagactgagaagaaccatttgggaatgaactcaaagttgcagtgccccaaattgttcatgaagtcaatataaatcatgtaaccaaatatcgctgcttgggagccaattccagtgactgtagttgtagccggtgggattgaaaatagaaagatatatgccaaaagctctgcaaatgggtgagttacagctgcaataatatagaaccaaaattaatttatatatgctctgcttgtttaacaagagattttctcctaatcccaagtgcttacaagtaatgggctcggtgacaatggaggaatggtgatgagagtgataacgagagtagaggtaatggtggtgtagagctctgtgaagccaatagtataagaattccacaacaaaagcatgaagcacaattgttataattactccatctgtcctccatatagctatgtttctaccatttggaagtatataggccgccaaataatgcagtattgcagtgaacaatatttggtcatcccttaaaaaaaaaattaaatgttaaattaaaaaaatagacaattatatcccaaataaataaggtatatgtataaaccaatttgtttctctatcgacttgatcaaagtcaaggctcttgtcaacgattcggttgtttcctttggctgttcgataacgagagagagagagatacaaatctgattgtgagccattcttaacagcaaaaatgggaaaatgagaaacgttgaaaagtctctctccattggatccttctttgttacaaacatgtacgtgctcttcatcgcccatggtgccaataataaatactgcaaaaagaaaatgaagaaaagaaacgtacagttaaattattacgctctagtacaaaaatatgcatacattcatattataacaagtgattccattttataataagaagataaatattacttatttaatttgtcataagatgtatatatacatataatatgctacgatggtatttaattaaccttgaagttcccaagtggcttccaaggccaatctgaaagtatcccaaccccagaagccatacatatagcacggcaataataaatgtttttttttctttgttcgttaaaaactaagaagtataaaatttgatgaaaacagaggagagctcgtgcactatatataggtacattttcaccacaatttaattcaaatcgcgttcaataattaaactaccctaaagtaattgttctgactcttgaatttgttttgggaaatttgatattatatgcttaaaaaatagataaagtgtttttatattctaccctaaatagtataaaaattttatatccaaataacttttagtctcaataatactctccttatttgaaactcccattctccctctaacactcattctctcgtttctctctctttctctaactccccaaacccacacacaccaacccaattgtcaccaaaactactaccacctccgatgaaacctagcaagcccaacaaaaccaccacctctgacgaaacacgaagtccagacccagatgatatcgttaaaccaaattcgaaagggaaattgcgaaaccccaaacacacatctgaaattacaaaaaaagatatttgtctaaactttttttttttattttaattgagttttttgttgtttgtgcttcattgtaaggaaatttgtttagtttaggttcaatttttgtgttttttcgtttgaatttcattgacgcctactcgagttttggctttttcgtcaattatcgacatgtcgcgacattgttcaatttcttctcgaaatgttatgttagttctttctattcgcgatgttttcacaacatggtgcgacttatttgcgagttcgttttggtcggatgtgcattttgaaatgttagttgtttagcgatagtttcatgatgtgttgcaatatggtttgcgacattgcaggaaatatcccatgttgatattgtc

SEQ ID NO: 378780 - DNA, 1354 bp, Cannabis indica
gaagcggggacgttacaatgtcttcaaatggttctccatcctttaagctgaattttgctgtcgagcttgtgggattgggacagattttggctccctccatatgcaacctgataagtatgtcggtaatgtatttactttggctcaagtacattcctatagcatctctataaacttccacacccaagaagtaatgaattggatctaagtcttttaatgagagtgctgaatttaatttgtcaataaagtaatgaagcagagaattattgggccctattatcaatatatcatcaacatagactagaagataaaccaatgtgtcacctgtgccatggatgaacaaggaagtgtcagatttggatgcctgaaatccccactacggtatggtatgtttgagcttttcattccaagctcaaggagcttgctttagaccatagagggctttatgaagtaagcatacatggtctggtttctttgggtcaacaaagcctttaggttgttttatgtaaacagtttcctaaagtgtgccattgagaaaggcattggtgacatctagctgtgtgacagacgaatttttggacacatccatgctaagaacacttcgaactgtaacaggctttatgacaaggctaaaagtgtcttcataatcgattctagtggtttgaagaaaccctttagcaaccagtcttgacttaaatttgtccaatgagccatctgcttttaattttatgttgtgtacccatctgttgttgattatatgcatatcaggttgaggtggaactagagaccatgtgccttgtctttttagagcactgaattcatgattcattgcagcaaaccaatgaggattttcaaagttgctttggtggacttgggttcactgggtaatagagcttcagggagaggatgttttgtggctaagtaggcttttggttttaggtttccagtttgagatcttgttttcatgggatgtagtctgacaaagacatcaggatttggagcaggtggaggggaatgaccttgggatgttggtggcatggtggatgcatcactgagagatgtttcaagtacattaggttgtgatacaggctcaggtagagatggtattgtttcaggtacattatgaggtataacagatggtggaattgatggtggatgtagtatgatgggaaaaccaggtggatgaggaggagtattttctggttcacatgtgggatgggatggggcagtgggcaatggtggagttggggaagatgggtggattggagttgtcacctcaggtgtgaatgtaccagaatgtaaaccaaaaacatgattagtatgggtgtaactgttggaatttattttaccaggatct

SEQ ID NO: 378781 - DNA, 1108 bp, Cannabis indica
gtaaaataatttaccaacaaatgtgtgaggtaaaagtaaaagaaaaaaaagtagaatttagtgaggtattttaaagaatagagtagagaaattgttgggattgctctaagtattaaaatataccttaaccaggtataataagggatctgtttcgaaacaggaaagatatggagctggtatcaaaaaacaaaaatggtcaaaaaaacggttagttgatagatgtgctcccataaacgtgctagaatttctgagagtatcttcataccaaacaccatatgacagcggatgaatcagttaagagcaagagtatgttctgctcctctgttagacatagttgttaagggagtctacttttgaactctctcctttttttttctaaaaatgtgatcgttcattataaggaaaaattagacctccgggtcattacataaaatatttttaggaatggcagacataggaagacaaccaaaccgattatgggtaaacacccacttagccacattatgggccataaaattacatgttctagaaatattacaaaaaagggaattggcaacagaggacatgactctaatacaaaatgaggagtaattttcaatttccaacctaggatccaccctagtaatggaattgaccactgccttggagtcactctcgacaataataaatttccaattttgttccaacgccgcctctaaagccaaacaaacagtcgtcgcctcaccgcaaagagcgtcagagcactccaaatttgttgaggtcacccaaatcacctcacccaggtgatttcgagcgaccactgcaatgcacatgtgatctgagcctactttgacatcgcagttcagtttgagcaagtcttgaggaggcgggcattgttttgaccaaaaaccgtcagaaatttttaatgtgggttcctctttttcagttcataatttgtcaccccctattttacgtagttttttcttatttattttgtacatccttttagtgcatgtgtgacatgtccttccttttgatgtatccttgacgcatgtcctttttatttgctaaactctatttgccacgtgtcttattgttgcgtgggtggaagatgttgttgggttttatg

SEQ ID NO: 378782 - DNA, 3310 bp, Cannabis indica
cgcctaaccctacaatatttgagaaccaagaaacaatagcaactgctaagtaggtacccagattaaagtcgaacctcagaccttggggggaaaactcaatgcctgaccatacccctttggatacatgacctcacttatttgaagagcgaaaatacgaggagccaattctaagtctagttacaaacccattttatatcagataagtatgaactttgaagtcgcaatacaaaaatcaattcagtagtaaggtttctctttccagtttttcaacaaccccaattacgtagaagacgagaaaaagaactttataatagaaactccaaataccacattttaaaggggacagcagcctttcagtgatttattagtttacattgtcacgtatttaccacacaacaaactgtaaatggaatagaaaagctcttcaatacctttgatggttgttgacctccttctacatcatgctgcaaacgaagaaaaacagattaagaattgacagaaggaaccatataactaatgaatatggaaaagaaaattcccttaatagtgaatatagctgaaagacggttataacacaaagcaccaatgcaatgactatgcacaaaacatgtcctactagattatttcttaactaaatacagaaaataccaaatgcaaaactttaaccaaaagtaaacagtgctgtcctaaaattcaaataagcatttacagataatgtaaccatcaggagaacagaatgtcaaaaacggaacataatctgtacaggtacagcaataaaacaacgaactggtcataaaatacatctgattgctaaaacttaagatcaaattgtaggaagagggaagggaaaacaacttacggaattccatttgttcttccatttttcacatgaaactggagtagaatggaacgaggcccgataggttatcgtagatgacggtgatgatgatgaaatcaatgaattcttcaaaagcaagacgttgcgccatctgggcatcgccatattgagcaaaattttgaaagaagtaacagtgtgatatatatatataccttttataatattcttctaaaaatactccatgaaattaggggacttcagcggaaaggattaggggaatagagagagagagtgtgggcgttctaagaccacagatgcgaccgtgagaaaggaaaggcgccgaaggtaggatgacacttgggcctaaatctgggcaagcaggcagccagaacgagaatagccttaaattttgacatgattcaaacaaatgtccttatttcaaaaaatttaacaaaaggaacaaatttaaaaaaccttacctttaaccccgtacaccctcacgtttttcactttgtttcagccctcactcacagtacaactctcttcagagttaccggccaccgtcaacgccgatctctgacttgaagctaaaccctctcaccgtcatcgtcgaacacctccgacgagaaccaccgccgtcatgattaaatcccgtaatttatatcattctccctagagctctctaattagatgattaattgttttttctaaaatttattttattaattattttaaattttaataattatttttgtactatatattaatattatatatttaaaataaataaaatatattaaaatcacaaaaaataatgagattttaataatgtatttaagaaaattgatatatggtgtaatataaaaatacattgtaaaatattaaaagtaaaatttttgtaatgtatttttttgttgagagaaaaacaatttttgtaatgtattttaaaaatagaaattaatgcactccatatcaaaactctattttttattaagggaattactacatatactatttttttaactttattttttaaatttacagtttgagtttctaaagtggttgcagcgctagttgaaataagggtttctatacgattttttgttccaatttaggttgcagcgctagttgcaatagaggaatctatgtagaatttcgtaaaaatacataaaaaaaaaaactattttgaaatgtaaaaataaaaaatattattatttaacaattttttaatgaaaaattaaactttatttaattatcaatctcttttaccaaacaatctttatttaaccatcaatctcataatactaatagcaactttagtaaatttatgattcaatatattagctaatcgtttaaaacaataaatagaaatatttctcaaactagcaagcaaactcttacaataaatgacaaaaccaaacaaaaaaattcatattaatagagtttcgtaatgcatacaccaagccaagacaatcagtctccactattacacattgccattcttgttccttaatccaactaagggtctcctcaacgtccattgcctcggcaagttctgggtcaacggtaccaaatgaaaaaaatgtgcaaccttctatatgaaaagccacttgaattacgggcaactatacccaacccataactttgaccaccattaaataatattgcatctacatcgaccctgatactattttgttgtggcagagttcaatgctcacttccatcacccgcctgaaaatcagactgtgatgaatctatttcagatttctgagcattcttccatcgaaggtaacattttgcaaagacaaaatacttttagccctcgctaatttacaattccaaaccaagtcatttcatacaccccacatagcccaacatacagttgtcaaaagatactttctcttcttatctattcattgaaatgcaacaatacaccactaaaaaaagtttcagaaggtgatgcagcggtacctattccaaccctgctccagcatgtttttactgcctcacacatgactaggtagtgtaaaattattttctcataatcacgagagaccgatcataaaggactaacctccatatgtttggatcgcaattgtaccatggttggaagacatcctgacgctgcacaccataacatattttttatttttggtgggagcttcaaactccacatcttatgcaaggaggaagcctcattctcctcaaaccacctgccttgcagctgctgttgtaaattgtaggcgctattaacaacataagtacctgaagcttcctttgaccacactaaatgatcaaccacttgagcaacatgcaaatgaatgctagtaatcaaactttgatctctcacctaaaaaagatttgaaatgaggtctatgtccaacctagaaccatccatatgttagagtttatgtcctaaaagcaagtatttaatggataatatattagagaatatatgaaatacaagtataa

SEQ ID NO: 378783 - DNA, 1839 bp, Cannabis indica
gtccaagcttcatccaacggccaaaaatgcacatggaagctagatctatgaaacgaactaatataatatctattaataataaaaataataaaatattacatttttttaaacaaaaacaacaaaataatattctttttttttttttttctttgaaatggatataatatctaatttaaatttaactaaacgtatttatttattttggaaagaaactaaacttattcttatcatattagaattaatttaaattaaacagctaatcctatttccactcaaattatatatatgtatctatatatataatataacaattgttagcattagggtctgagcaaaagaaattattaacgttattcgaagcaaattgtttttgtgtttagagagatgaagaggtcgatagacgaggtttataacatggattctcatgaactggaggagccaccatctatggactgttctctggaatttgtaagggtgttgaaggacgtacttattcccaacaaaatggataaatataatgcctttatgaatgccatgaaagagttcaagaatcaaagattggattatgaaactttgataaaaaagataactaatttatttattgaagaccatcaacacttgatttcaggtttcaataccttcttaccaaaacagtatcggattacagttgatcatgagaaagatgaagatgaagaggaagagaatgatgaagaggatgccaataatattgatgcacttgaagaagctgaaatttttgtcaacaaaatcaagaccagattccaaggcgaaaacgatgattatatgtatagatcattcttactgattttggccaagtgcaaagacgtaaataagccacctatctcacaagtccataaagaagttgaaatattgtttaaagattatccagacttactcgtggaattcacaaattttttaccccttgaagttcaaaaacataataataataataattataaacttgaccttaataagtgtgtgaattgcacaccaagttatcgtcttataccaatgaattatccaacaccttgtgttagccaaaggacaaagcttggtggtgaagtgttgaatgaccattgtgttttattcagtagttcagtaagtgatcaagagtatcaatcatctaaacatgggagcaaaaaccaataccgagacattttgtttaagtgtgaagatgacatgtttgaattagacatgttgttagagtctgtgaaatcaacaatcgagcgtgcggagaaactcatggaaagtatgaataacaagttagtaagaggctgtattgaaaatcacttcacacctatgaaccttagatgtattgaaatgttgtatggtgactatgggcttgatattttggaccaacttaggaagaatacttgtcgtgtgttgcctgttatattaaatcgtttgtaccaaaaacgacaagagcatgaagcatctcgttctagttttaataaaatatgggctaatgtatttgcagagaatcatcataagtcactgcttcatcgtaccaaacaggacaccgaggcagagatagaagaatcagagagaagttagaatttattaagtggttggttcaatgtaggtaacataaattttttggttgttagagtacagtttatggatcttaatttttcttttattatatgaggcaacttttattgtgttttattatatttgggattcttagttcaggtgttttggatatatatctaattcactaattaattagattgtgttatttgatgtttatgtattttagatatgagtttggtaattttgttttttaatttttaaatcccaaaataaaagtaaaatttttat

SEQ ID NO: 378784 - DNA, 5275 bp, Cannabis indica
ggacgcaaaattaagaacgagtttataattaaagattgtaattagactcctcgtttataattggtttgggtaagacatgtgagtgtgctcctctttagaaatgaagctcatttctgttattgtaactctgatattatcattcaatcaatttggtaatgccagtgattaagaccataacattcttcaggttccatggagagttgagttccaaaattccaaactttatggagcaaatcattggccaaacaaaaaggcattctttagattcttaagaaaaggaaaaaaatgtcacgagggagaaaaagtgacactttaaaggcattcaaaatactctgttatcagattttgttgagagaatccacattgtaattaatactagtaccttgaaggactcattcgatttgaagcagatcaatataaatggaagaagtgaactttggatctgaacttactaggataaattttctatcttgttttttgagttttttttttgattgtatgagtttcatgttagtttctggtttctttagtgaagaaattctctactacataattagcaatttagaaagattctctaagatgatcatttgaatatgtaaaactcactcaaaaaaacaaaatgagattgccttattttctttcttcacctaaagctttctactttatgggggtttcaagatttcctacaaaatcctgctctcaatcaacactcttaaaaaaagagaaggctttctttttcttggtgatgatggagagagagagagagagacaaatgggtatcggacaatgccggctgataccacagctttactcgtctagaatctccgccgtcatgggtattacaccacgtgttttgttcatggttcttcctctcatggagtgtcatggtgaatttggatttgggtatttttctttcagcggagaaaaccaagaaaatgaagaaaagttctctcttttatcccatatctttacatactgccaaaaattgccggccaaatggccggccaagcttcttattattctctttctttttcatgcttttttgctattttcccaagcagagaccctttgtctagtttttttacagaatgggttgtattcaggccaagtctttgacacaatcttcacctgggagcttagagaagttgaaaatggaaaatgggtatgtgggaaaaggtgggattgttggacctagaagatcaacaggtcagacttatccagaaagagagtttggtactaagcaacacagagctagaactgtgaccattgatgatgatgatgatgatggtggtggtggtgataagcttggtagcagcaatgggagtggatttgaagatgggaggttgattggtaatgaggaaaaaggtgaaagaaatgttgggaatgtatcaaagagaatttccatagaggatgagaatttggctgatggatggcctcaatggcttcttgataatgttcccaaagaggttttagttgggttggttccaaagagtgctgagtcttatgataagcttgataaggtgtgtattatataatatgctgttctttattgtgactttgatctttcatggataaccatttttagtccttaaggtgtgtattatataatatgctgttctttattgtgactttgatctgttattgctttttagttaatgacttagtcctatcttaccagagttcagttaaaatttgtgtgttaaagaaagtgaagtactttccggggacataccaagctgtctcgaaaagtttgaaacttaataactctttctttgatatcaataagattactatgttgtaagtttcttgggactattgattggctcttatattgaattacgtacacataagagaattttgtttgagaatatagatgcctacttgattgagaatattgtaagttaatcaaatgaacagttttttgagaaagatcatcatttgaacaaaagagcttggtttggttgaatgtgctttgttgatcgaaatggatgatgttgttgattgttacaggtaggtcaaggaacctacagcaatgtgtacaaagcaagggacagggatacaggacaaattgttgcattaaagaaagttcggttcgaaacatcagaacccgagagtgttaagttcatggcaagggagataacaattttgcgaaaattggatcatccaaatgtattgaagcttgaaggcttggccacctcaagaatgcaatacagtctttatcttgtgtttgagttcatgcactcagatttgtcgagaataatttctagtcccgaaaggcttactgagccacaggttttatttataattctctgtttgttttgtttgtggtgattcatgtcagttgctaatcttgtggtttaaatgcagatcaagtgctatatgcaccaactactttcaggcttgcagcattgtcattcgaggggaattttacatcgagacatcaaaggctctaacttattgatcgatcgaaatgggatgttaaagattggggatttcggtcttgcaaacaattataatcagaaccacaagcggcctctcacaaaccgagttgtgacactttggtacagagctcctgagctactactcggtgctacaaattatggagtaggtgttgatctttggagtgttggatgcctattagccgagatgtttacaggacaagcaatcatggccggtaggacagaggtaattaaactatagtagcaagatttaagatagtacaataattataaagaaacttaaggaaatcatagaactaagactaagaaaaacactttagcatagaacacattacacatttctcataacatgaatttgttgagattcaggttgagcaaattcacatgatattcaagctatgtggcgcaccaacagaggaatactggaaaaaattgaagctgccatcttctatcagatctccacaaccatacaaatcccgtctaacagaaactttcagtgatcttcctatatcgtctttgggcctattgagaactcttctttctttggatcctacaagtcgtggctcggcagcatcagctcttcaacttgaagtaagtgtaaactcaatagcccatgtttaattcataactataggttaaaacacatgttttgctgctgtacttctatgtttgctaattttatgtttggaatcggttgcaaccacttatgtagaactcactcgtaaaagagaggagattggtcaagtagttataaaccaccaaatgatcacacacttagtcaatgtgggatcctaacagtacatgtccaggaaggcttactcttcatggctctcataccatttgtcacaaccacttatgtagatctcactcgtaaaagagaagagagaggcctactcttcatggctctgataccatttgttacaaccacttaggtagaagctacgttttagggtggtaattggttgcttggtcgagcagctgcctttggcatgaaagaaaaaggtgtccatagtcactttcaaaagactagcctaaacaaagagggtatccaagtagttatatgggatcctaagagaatctccaagatctttagctctattgaagtgatttgatatgatttaattctcatatgtatattaacaagttgttttgtctacagttcttttccaccaaccccttggcatgtgacctttctggtttgcctgttatccacaatgatgatgacaacatggatcaagccattgatgaaaaaaagtgagttttcatcatgctaacaacattaagatgttgatgaattgtaatgaacttattttctatgtcattaatgcgaaacacacaattatttttctcaattttccagaatcaggaactctagaattagaagatctcgaacacatcgagagcgcaggaaaaaaggcttatcttctgagaaacctgaagatcctacggctcccaaagaagtaaaagtaagcacattatctcttggtttatgataatgacaccctttttaataccttttacttgaaacaaatacaaaaatttggtttcaatttgcaatgagtacaaacaaggccgaccctaagattaagtgagttttaagaaaaaagaaaaattatttgaccatttcttacacaaacatattgtattttccaaaacgaaaggaaaatatactttttggacacctttggttcgggtgggcctaggtgcaggcctagcccgacttaacttgactcagctctggtaacagagttgagtgatttgcattagtacttatattggtatgtgttggtttaggatgcagagaagactgctgagcagcctaacactcgaatcgaagaaccatttagtaccacgacgactacaagtagtagttcctccggtgcatacttgcatggacagaaagagactagtagcactactactactactactactagtacctcttctagtttatacttgcctgtacagaaggaaaatctactgttttcgccctcacccgttaggccctctaatctaaaggtgtcggtaagttcacacagacattctgatgcgaaacagaccgataagaaccttcctcctttgccaaagccgaaaatacgcatcactaattacagcaatgacaataaaatcaacaggtctgtatctacaagagaatttagaaacttaaaccagagggagcatttaaaacgttatgtggttgatgattaaagtatgctaattaagagtttggtattatagttcttgagcatttggtttggttggttacttctttcaatttttggtattatttatttgaaacatatgtaactctaaacataccttttgggcttaatttttcttcttcttaaatgctggttttatgtaagaacctgctaatggaaagcaaagggaaaaaggattattataattgtaatttgtacatactcttttattaaaaagaaagaaagaaattgttcttactcttgatcatattattattattattataacagcaattattaaatctgaaaaaattgtatgatttaatttaagtttgtggcagaaagagtaccgtgcttgtatttagacttctttaacttgttatttttggaatgtgagagaatgattttttattaaaaataaataaagtaaaatatatgattatacaaaataaaataataaaatggattgttttcttagaaaaaacaaagaaattaagtgtaaataaaactccgcatgtacaattcatgtccatgcaagagtgctcaacttttcttttttgttcatttaatccatctcccttaaaaaatatagtaacacgacccatatatatatat

SEQ ID NO: 378785 - DNA, 3962 bp, Cannabis indica
ttttatatttttatttaattaaatgatatagaacttaatattaatttgcaccaataacaatataccacatcaagcaccacgggtgttccaacatttccaatggggattgtccattagagtaattttggtacatatgcaaggtcaaatttttaagataaattttacatgaagtgttgttatataaacaatgaccacgtgattttttttttttattttttattagaaaaaaatttttttatactttaaaatttattaatttaatgtgatgtgagaccgacaatttttagagttgtcaactattggagtattttttttaaaaaaatgtgacaaatattatgtggatgaaagaaaaaataataataaaataatatttaagatgatgtctgtattttgacaactataaatatgagcatctaccatatgagttgcctattagaatggtcttgtcacttatacaatatggtttaactttcaagagaagtttttagaatataaatgttgagtgttgccaaaagagatggtcatgtcatcttttcttttcttttttctttttttttttaaggaaaaaaatttacttttactaagaaattttattaatttaatatttaaaatgtgatatatgagaccataatgagcaacttttagagttgtcaaccattagagtacttttggaaaaaaaaaaaatgtaccaaatcttatgtagataagagagaaaataaaaaaaaaaattaaaatgtgttatttttggcaatatgcctcccattggagatgctcgtatttctctataaagtaatttagaataattagcaattttatctcttgaattttcgacaatacttattctgtcggctaaaatatactgcttgttaaaaattttcaacaacaaaactaatcaaaactgcaagtaaaaacaacgccaaatactatttattttatctccagcagtcgcaaacaattgattgtgatgagcctcactccatggaattatttagcaacatttctttcaatttcagccaactttgatcacttcaacctcttaatgattctcatcatttcaaagaaattcatgtcaagaaaatcagcatcagaatttcaattctaagacctttaattagaatatcagatatttgtttgtgatcatagacctttagacctttagaatttcaatctctttctctgagtttgaatgtgaatggactgggagtagcccacatatttaaaaaataagaagaaaacaagaaagaaagaatgagatataattatatatttttatttttaacatagctaatagctaatgtagtacaaggtttcatttacatggcatgagaggtttcccacataagcctttgttaccagagtaagtacttggaggaaagttactgagtggtttaccatcaggaatttccccaaccagaagattatttgataaatctaactctttcaactctctcaacttcaaatactcatcaggaatttctccactgaacttgttcttctgaagtttcagtgtctccaatgatctcagatttgacaaagcttctggcaactctgaactcagctcgtttgagctcaaatccaaaatcttcaacgacttgaatctcccaatggttggtgtcaatttacctttcaaaaggttatttgacaagtttagcaactgaatcacaggtgactccttttcttctcctccactactatgctcaatttcctctattccacttgtgaaactgttatcagaaaggtctaggaatgttaaaaaacccatgtcaagaacttggctgaatgatccagtgagattgtttgaatgaagatcaagaacacctagtgccttcaaattcgatatggaatctgggattttcgattcgagtgagtttctggaaaggttcagtaaatagagcctagtagaatggttgtcaagccaggttggtattgagccagtgatgttgttacttgataagtccagttcttgaatttggtttggaattttcttcaacaactcttgtagttctccttcaattctacagcccgccaagtaaatccgagagagtgaagaaagctgagtaagccaattcggtatagagttgaggttcagagaattgaatgacaaagcaagagtttcaacattttggagggaagacatttgaaatggcaatggcccttcaatcaaattatgtgacacatccaatagattgagttgagaaagctgaccgaatgattcaggaatttgacccgtgaatcgattcccactgagataaagctctgataaagacgacagattacccaaactagaaggaatctcaccttcaagattgttataacttaaagaaactctctgtagagacaccagacttccaaacgtggctgggattttcccactgagacgatttagttgaagtctgagaaagcctagtgattgcatttggttttggtttgatgggaaaggaatcgaaccctcgagagagttgtcatttaggtacataaccgaaatggagctcaaatcagctactgataatgggattttcccagacaagagatttgaggataaatcaagctctttcaaagcctgcaaatttccaatcctctctggtatatttccagttagagagttgtcttcaagatgtaaatattccaaacgggtcaaattcgaaatcccatctggaatcactcctgaaaatttgtttgcgttgagatataaactcttgagatttatgaggcttcccaggctagaaggaagtgacccagaaagcctattctcatggagagttatttgttcgagtttagataacataccaatgctttctggaacttgaccagtgagattgttcccatgaagatacagctctgttagattctgaagatgaagaccaatggaaggtgggattgacccagaaagcccaatgaggccactgagatcaagaacttgaagagaagacaaaagcgttatcgaaggagataagataccattcatctgagactgaaaaacagtctcatcggttgaaatgaagcccgggagacgaagcactgtgactcttccactcccagtgacattatcacattctactccttcccatttgcaacaactgagactatcagcccacttcatcaaacgaccagaagaatcataagaaatcccagatttgaaactggttaatgcttcgaggtcatctgggttacatgacattgacaccttaacactatcatgtccttctccaagagtaaagacattatgaatgagaaacactaaaacccagaagcagtaacgaatacccattgtggattttcacaagtcctacctacgcctagctcttatcagcaattttaaaaagtcttttgagtttacaaaatctggacaatgaagggaaacagaacagcggataggtcaaaatgtaatgtttgttttctgtcttttttgtcgtctttacagattgtaattgctgaaaagcattttttgcgttaaatcatggatggccctcactcctcactcctcactccttaagttaacggatttataaagaatatattatcattaaaataaatgtcggaatattgttcttaatgattataaagttgtcgttttggtaaggaaaaaaaaaaatccaatctgtgtacagttacttttgaaagagtcaatagttggtcgtggtaagtaataagaatctttccctcaaaccaattggactaaaaatgcatttaattcaatgtttcctagcaaaatataccaaaaaaaaaaaaaaaaataaaaaaataaaaaaaaaaataggtaaaaccctccaaatttggtttgagtattgaaactcttgcataattacttaaatctcaaaaccatataaatcatatttttggactttttttttttaaattaatgatcttccaattaagatttccaaaatatattatatataaaaaaaattttgcataaaagaaaaaaaattaccccacgttctattttttaatttttttttttc

SEQ ID NO: 378786 - DNA, 8497 bp, Cannabis indica
aaaaaaaatagaacactgtcaaagtgctccaggcgacatatcacctgtgagataaaagctgatttttagcttttcattttattgcgtttttggctccaaatttaattccaagtgtcatgatccaattggttgagagccaggatgacttctacactatatataggatttatgagagttaaaatttgatgtacagactttctaactctctctttaaaaacctctctctctagttcgcaaggttactcattctttccaagaagtttatgaagaagtgcttgacttgcataaacttcacaaagctcgtgtatcccacttatccttactattgaagaagcttcaaccatcaatgggagggttaggaatagagatttcgaaaagcatttatgaaatgtgtcaagccttttgtttactaatttgggttatatctctctaaacctaatctttgtttttcaccctttataattgtgtttactttgtttctcctactattttgattcatattattgtcacattgtattatattggttgattcatatcatttaatccatcttagtgctccatatcttgtttcttgattatcaagatttatgttcatctgcattaatgtgaatcttaatcatcatcttggttcttaattttttaaaagaacatctccaaatcattgtaaattgattgtgtaaaatcatatatccccaatacctaattatcctcatcaagatgaaatgtacatatttagtacattcatcttggagaacactaaagaatagattatagaggtgtaagaagatcctagtgaatgtactaaatatgttaccagtgcttgttcttgactttgatctattagtgttggatgtgatgaatttctattggatctttagttgcatctattttatctttagttacatctataggatatccagtcccaaagaaagaagaaatgtcttggacatgtcaaacctcattgtgatgaacatttgttggatctccaattgcgtctaattgatcaccaattacatttgacggatctcaagtgcttacaaatttctaggaaggtaaatcacgataaattatggtcggaccttcatcgtgacttacagaggtagacttatgttgctcttttggcgtggaagattattgcacgaatggagcatgagtcatagttattgtcattaattgatagaatggatgaggtgaggcaagaatgagagaatgtatgcgaaagaaatttcgtgtttttgttgaagctttgacgaagcttcttggaaaaaaatcccaatctgagaaggtgttcttggatttttaaattatgttgggatgatctctagtgcccaaagaatgataaagattgtcttcttggacaggttgtttttgatggtagaaactcttcaactaacttctggccaaaaaatcatgattcgaactcaaaacttagaatgagggtgaagatgaaatgaaaatcaaaatattaatctatgttccaagccaaaatagagagaaaagtatctttgtgtttctttaagtttggtgttacaaaataattttccaatcccttctcatatctgagagtgaggtatttataggctctaatagcctgagatacatttgtggtcgcaggggacaagctgacatcctagagctgcgaggtgcaggtgtagaaagtggtcttgtgctttgtacctttgcctggtgtcaagtggtctcgagttgcataggtgatggccaatgtgtaacctcggtcaggatgtcaggaattttaggtgtggcaccttcactacttataccctcttcgcaacagaacttgtagaaggtgtggtcgtactcccttcggatgcacgcctcatcctttgcatgcatgcctcgtcctcacgatcatacctcatttgtctttgtcctcaacacttaggaagatttcactaagtatggttgtgtcatcgacaagagcattgttgagaaatttaaggtgcatggtgaccgagtggcctccatgtatggtggtcgagtgacttttattcatggtggccgagtggcctaccaagcatggtggttgagtgacttgctaagcatgttggccgagtgatttccatgcatggtggtcgagtcacctaccaagcatggtggccgagtggattccatgcatggtgaccaagtgactttccaagcatgttggtcgagtggcctaccaagcatggtggctgagtgacttgccaagcatgttggccgagtgacttccatgcatggtggtcgagtgacttgccaagcatggtggccgagtgacttccatgcatggtggtcgagtgacttgccaagcatggagaaataaaatccaaagaaagaagaaggtggttttaggaatcatcggagaagaaataatttgtgggtggacatcaaaagcatctggaacagaaagaaaaacattttgtggagggtctacgatagaggaagacacccgtagaggcttaatacaagtagcttgagtagtcaccattgaagatcttggaacaagaattgatttaggaattttgtgttgggattttcagggtttattacttctgatatcatattaggatatacaagattgatcttatttaatgtgtatcataagatactaatatgttatgaaaacaagagaatgagcacctttgatggagaataataacagagcaatatctagatgtaactaactacctatatgttataacaagaattggaataacaaaactatctaaccctaaactctaactcataatgttcagcaacaatggatgtaaattaagattcatatcacccgataaaaacaaaatgaaaacatacatgatagtgacatttgaaggaggatacaggctgcctgatagatttgaaaacaagttatgttgaagattcctgcaatagaacgatcaagtttatgcaagtagtaagaatgtaactactgtatcaagaaccaaagaaacacaatcttagattgcttttgaatgaaatagtactgtcgaaataagtttcaatcacatcttacacgctgagttttgtttcagtactgagaaaaatattcctccagaaagtagaaggaatggtaccattcaatgaattattctcaagtgacctgcaaagaaataaaactaagtcatataagggagttgatgaacgttttatttagataaaattatcatgtagttggtggaaagatgaacgaccacatgaaaatttttaaagaaaaaaaaaaagagatcgatcttacaatctctggagtttaggaaagcctgtgaaactttcaggaatcggtccatcaagtttgttcttggataaatcactaaaaaaaattaaaatacacaaatgacttctttgttataaagtcagttagaaactgcaaatgtatattgtaagaataaatattcagaagatcagattcgtgcacagtgaagctaaaaagcttttcatgtaaatggatggatggggtatgagtgtgaaattgtgtgtgtgtgagagagagagaataaaacagaattatgcaaaagttatggagatcgatcatgacatacatagtggtgatattgtctgaaagcttgtttgttggtatacttccactgagttgatttgagctaagatctctatatcataaaaatatactaaagttactacaaaaagtcagagctagcaactagaaatcagagaaatgtcagcagataattaagtaccattattgataaattatgtgaaaatttagattcaaacatagaaagaaaactgggagaaacttttaattctgcaacaataagatttaaaacataagactcacaagtagaagagaccaggtacactactgaaatcaggaattcttccttgcaagttgcagttcctaagagtcctacataatttgcaccaatgttattctatcagtagaagaacttaccagtaaaacactaatacaaccaaccttgccccataacaaaatgaaatattttaataaatatatgtagagagagagagagaaagcttacagtttcaacaattgggacatatttgcataagaatcaggaatttcagtcccactaaagttattgttgttgacttgcctgtcatattatgtgaacggttttcagaacaattttacaaaacaaaattattaacttatgaatgatattttcagcatgagaaatacattaactaataccagcactgacatttttgtgtacacataaagaaaatctaagttcaaaaatgtaatgttgtacagaagattagaagaaggaacatacaagatcttcaaacttttcatcattgataattctggaggaagataccctgatagattgttgttatccaacaggctacaaagtgcaaacatattagaaacaaacaatgaaattttctatttagaactcactaaataaatcataaagggacagacaagttgtgtagactctgaatagatattgaactcacaaatgcaccaggctaggtaaattagatagctctggaggtatctggccgcttattgaattgttgttcatgtgactgtatatttagaaaaacttgtaaaatttcagctgacttaaactaaacaaacggataatatagtagttaagtctgattaatccactcacaagtgttggacattcggcatgtatgcaaatgatttaggaattggtcctgaaatacggtttatgtccagttgaaattttgttaacttactgagattacccagctcatctggcaaaggacctgatatttcatttccacttaagagtctgtatttaagaaaacaacatttagccacagtcctcaaaattaatgtataatttttcattgaacctctcattatttttcatgataaatactaggaaaatttaatgcctctatttaccctgtttaatctcagcatctcatttgaaaattaatgcttacttaatacttttttttaataaaaaacaattgtttagtgaaaacaggataaactcagaaaattacagtattgttacttgcaaccattaacaaaatgagagtagcagtgaacaacaaaagttaaacataaatatggaagatacatttaatgacccctggtaaataactatagacacacaaatagagaagaaactcataacattcaagtgtaaatacaatatattttagttaaagattgaaacattaacattcaagaaaaggagctgaagacatagttaccatttctacattgattgccacatgttaatatgttttacaatacaattatactacagtcaggtccatagacaggttagacttgtgtctaggcccacttagtttaagaataaaaaaaattattttcttttagaaataaatattttttttactgattataaaaaatttcacatttttttttctaaataagagccaaaaaaaaatatattttttgtttaaaaaaatatattttttgtttctgaaaacagtcatactatagaccaaagatagcttaaacagaacaaacatcttttttataaaatgatttgcagttcaacttacagaagttttaaagaagtcatacttcctatctcctttggtatgctgccacttatattattccacataaaattcctataaagaaaagaagcaaaaaatgaatatcaaacttagccccacttgttttatatcagattacataatataatgaattagaaactaaatatatagtccataagagcttggtttcaatctgaaatactcacaatatagtcatgttcttgaactggccaagctcgggggctaaggttccagataaattcatatttagcaaccgtctgcatatatattattggagacagatgaacgtttcccagagattggtaaaaaaaagaaaaaaaaaaaaccaattaactattgagcaagattcataagacttcacaaattaaccaaatataaaagaaagaaagaaagaaagaaagaaaatgttaatatttaaggtggagagaagggcagggaaatggaaaaggttaaacatagaaataataaacttacaattctttgacataggtaataaccatcataggtagtgttggtgcagaatagccctgtccaaagtgaggtacatggatctttttttctccagttcttaagtctgccaagtggatcaatgagttgacgatggactgcttttaaagcattcactgcgataaatatacatatagaaaaaaaaataggaaatatgtttgtgtcatttactaacaaacataagcctcattgaatgcatatacgaaattgaagctataaaacaaaataatgatcatcattcatcaccttccaaaggatgtgtaatttgtccataaacaagtagagtacaacaacatgaaatccaaataagaagaggtccaaatatgcaaattctcagccttgccatgaaaaccagcatcgacaaattaatatcttagagttgttattatgttagattgatagtttttcatttataaacgaaggatatgaaatggaaagttaagtgacatcaaatggaggatctggtcagattatttgcaagtggctcattaatttctcaagtctttcatgcctatttgagattgagaactggtataatatttaaaaatgaccatagtggccaatatttctacttcatttcatcacgtcacaatgaaaaagtaaaagtacatagatttatacaaagacagacgaatgaatgcacgcccttgagacctcaagttacgtaccatttgtgatgtgtctgaataagtcatgacatataagttttcagtaaaaaatgtcatgacatataagttgaaaaataattttttattaattttattgaattatttggttagttggaagattttaacttcgactacttttacaggaaaaaaaaaattggatatttaattgagaaattatagcaaatgacctcgtagtactatgtaagtaaatgttgttattttaaaacttgtaaggaaataatctttttacaatatttattatttatattgttttttgccacataaaaagattaatattttttttttttaaaattagaaccaaattacctaaaagttatagtatatttatattagttttgttaagttttttttttttaaaaaaatttatgtcaatttctttaatttttttgtaagttgttgtggattgtggtatataaatttttttttatcaaaaacaaagaatacttcattaatctcaaaccaatacaaccactaatcgaaacagcaaccaaaaagctgcaatactcctagcaacagggacaaaaaaggcctgtactagttacataataatttctgtatgtacatccctttttcccttgtcaagtttctactttttacagtttgaattctatacttcatattacatttaatctcattaacaatcactaaactcgaattggtatatccctccaagtagcatttattctagttcaaccatatgttgtaacacactgctgccattatcagtacattgattctttgcactgcccctatttttttcaaactcaaccaattgatccaacccgagaaatgcaaaggtcaagctctccatcccatcaatctaaaaatctgcttgttcacactttgagacagtaaacaaaagaaataaagatgctcatgggactcatttgcaataccacaaatggactcatttgcataaccacaaactggacacagcatcgagtccaaagcaagtgaaatttcagcaagttatctcgagtcaaaagttgagaatttactacttgccaaaagcaaaatctatgcttaggcatgttcaaagtactccaaatagccttgtaatagttcactttactctgagctaatgtgctattataaagcatagcagagttgaatctacacgtaccacctacagcaacaatttccatcttagaagtttttggctcaattgatacaatttacaccataccaactcgtgtcgggtttgagatcataggaccaaaaagaagtgttctttaagtaaatgattttaatccacttaactcaaagaatatcttttttctctgagatgggccaaataaacttcgaaagaatagctttgtttcatttgattccttccttaaaaccaactccaccatatagtttcggcaagcaaaccttatcccaagaggcaacatgtaacttgcttctattttcattggttccccataaaaaacctctacaaagccttttaattttttttttttgtgacactgtgaggaaggatgaagatgctcatccaataattttgaagcccaaacaatacataacggatcaattggattctccccgcatatgaaagatgtctgctggtctaggagtgaagacgttgctaaatttttttgataatgataccacattctttagttttccacttagtaggcgtaaaaggaactcccagataacgaaggggataagagccttctgataacttcaagactcctagaatttctgtcttctcattactttgaaccccccttaaaaataagggtaaattgcggcataaatacctaatgtttccaattttatacact

SEQ ID NO: 378787 - DNA, 2846 bp, Cannabis indica
cttctcttcccctgtacgaccctcgttctgttcttggaaagaaagatcatcatcatcatcacatgatcaaacgctcactcttttcagagaaatggattcacgccatccctgtcattatcttcatctcactcttcatcctcttctggttctgttatcctggtaataaatctctctatctttaattaattattattcttcttctttcttttatatcattaattttgttttaattaattaattaattaattaattaaaaacagttactgtggagattaaggatggaaaaattgtgggtatacatcgaattatcaataataataataatatgagtgtgattctcaacaagggtatggaaattggtactgttgcttcaacaatattatccttagaagaagacattgctgatgttcctcttcctcagaattttacagatcaagaaaatggtactattaataaagaaattaaaatgtactaaactctctttctcaaaattgtgtacaaataatacaatacaatagagttgtaataatgcccaaattgggacttgtgctagtttttttgaatttcttggatgaatacaataaatgaatgaatatatatgaatttgactctttcttgggttgataatataaaattaaatacattgttacaattcactaatctctcctcctcgacaacttcctacccataaatacattgttgattttttagttgatggtagaaccctacaacaatctcttcttggtgactgttacaggaaaaatattatgttaatattagcagagtatataatcatatggacaatttaggcatcaattataattttgattgggcaattaatcgaataatgtctctaccttgactataatttataacatatatatatatacacatacaaattctctcttgggacaagtgaatttcatcattatgacatattatattaactaaaatcttaattttgttcaagcaataataaatagagtaataatggaaagcaatatactttggctatgtttttatgttaaattttgttgggaaaaggtaataggcaagaaaaaatagtgtgaaaaagaagttaaatttctaatgttttggtacatggtatggaaaaaattgattcaacaaaattttccataccaacataaaaattgatttttttttcatcttacatttttcttactcttccaaaatataatttccaaaacgtacctagatttttttttaggaaagggcaaatttgttttccatcttttcaatagcacattacatttcattattattttgaaaaatttaaaataatttattatacgaaaatagattttaaatagtaaattgcaagagtactctaaaaaaaatgaatcacttatacaatgaccatttgaactttggttttaacactataaattatttaaaattaaattgggtaaatattattttggacatgtgttttgtaaaacttactaattggatccactattttgttaaataacaaaatagactctgtatttttcaaaattatacaaatacaatcctgaattgaattttttatcaaaataaaactgattatatttatagtatctatttgtgttaaaaattgttttaaagttagttatattaaaaaaataaaattattgaaaattgaactcagagtcttatttttattattttaaaaaatataggatctcttttatcatttaacaaaacaaagagtctaattgtaacttttgaaaaacacatgatcctatttaccctttaaaattttcaccctacaaaaagaacaaaagctatgtatgtcctatccaactaagaattttgcctatatataaatagatagagtagacaagtaagtgttttgttataaaaaagtaaaaagtagtaaagtaaattagtagtagtgtatatatattaggtaccttttgccaacgttgagaatgaggctttttgaatacaacaatggaatcaattctctcaggagattccatcttccaccgacaataagggtgttttgttctacgatccctaccataaaccccaaccatttctctctttgaaccacgatcatatcgaactgtgttcatgtaaaaaacataaggtttctgacaagggtgtttggtaacaggcctagtgttgaaagcataggcagtgtaatcagctcttgggtaccaattcaggaatgttcttgtgggcatttctagctctctaggtgagaccacacccctcaagatttgaacaacgtagccccatgaaattgagattgaccaggatcgacgcttgtcgtagcaaattgattgttgcattatgctggctgagtctaggttgaccgattggaatagttgttggagtgctttgactcgtgtggtgcgtgggaatattggttcgactacgtctatgtggtggagtgagagaagtggtgttactggatgtgctcctagaagtcctaatagatctccgtacacatcgtactgcatatatataatcattattagtcatcatcatgttatgtattggtcgtacatccccaaattttgtaatagtcaatgcaaatactatatagatttatagacacaatatatgcatgaaattaagtaacagctttgatgagatttattcacttattagtttggatttttagaatatgatcatggcgcctttagaggagacatcaatacaatcaaatagtaattaagattctcaatattatatattgagtttgaaggtatatatcttatattaaaatccaccaataataataaggtgtcaaacaccataagaggtgacatactattattaattcatttcagtatagagttttacatattttaatttaataaattatataaaaa

SEQ ID NO: 378788 - DNA, 3786 bp, Cannabis indica
atggcagtgtaaatattgagctgtgaaaatcaatatagtaatatacagaaaagtttcctttactctgtttcacctttcaagcttggtatcagagccaaccttcgagtgtgacctaaatctatggattcgcccacatcaatcgacagatcctctgccatgaatccttcagataattccacacctcctacagtcgaacccacaccagctccagtcattaacccatctccctttcagagtctatctcctcttacaatcaaactagacagaaccaactatcctttttggaaatctcaagcacttccagccctgcgagcctatgatttagaaggctatatactcggcaccaaagtctgtccgcctcagtatgtcgacaacactatcggaggacccactcccggcgaaccacgtcaactgaatctgggctatgcgatatggagacgcacagatcagtcaatcctgagttggcttctcaactcaatctccgaaaccatgtttggccatgttataaattgcctcacctctttcgatctctggactacccctgaacgcttgtataccacaagttcaaaggccagaattcttcaactcagatttcagttacaatctctcaaaaagggaaatctctcaatccatgactacattttaaagatgaaaaatgttgctgatagtttatctgctgcaggacaactcttatcagatgatgacttgattctctacattctaggaggtcttggccatgagtatgaagctgttgtagtcaacttaacctcacgacatgaccaggtcactctccaggaagttcaatacatgttacaaagtcaggaaattcgtcttgaacaattgaactcaacaaatggagacccatctattgctgctgccaacttagccactcaaatgcgaagaaaccttactctcggaggtacaccaaatgctcagaatcaacaatccaatcgattcaacacctcacgtggccgaggacgtggcaggggcagaaccaataacaatagaccagtatgccaactttgcaacagacctggacatgtagcctcaaaatgttaccaccgatttgatatatccttccaagtccctggaccaaatcaatcccaacacactcccaacaacaacaacagccactctcaaaatgaccaacaagcctacttctcctctactgacaacatcaatgacaactcatggtacatagatagcggagcaaccaaccatatcacccctgaagtctcaaatctgcaacacaagactgaaccaaaaggtatatctcgattgcttgttggtaatggctatcctcttcatgttactcatctcggctcaaataaaattcataatgctactggttctctactgctaaatgaaatcctgtgtgttccagatatatctaaaaatctattgtctatttctaaactaaccaaagataacctggtatatgttgaattttaagctgaccattgtgttgtgaaggatctaaaaacgaaggaggaactgctgcggggagtgcttaacaatggattgtatcaacttcagcttgctgcatcatgttacaacagttttctaaatacctccaagagtagtaatactaccaaacatctcaagtctagagtcaaccacagtcaatcgagtcctgctgagtctaaaaataatagtcagtccctatttgctgaaagtgtctttaattccaatattaatgtgtggcacatgagactaggccaccccaatgtcaatgtaatgaagcacatgttagcaaatgaaaaagtttcatttaaatccatccccactttctgcaatgcatgccacataggcaaatctaaacataaacactatggcacatcctgcacaacaactcaatctcccctggaactcatccattcggatgtttggggaccctctccaatcttatccaaagaaggatatagatactacgtgcatttcatagatgactatagcaactttacatggattttccccttaaaactaaagtctgatgttaaatccatattcattaattttcaacactttgtggaaagaaaatttgacaccaaaatcaaaactctccaatccgattggggaggagaatataggagcctagccccttttcttgcatccataggagttcattttcaacatccatgtccccacacacatgctcaaaatggaaagtccgaaagaaaacaccgacacatcatagaaatgggactcacacttctcactcaagcctctatgcccctaaggttttggtgggatgctttcagcacctccacattccttatcaatcacctatccacacccactttggctcaccaatcaccaatagagaagttgtttaaagtcacacctaatctaaaatttctcaaggttttcagatgtgcttgcttccctcacttacgcgactacaacaaccacaaactagactttcgctcatccaagtgtgttttcctaggatatagtccaaaccataaaggttacaaatgcctacactctagtggtcgcatctatatagcagctagtgtaacctttaatgaattggagttcccatttgcctcaggttttagtaacaccaccctctctcaaacagaaaactccacatctgtcatccattatcatcattggcttccttttctgttcactcccaacatctctcatacagatgctcatcatgctgaggttgatacaaatcattgttctccaagccccgtggcttctcctccacacacacccatggatccaacatcacacagtcatcaggataaaagttcaacatccaccagttcctacccgaccattccccttgctgttcatctgcctattgaaccgatatcatcaccaaatttttccccagccacccaaccttccccaccaacaccaaccccttcacctataccagcacctataccaactcatcccatggtcactcgctccaaagccggtatctttaaaccccgaaccttcctctcatctatcctcaaaaatcctcatctccctgccatgtccctcactatacccgaaacacctgcccttgctctcaccattccagtttggaaacaagccatggactcagaacatgatgccctcatcaaaaatcacacatggaaattagtaccaagacaacctcacatgcatgtagtagacaacaaatggctcctccgtatcaaattcaattctgatggctccgttcagcgccacaaagcgcgcctagttgccaagggcttccaacaacaacccgggattgacttctttgaaacctttagcctggtggttaagccctctaccattcgagtgatcctttcccttgcagtcactcacggttgggatgtccaacaaatcgacatcaacaatgccttcctcaatggcactcttgatgaagatgtgtacatgacccaaccattcggctatgttgatccatcaaatcccacagctgtgtgcaaacttaaccgtgctatttacggtctcaaacaggcaccccgtgcctggttcgacaccctccgtactgccctcttacaactcggcctccacaactctgtatcagacaattctcttttttatcttgcggatggtgatgctcgattgtatgtgctcgtctatgttgacgacattctcttaactgggaacaactcacaacgtgttcttcaaatcatttctcaactcagcactaaatttgctcttaagaagctcggtcccgtcacatacttccttggatttgagacaactagggggcacgatggacttcacttgtctcaaaccaagtactccattgatctactcaaaaaaacgcatatg

SEQ ID NO: 378789 - DNA, 5024 bp, Cannabis indica
agatccttgtaagttcgtagagttatactcatattgtgtattacataactaaagttttgacggtccctactaagttgggatgctcttaggttgtaaattggtttattggagtaatgaaaacactgttgattcatacaaaaaaaaaaaaaagatgttttgggtgccttacttttgcctctaccattacttctcacacaactaagtttgagcctcggccaagggcttgcgtgttcttaggttaccccagaggagtaaaaggctacaagttgtatgatcttaattccaaacaaattttcatttttcgcaatgttatatttcacaaacatgttttcccttttcacaaacttaataccgttaataatgttgttgatcctttcttacctattgttctccctaataaacatgtaactaacacacatattgatgattatccgaagcaagatattagttttgttcctcctaatcctgttttgtaggataatgctgaagaaacatcagtagtaaatagtgcagagcaatctgaatgtccagatcagctcgattcatcaccaccacctgctactattcctagaagaactactcgagtctcatggccacctagttacctacaagactttgagtattataacttgttataggataaaacttccacatcttatcccatctcaaaatatctttcttattccaaactttcaaaagcttacaaagcatttgtttaagcagtaacgattgagttcgaaccacaaagctacaagtaggctattcaattcaagaaatggcttcaagctatggataatgagatcttggctctcatcaccaacaacacatggaatgtgctgcctctcccaccaaacaaacgggcaatagggtgtcgttgggtatacaagattaaatacaacagtgacggtatagtgtagagcgactcaaagctcgccttgttgcacaagggtacacacagcaagaaggattggattttctttgacactttctcaccagtggcaaagatggttactttcaagctcctattggccattgtcactatcaaacaatggcaaacattgcaactcaacatcaataacgcttttctaaatggcgaagaagtttactgaaaattccacaaggtctcaagcttccttcaactgtcacaggcgaaaatcttgtgtgtaaacttcataaatcaatctatggacttcgacaatcttcacaacaatggtacaagaaactcatttatgctcttttagaaggaggattcactcaatctcaggctgactacaccctttttactctaggaacacacaactcatttgtggtccttctcgtctatgtcgacgacatcatacttgctagacccaacattcaggttctacatcaattacaagattctcttcagaccaaattcaagctcaaaactctaggtcctctcaagtattttctcagatttgaaattgctacagccaacttcggtcttttcctttcacaacacaagtatactctataatatcttgctgacacaggatacactagcagcaaactaggcaaagctcctgtggaccctagacaacgcctcaatgatcaagaaggtgacattctcgacaacccttctcactatagacaactcattggccgccttctctacttgaccctctcacggccagacatcacatttgccatcaacactctcaggcagttcatgtcttgccctcgaacacctcacttgacagctctacatcacctcctccgttatttgaaagggtcatcaggacagggcatactctactcaccaacatcctctcttcatctccgcagattctctgactctgattgggctacttgtccaataactcgtcgatcaacaataagtttttgcatttttattggtgactgcctcatctcctggaagacaaagaagcagctgactgtctccaaaagctctgctgaagcagagtattgtgctttagctgccaccacgagtgaaatcaccaggatacaatatttactcactgatcttcacatagatcaaccaactcctgctttcatatactgtgacaacctatcagccattcacatagccaacaatcctacttttcacgaacgaaccaagcatatcgaattagactgtcacttcattcgtgaaaaaattgccaattcgacaatacgactcatcccaatcagcagcacactttagctagcagatgttttcaccaagcctctcccctctaccacacaacttcacatttgtccaagatggccatacatgacatcactaagactatttttctttcattttgctcttttgattagttagattagttgactgttattacagtttatattgttggttatcagtctgttattacaatttgtttattcttgattttgtggtggttagttactatcttgcctatataacgcttcatttctttgtacaaatttttattcaatcaataaaatactttttttgtttttcatttcttccgcaatacttattttgaaattctatgagcttcctttatttttttcttttttttttgttaatctatttagtttaaaagatctgaacattcatattatgaggccttgttttcttaaatattgctggaacagtttgccaatttattaaattttcaacgttgttaggcccataatttagcaaagtttggtgtcaagttctgttggactgggtctattgccaattgtgtgcatcttcttgtgtaaaacaataggccacatttttattttttaaaaattactttcaaatttaaacttattaccaatggtttctgttatacgttttggagttccaacttaattattaattaatattgtttcttcgtatattgttggagtttatatacaactaaaaataaacccagtgcaacgcattacatctaaactggtacgtatataggtatgttacttgtaatatacaataattattgttaaaaggtataaatagtctctagtacttttttatataattttgatattatacattaatattaagggaaattatttcatatactaattttttgatatttttttaaaatttacggtttaggtttctaaaatgtttacagcgctagttggagtaggagtttctgtacgatttttaattgcaattagattgtaccgctaattgcaataggggtttctatacctaattccgtaaatatgcaataaaaaaaactgttttgaagtgtaaaaatgaaataactcctaatattaatataattaacttatataatttaatttaatattttttaaaaagagaaatgttaaagggcactagtagtgcctagtacctttctacgtgtcaatatagttatttgtccaactacaaatcgagtcctatataattaatataatagcttttaggaagtatcgctagtcaatcacaacacgatatgtcgagaacgtgttagacaccactcttttaaaaatatataactagtaaatgggaaacccggcacttatagtaggtacagtagtcaatatcaatgcactcacttatatattaatatggttgactaaaaaatattgtatatgggtggcaaagtttgactaagttaagtatatactatatatgactgaaatactaatcagttcagtaattaattattgactacgaattcacaacgactcaatgagtatgaaacatcgtgtgctgactggcatatagcgatatacaagatttgaatgataggtagcattacattattataaaatcatgattcatattgtccaatatgtacgcacacatatatataaactatccctcctataaatctacctagtatattttattaaaaagaattgttgtatatacattatattttacgtatatgatatatatatatatatggatggggtaaattatatagtaatttatagtttttagtttaatttaatagttcaatttaatttttaaaaattacactataattaatatatttatttatttataactaactaaaaagtaaatcgctcattgcgggctatttaaattttatttttatttttttgaaaaatatactttatagaatttttttttaacaaataccaagcacccataattaagctagaaatacccattttttgaattcccaaccgataacaattaatcggagatcatttcttgagcttgaagttttgtttctgtatttggtagaagtctaaaaaaatcttttcaagcacatctagagatatacatatctcaagtatattctctgttttattgacaatcccttggtatgaactactatgccaacttatagtgagtcccccattgatgatgctaatccatcaacatttaagaccctcgtatacttttcccgtcattaccattaaggttttactccctatttcatacgccaccattgttcccttgaaatcatcactatcttcatacttggttagccactctaaaacttattttacactcaattatattgttcattgtttaataaacaacttattttgtgatccaacattcaccaatcactcaaatacatctccattaaattgcatctcaattcataagcttttccccattttgagtgagtatgcctttccataattgcttaataaagtaatcttttcctgaaatttcaatggtttccttatatacaatattgactatccatccaattataaagtactctctatcattaccgtgtcaccttaagtaattcaggtaatcttttttaccttagtgataccactactcttcccaatgttcttttaaccgctaccccggtaatgtccccactacaagcctgcatccgacccttactcccacggaatgatggctcttatacacgagtgcatcactctagctgcttctcagactgacgactggccccacagaccaatccaagtgttttcaacgtgctttgctctgactcgcacgcttcatgggaaaatttcctaaatgaaatcaccccaagtcaaggacacttaaccatggagttccttcatggtggggtaccaaaacaagatgcttcttgctaacataggtagtccca

SEQ ID NO: 378790 - DNA, 2757 bp, Cannabis indica
gttttttaatttaaaaaaaaaacgtatcatttaataattactagttaaacattaggaatatagattaaacataaattatctatttaaatttaacacttagtaaaataaatatattatcttaattataaattgtaatataagtaattaataatttaaaattaattaaattaacaagtagttaatattaatcattgttaatattaatattaaataaatcattgttaaataaaataatgataagtgaaattattattttaattcaacataataatagtaactataaattgcgcatgttcgtatctcttcttctctctctaaggggcgaaggaaacaggagatgcagaagttcaatataaaggtcacaagctctgtggtggatcatacggaggtccctttgatccagactattgaagaagcaagcttatcggaggattttcatgattcacattcagatctgggcgtggatgtggttctctctatgaatgatgatcgaaaaatttctggtgttcattcatgggtaaaggaaactatgatggatttccagaattcagctaatgatatttggagtaaatttaaagccaatcaggttaaaactccatctactaaactattttaaagaacccatcatataggggatcagattatagctaaggttgatatagatgaggttgagatggaagcttctttctggcaattctcgatagtttgcgtggttttggggcgaatcgtcccgttttgattttttaagggattcattaaaaggatttggagaaatttaggtgtagaacgtatagtgaggatgcatttgggtttcacccttgttagttttagagatgaaactacaagggatttggttcttgaaacaggggttattcattttgacaagaagcttgcagtggttcgtccatgatcaagcaatttagactcaatgaagttggttcgttcggtcccaacctgggtgagacttaatggacttgggttgcaatactcggggagaaactgtataagtgctcttgtgagcactattggtaaaccaattatgatagataaagtcactcgagatcgatcaatgatcaaatttgctagggtcctagtttaagttattgtcattgatgatcctcctcgtagcatcgaattcctcaacgaaaataatcaattaatggagcaaccaattgagtgtgagtggccccccactacttgtacaacttgttgtattttgggacataatgtgagcttgtgtgccaaggagaaggggatggtgtgggttagaaaatccaatatcagtaagagaaaggataaagtagctaagaagactacaacaaatcccattccaaagaaagaaacccctgcaattgaacaaggtaaagttgatggagataaacatgttactgttacaatcggtggaggctcggctagtttgactactgcactgtcagcttaggtacaacagtagcaggatggtgattggattactcttaagaagttaggcagtaagaaacctatatcagctattaataatgcaaaaaccagtaattactataaggctttacatgaggagactggtttaggtggctctttacctaataatcaagtctaagatggagtggtgcaacatccttagttggaatgttagaggtttgaataatgtcaaaaagaaaaattccattttagaaatttgcctattgaataagatttgttttggtgctcttttagaaaccaaagcttgtaggaataagattgttagttgattaaaaaaagtttccctacttgggacttctactctacttctgttactgatgggagaattttgttattgtagtaaagaaattttgttaatttggaggtgattaaagaagacactcagttaatgtattgcaagtttaaggtttctggccttaataccgactttcttatcacggatgtctatggtcttaacatagtcgtggaacacgagagtttatgggagaatttaactcccattggcttggaaaagcttcctcggcttggcttgagttactttaacgcactgtttaactatgaagatagaatcggtgataggagagttactcgtgttgaattttctgatgctcaaatgtggcatgctagtgggcaagttgatgtcctaaagactttagggtattaatatacttggtctaataaacacgaactaggtggtcgtattttttctaagttggacacggtgttcaagaatgaaagttggctggatttttttccaaattctaaagttatgttgcaatgggatacttgcttggatcatggtttttgtcttgtgaagcaagtggaaattggtaagtttgactctaaacctttctgatttttcaattactggttggatttgggttttttctgacacagtaatgaacaattggaatcggtctatatctggtatggtctaggtagaatccttggtaaacttaatagactcaattattatttgagaaacttacttgccaagaactcgggggatttagctgtggatttttccttgaaaaaggacaagtttatctcttcccaaaacttgttagcagttgaccccacaaacctcgttatgcaacaggatgagcaggctgccaatgttgcgtattcaactactgtgacagtcagtagtcccatgatccgtaaggggaaataccgggtaagttgtgcaatcccacatcacctggggatggtcaaagtgggatgattttgagactgtgtaggtatgggaccacacagttgaagagggcttaaatggat

SEQ ID NO: 378791 - DNA, 6836 bp, Cannabis indica
ggtgcctaaaccagtgcttaatacataattatcacttctattgactttctccaatctgaagttttgcttgctttccatagagtatatatagagaacttcacttgattggctcatatcccttactctcttctacatgctcctatatctccccctttaaatattattttcaaggacaatggtatagttgtcaagtaatagtacacaaatatcttacgtatatataaataggggttgtatgtaaaaccttgaggtttcacattcatcatgtgagaggaaactaaactatagcagtaggtaatataacttgttagggccaatttaataactttttttttttatgattggctcctcaaacaaacaaaagagaatgagaaaagcaaaagttacagtacaaccatctgcaaaaccagagtgtaggaaactgtcaaaattggccaaatcgataaacccgaacatattgcttcgatttgcccaccgagccaaaaaatgggccacaccattgcacttcctagagatccaatgtatctaccaaaggttaagtttaccaaccgaggaaaggaagttgttaaccaagtcttgaatgttatgatgcagtgtgtgaattttagaaagttttctttgcaccgcgaacaccgcattagttgaatcacattgaaaaatcacattcctgtagccaagattacctgttgcctcggcacccccgcaaagagtagcaaattcacctatcaaagggtcataatggtcaattcgaaaggtaaagatttttgtgacaactccatcctcattgctatacaccgccgctcctattgattgagaatccccaattgcaacatcagtattgcacaacatccaacctgcaggaggcgagagccatttggactgcacaacaacgatagatagattaaccgcaggaagttcattaagccttccattaatatgttaagaataactgcaatgggagttgatttttcattgtggataaggctgtttctctccttctagatactttcaaacacaacgacagtccccctaagaaaaggtggtactgctaggccgattctgctccttagagaaccaattcagccaaccatcccaattgggaaagtaagccacactagttctaatatgccgtgaaaaaccgaaccaaatttctcttgcaaaagggcactcccaaaaaagatggagagagctttccaatgccaaagagaagaaaggacaataaacgtcagatttatagaaaatggttcgaagtttttccttattgagcaagctcttggaaaggattttccaccaaagcatcttaagcctattatggattttttctccccaaataattctccgttttctatcttcagccgtagtggttcttagattcttgataactctgtaggccactttaataaaaaaagacctcattaggctctggcaaccaaagccagaagtccttagaaggccggttggggagggtgatgttaagaattctcttcgcatcctcattcacaaaacaatgtctaactaactcctcattcaaatgattttgagaaatgaagttacttatcatactaatcccacccgaggcatcaagatgaggtgttggttgaaggttatccctgggacccaaggatcgaaccaaatggacgtggagactccattacctattttgcaacaaagacccttaaagagatagctgcgagcacgaaggatgcccttccagagaaaggagtctgaagtttcggcttccaagtcaagaaaagtcattaaaatgttgtcctttgatatactttgcctccatgagttcacgccacatgcaatccttgtccatcaaaaattttcaagcccatttcatgagaaaagccttgttggtagcctctgttgatctaaagcttagacctctaacaacttttggatggcacaaattctcccaagcaaccatgtgcaacgttctttttccatcaatatcgctccaccaaaaatttattagtaattatcaatcttctttgctgtcgagataggaatgacgtccgaggatgcaacatagttcgataaggttgagcccacaacctttaccagacaagtttttctctcacttgacagaagtttggccttccatccttgaatacgctttaggacacgatccacaatctgttgagtatcctccgttcttttgagagatataaacaaaggtaaacccaagtaagtggccttcctgttcattcttttcatcccaagaagctacgatatggcctgagctttcctactggacacccttttggagaagaaaatagatgatttttggatattaacagattatcccgaccagttgtagtaagtacctagacaatccaagaatgatctagcttcacgtaaagatgcctgcccgaataggactatgtcatcgacaaacataagatggttcagtgtagccctgttcctcgctaatttgaacccttttattaatccattgttttccttgtcaatgaggagacgtgataatgttttagctgccaaaatgaacagagatggagataaagggtctccttgtctcaacccttgctccgaattgaatttcccaacgatggagcaatttagtaatagtttaatttcatctaccaaaatgcaggcccttatccacatagtaaaagatctggagaagtttaagtagcacagaattgataaattcccactccattttttcgtaggttttctccaaatctaactcgattaacataaaccctcccttgcctttctttctattcattgaatgaacaatctcttgagctatcattgtgttttctataatgtgtctacctttaacaaatgtcgcttggttaggggagatgattttatgcaataagactctcaatcttgtctcaataatcttggacattactttgtaggccacattgcataacgcaatgggccgataatcattaacgaaggccggagaatctttctttgggacaaggacaatggaagtgttgttaataaattggtgcagctccaaatgggcgaagaagtgagtaaccatttcaataagatcagcttgtacaatgttccaatgatgagaatagaaacttggtggtaacccatcgagtcccggagccttatccttgcccataaaaaacaccgctgtcacttcctcaccattaggaatggcattgaggatttcattttcatgtacagtaatcatcttgtagaatagaccatcaagaagtgacgggtggcagcttgtatgttttttgaataaatcattatatttcagaagaaaataatggactatctctttctaatctctaatccaatcacccactgaagagttcttaatacaatgtatgtaattcttccgtcctctaattattgttgtggccatgaagaactttgagcacatgtcaccttcttgagccattgaacgcgcaatttttgtttccaatgaacttcctccctaagcaaggcctccatgagttgttgtttagcctgatcaattgcattaaaattgttagggttttcaatttcagctactcgtagatgggatgtagctaattgcacttgccaagataggtcaatgaatcgtttcttattccaactttgaagtttacaacatgtggctttcactttcctatggaagttaatcataggcttatgatgtagtctcgtagtccaagcttccttgatgacccagaagcaacaggggttctgagcccacattgcgtcatacttaagaggtcgacctttgcaattagaaccacctattgtatctaagagtaatggtctatgatcagaactagaggatgagagatggttaataatcaaatttggaaaaaggatgcgttaatcggtggagacaagaccacgatccaatctagctctcttcatagctccttctttacttgagtttcttccacctttagcccaggttaactcggggccttagaaacccaaataaatcaaaccagccctttgtaccattcgacgaaggtcaaaagcatatcgagaggagttaccttatttggcatagttgaagtattctgagtcattcaaagttccattcatgtcaccaaaaaccagtataggagtggtagcattgagagccaactcgccaatgtgaagtcaaaaattctccttatctcccctatggggcggcccatacatgccaagcatcaaccacgtatctcctaaagggccagaagtaatttttccaacaatcacgaacttattggaggattggatattgcacttaacccctttcatccagcacatgctcaggccacccaaaagttacacaaggggataaaatgtatttcctcaaacttgattctattacaaattctagcaaatttgtctagtggtaatcgagtctcagataagatcatcatctcgggtttgtgttggcggataagagccgccagtttccaaactgacgtggtattcctgagaccatgacagttccaagccaagattttcatggcgacaaaatgaaaatccttcttggacatccccattcgaattccttggaattttggctcttcaacatcgatttctgtaatggtgcagcttccactaggcttctgatgattttcaattacgacaaagtgattatttaaatccacttttagatcaaaattttttccttcctagtggctttgagtagcagtgttacttccagtacaagttttggatggtttcctccatttgaaagactttggtgcaatcgagaggcttaattgattttttggtggtcttccccttttcttacgggtacaattctcatctacagtgatcactgtcttcccccgaggtcttccccttcatttggatgaacttggttcgtcattggagccagtggaaaagtcttcaaagttaagagcaaagcttgattcatccaatcgcttggggtaattcgaagcctgaggagtagatgccttctctacaacacagttctccctgctctcatcatctaagtcggtcgaatgagaaatattctaaggtaagaaattagagtttgatggtgggctaaataatactatgtctgaagctttacatttcctcagtccagttaagtattcatggacctaaaatcttcaatgtctaacagttcacgagccttaggttgggcccaacactcattggaaggccacttgactatgtgggtctgggtacaaagaagcaaggcactatagggagttttcaagcccttaggattagtagtagtatcacttgaattgagggattggttgtaacgtcctaacaattagacacgttacgacaaccagtaatataatctaatcccactaaatcgggattactagacaataagagcgagaaatattaaactttaattacaatggtataaaaatataatttgtaataatttaaactatacaatcaatccaaaaagtcaacatgcttcgggatcccataaaacattttacaacatattacaacttatttacacgctggcctaagcggcgaaattcgagaatataaaatatatccaatggtagacacaactcgcttggtctagtaaggcatcatatttggcacttttgaaagaaaaacctaagtgtacctagaataggcatctataaaatgaacataatatttgtagccagatgataaattcatgggagacggacccaaaggtcaatatggataagttacaaagatttggtgaaaatagtgcatgatctagggaagggaactttatggatattccctttacaataagcataacaaaacccagtaattgtttgatatcttttaggaatattataaaggtgcatgataggttgtacgatcttagcagaaggatgggcaagtttcttatgacacgaggaaaaattataacatgaaaatacagttggggaagtaatagtacagacaacattgagattgaaggtctaagcagacttggtgatgtgtaattaagaaggctctacgacataaagtccttacttaagtattcctgttagtagtgtttccttctaatcatagtctttcacattgagattatatttttgatgatatttggaacatgtaatatatgatttaaaacaagtggtttagaaaagcaatttaagtgaaagaatgtgtgaccaatgttttgaattcacccatatgcacttgatctgaaccaacataaggttgtttgtgagtgaagtttgaagtggttgtagttcaatgagtggtagcacctgagttagggtaccaagtatcattagcaacactatctggagttgcaagttaagctgaatgtttaacaacattagctgcaccaacaccaaggaaatcaaagtttaatctttgatagaatcttgaagtaatgtgacacatgggtcttggtccaggaatcatggaagaattaggaagcgaagtagttggtgtggatgagctacgacgatcattgtagtcatttggagttgaaccagatgtcttcaatcttggtgaaacaacatatggagtccaaggtccacgacccgaattggctgatgagccattatcgatgatggatttggtatatgcgttgttagaaaaggaagaaaagtttgatgattttggcatgaaaccacgattagtatcaaggttaacagagtctagatctttattatgattctccatttaattttcttgagccaacaataaagtctcaatttcagcaactgagtattcatcattttgtgacttaacaaagatgacaaatgtgtgatagacagaatgtaggcctttacaaattgcaagagtatattctttcacagtgaccttgtgaccaacatatcctaatcgatcaacaagtgttttaatttgaagcgagtagtcatttatagagagagagagagaga

SEQ ID NO: 378792 - DNA, 3322 bp, Cannabis indica
tttcttctttttaattcaaattaaaaaaataaaaaaaaaaaaaaaacaaatttgcattccaaaattcacgaaattaatatacatggtttttctaattttatatgcgtacatgtaaatgtaataaaaattatagcatccaacagaacaaacaaaaacgtggctttgtaaatttcgttatatttgctgcacgcaaatatagtactggcataatataaatatgaaaaattctacaatacgtcgaaaatagtgtttaaagagtctgttgcacgcgtgacatttttattttatacacgtgtaaaatagacagtttaaacattgatttctatattgtaaattattttaaattttttaaaattttgcaaaatgacttaaataactataacttacacgactataaaaaaatttagactaaaattttttatagattctaaactagttaggaattgcatcagtaaacctattttaatgggatctattataaatatatagtcaataagtcagtcaagttcatacttttcaaaggtcatttaagtaaatcgcaaagggatccatgtgtgcttataaattgttgaagcccgaacgatgatgaacataaatattaataaagacatcaagtatatagctagtaataggtattaattagagtgagaattaatgggaatgatgatgatgaggaaggcgtgggcggtggcgatggtggtgatgtgtgcagtgatggtttgtgcatcggctcaaagtgcgagcaatgttagagcaacataccatttgtacaatccacaagataataactgggacttgctgaaggtgagtgcattctgtgccacttgggacgccaacaagcccttggcttggcgccaaaagtatggctggactgccttctgcggacccgtcggccctcgtggccaggaggcttgcggcaaatgcttgagagtaagacactactgcccaccccactatattatgcatgcataattgttttttgtttctgtatattaattatattctataaattagagacaataattggtatagcttaataattttatcatatttcatcatcgagtattttcatgatataaaaattaaatttaccatttatacattatattatatatttcatatattgttatcgaatcttagtaattttaacactatttcgatcaagatttaaaatattaaaagattattgtatttaaaatataatcttattttgttcccattattctcctttgaaaaaatcttttggtcaacaaacaactatttttaatttgttaaagaaaaaaatgggagtctagatccctgaactaacagatatggggagagatgaaactatttaaagattaaaatgattctttctatttttttaaaattttgtaccaacagaactctgaactattcttttgtcaaaataaaacttaataataatctaatctagagatgttatgataaaactagttacaatttctgtatccgtttgtgttagaaattgtcttaaagttggttatatttaaaaataaaattattgaaaattgagctcaaggtcttatttttactatttttgaaaatatagggtccattttatcatttaacaaaacagagagttcaattaataatttttacaaaacacagagtctaaaatggtatttactttttttttctttacaattaagtgttcacacgtttttgaaggacttcgaattttcaaagtttaaaaatttaatttactatcagtactattttgttctatatagaaatagtttagggatagctacgaaatgatatacatatatatatttatagatattgcatacaaatatataattaagtataaattatatatatacatagaaataatatatgtgtgtgtgtgtccaggtgacaaacacagggacaggagaccaagttacagtaagaattgtggatcagtgcagcaatggtggactggacttggatgtaaatgtatttaaccagattgacactaataaggaaggcgttgctcgaggccaccttatggtcaactatgacttcgtcaactgtggtgactaaatactaatatgcatgacacgtgttcttttataattgacagtcttatagaaatgaaataaatttggtactagtagagtagtacccatctctacacctacctcttcttcagctaatttaatgatataagaatattatatgtcgttgcttacacgacaatgaataaataatattttctcatttttacttatgtttcttgtttatttgttattataatatatttagaatctggttactttcatgcagggttaaatgtttaagtatgattatcgctcgataattagttaaagttgtaagatattagatatatatagatcattagtttgtataaactgttaaaaatttatgaatcaaatatgaagcatacataatcatgcataaaaatatggaagtaaatgaatatatacataatataagtaaaggattaaaatacttttaaattctttgagattcaaactcacacaagctttgaatctgcaaaagaaaaacaaactgattagtgtgggtaattggacttccaaactttctctaaactctttagatggatttattgtgtttcatagaatgaatatagctcggggatcgagaccctatatttatataggtgagacattccaccaaaattttaagaaattaaattgagaaataaattaattagttaattgtaatctgatcatatttagaacattttttcttatcacattttaatttgtgataatataccgtcagcaaacagtcagtgagatcaagcgaaatcgatttaaatgattttgtatactaataatagaaatattttaatattaaataaaaatattctaatatttttccactcggtcagcatttagatttaccacttaaacctaatatttcttattatacaatatacatatgaatcatagtgataggtcctcattatttgacgagtattatcttccatgtattacgatatatttattggataacaatctacttaatgtggcaatagacttaagcgaataaacattaagccttatgtttattttcgtcctttgaagataattttctcagataaaattaaggtgcacataaatatgagaaaatatcgaaattagagtttcatttgaataattttagttacaaccaaaaactgcataaggggtaaaaccgaatcccatatttattttacgatccttgaatttatgttgcgccatgcctttactcaaagatatgcaatcaccaattcagtattgcgtgcttaatgaccacttatgatgcctttttatggctaaatacttaatgt

SEQ ID NO: 378793 - DNA, 1524 bp, Cannabis indica
tatacaattacaacttacaaattacaataggcacattcgtttcttcagagtccttttttaagtgtaaaagagaaaaaaaaaatcttaaagtgttatgtcctcaaaaaagcataacatattgaaaaatgactttctttatgaaaagaaatccagaagagctccaaaaagtaagtacaaaaagaaaactgatttttctgaaaagtgtccacttcaacatgatgtaaaaaataaaataaataaagactgattcaagaagaaagagacacgggtaagattttatcaacatggctaatatattgggaggttttctatgcgatatacaaacaaaagcttcaagagagattattccaagaaagatggaaggtagcaagagaaaacgtacccaataggatatacatttccatggatagggaacacgatcgaggaccctcttcgattgaactccaattgcgaggaggtcgccgggggtggatacatagatttccttctatgtctactctcaaagaaagcagctgatgagactgtcatagaccaacccattgccaagaccagcaacacccatatccatacacccaaatttactcgattcatttttattttcatctactctcccactaaaactataaagggagagagtgaatttagtaaaattatttatttttttgtcgtttcctctcaatttactgcagaattacaaactgttcgatgaaatgccagaacgaattgtgggacaaaacgttgttaaggagttataattggagttcgaaattagaatctgtaaatgggtatttgccttgacaatcaaggattcgtgggcattgcttggttgtgttaattttgagctaattacctttctttaggaggtgggtttatgacagaagttctggtaatgccatggaatgatgggagggtttcctttgattcctttcccctcattgaggttgcacagttggattgcctgtcatcagcatactctgtagacgaatgtagcataataagttaatgaaaagaaagcaacttcttctacttcaaatgtcctaaccactttcttcattattgaaaaaaataatgagcaaggtaaaatggtctgagttattttgttttaaaaaatggtcttaaatctgaaacaagagaccactactggaaattggctcgtctaaaagacagtgataacaatttcctggaaatttcacaggatgtcaccaaaatgtacagcgagattgtttaacttgaatcacttcacaagtaaaaaaaaaaagagagactataatgatttttgctcaggaacttttcagaactattcacattatcttaaattgttcattgtcaaacgtggcaaataaattgataagataattgtttagtgaatatttacatcaactttaattatataaccagctaatatagccgctcttcccgcagtaaatttaattatttttaacagggaaatttgatttgattttttatacttacatttgcttaaaaaaaatttctaaacaaataataactaatatttgtaggata

SEQ ID NO: 378794 - DNA, 1523 bp, Cannabis indica
tttgcggaatactgaatcgtaattgataggtgaattttgtgttttcaaaccaatttatatgcaatgttgtttaccaatcagtaatgattgattttctaaataatttcttctttttttccagtcacgttgcccaaattaatggtggatcatcggctggttgggtttatttgctgttattgtcctcgtttgatcgcacgatggctttgaggatgagaaaagtgattcatgtgtttgtgctgcttgaaattgtgtgtaagaggtattcttaatttttttttttatcttttttagatataataggaaaaaagtctttagatttaatccaataacgaataattaaagaataatttgaatttctaagcttaacttacgtacgtaattaaaaaataaaaaaaatatatgaaaatatatttatataaaatatttaaatcgaacttaatcttttttatttttttattcttaattttttaattttgtttttcttccgatgaaacaatttcaggctattttttttttttaattaatttgtccatttagataaaaaaaaattaaacataaaaacttaaatttttctaatattacttatttatgggtaatactcattaaaaatacacctactatctatatatattaattgtaacaccggctccaccattataacgagtactgcggttatttgtacacagtagtgccatatagagaaactggcgctcaagtgcctctaatccacaaaagatttatttgtagtaagtgaaaagaaaatcaaataaaatattgtactttttcatcaatgatctatacaacgcaaagatcgaccatctcaataccattgctcaaacagtcagctgttctcggaagattcgagatctacacatcattatgattaaggtacattgtatttattctaccttgcaaatcgattatataaatttgtgacaagaatataactaaacgttctcaataaattacaatttatggcttacaattattagaaaaaaaaaaaactttattgctggagtggatagagaatgaaagtaacataatgagtacaaatacgagtagccaagcccttgagaccttcatgaaagttgtaaatatacgaatttcttagtgctcatgtcatccaaatttgtctatcaaccaaaattgtttctttttaacatctttgttgaccgaatatactagggaataattcccttgattataatctgattatattatataagtttaaatgaatgaataatctgaatattatatgttatatataagataggttaaaatattaaactttgatacattatacattaatacgagattaatatatataagggataattgcggcaaaagtccccaaaaacttgaggttgataccgattagtcctcaacctcaaaaattggcggtgaaaatacctaaggtcccaatttttgtttgtccgttggtcctttttctaacggatccgttaaacccaaataaagggacacgtgtcaatattttattggtccaaataataattttaattaaa

SEQ ID NO: 378795 - DNA, 2777 bp, Cannabis indica
aaagcttaaagattcatccttcaagtaagaacttgagatttttgttcatttatgctctatttgtttatgtactgagaacttgagatttttgtttatgtttgatagggtaaggtttgtatttgtattgtattactatttgataggttcaggttgtgatggtggatttgaaagataatacagctaatttatgtgcagtagtacgtagctattattagttgtcaaaccagagcaaatgttttcatagaaccatattcattttcactagtagaatcttttgggacaacaaagattactctatgctagattagaaccggtaagttagaataatgtgctgcatctttattagagcctatccttacatgtacattaaaacaagttagaaaaacaccactggaccctttatagttctggcactgatagtattatctttaaatggctttatttcattccaatggaagtcatttattcatgcccgggactgggaggtgttcgtagaaatgtttctatgaagttggagactccatgccaaaggtgtcacagaagcatgtgtgtgtgtatgtgttttatgtgttttttctttaacaaacgaaaccatgtgttgtttactgggttttgagtaatttttgtattaaggatgaacatttgagtcgttcgtttccaatgtctattcttttgttgcaatcaaggagtggtttctttaatgattacaatagaatgtttggtgctgataatttcttataattttgtgaattattgcttattgtgaatggacttttgcatatctgcagtttaaattgtcagttgattgccttatatcatgggctaagaagtctctataatggatttactagtttattcatgcaaggaacaatgtggaatttctgctgccatctacacaacttcaaggttataatgttattgcttattcataataagactgttgataaacaagagtacttgcgccaaggtgcacatgcatggttatgttttgtttaatagcaatgctttccttccttgaaccccttctcctcagttaaagtatattgctttataactctatacaaagaaagtccttgtcctattaaagtaatggaggtctcctacttaattattggattagtttggcaacttgctaagaaaatctttatattttctattagctgattttggatcatacttaggaagcccacaaactatatactatacttttacccaaaatatgcagaataacaaaatgaaatgaaatgcaactcgttaagataacaattttatgaaatgcatgaaattaacaaaatatgaaagctttttcttttttattttagtttttattgtcatgctctagctgtttccttcttgcttatgtagtgtcagaaagagaaaagttgtctaagattagttttttgcgcagatttcttgttttccacggagttctttgaaagttctgctttatccggctgcatgtgttcatagtcatgtgaattattcctctaaattcattcactcttttcgtcaattcaaacaaagtagattcactggaagagaccagcgaagaaacaataagaaagatcttaaactgtctcagaaggaagatgtagacacaaagacttacatgcgagatactattggaaaaatttataatatcttgaaatattcgacatgggactctgctcgagatcagcttcagggcctccctataagatgggattcatacacagttaatcaagttttgaaaagccatcctccaatggagaaagcttggttattttttaactgggcagttgaactaaaagggttcaagcatgatcagttcacttacacgacaatgcttgatatttttggagaagctgggaggatttcctctatgaaatatgttttcaagcaaatgcaagagagggaattaaatattgatactgttacttatacttcattaatgcactggatgtcccattctggagatgttgatggggcaatgaaagtgtgggaggagatgaaagcaaatggctgcagtcctactgttgtttcatacacagcctatatgaaaattctattcaatgataataaagtaaaggaagccactgatgcttacaaggaaatgcttcaatcagggctttctcctaatcgctatacttacaccgttttaatggaataccttattggctcaggtaagtgcaagctaatatcatttttctggtatgacatttgataacatcttataataaattgttggtctatggctgtgttatttttttccttagactgatgctaactttgatgatttttgtgtatatatgtatataatctttaaatcattattgatgtatgctaaagccaatatgcaccaagtaaataaaatattacggaatagtagacaaaatagatgatagattcttgacctgtaaaatgtatagaaggcttttgacacccagcacaatgactaactttgttctcgaggtgaaatcaacaacctacccagtgcctaaaaatcttctcaagtactaccttgagcctggagattcttccattgtataagaatctacactgcttttggacagatctcttgaatcctctcggactccaacttacccggatgtctggtaaatctcaattttgtccatatattgcatccactataggagcataatttttacaagctgaattattatttgagaaaattaagagcatgtttggtattgttttttgttttttgttttaaaaaattatttttagaaatgagaacaaacaatagtttttgaagtttttaaaacacaagtcacgtt

SEQ ID NO: 378796 - DNA, 3380 bp, Cannabis indica
tgaagtaattagattataataaaataatttagctagaatggcataattatagtaacaatagaatatcataacttaatattaagaaaaaataaaccttactcaaaatttgaaatttgtgtttagagtttctgatacaataaggatatctagttcatcagattatgtttagagttgttgataaagcaaacttagcaaaagtatcagtaacaatattaacaattatgaggcaaaaagtaaagctcacaatattaaaatgatcacaagatgctttgatatcagagaggactacctctaaaggtgaatttaaactggaagaatgattaagcttatcaaccaagccttttacattagatttaaaatgaatgttgtgaaaaccaaaacgattgcattgagtgactgcatgacttagagtaagagcttctgccatttctggttagaaattcccttctaacttccaaatagcattagctaaaactacctcatgaaaatatcgagccaccatgcccaaaccacaaatgccattcacgagatcaatggaggcatcagtatctagtttaacaaatccctcaaggggacactgccatcgacgctcttgttcagacaaaataatcagaggtggagcaagattttgagccccgaattgtgacaatcaaactgttaagaagccaaaaaatcggaggcccatagtcctactaactcggagggagaacagtgttttcttgaattttcttgtttcaacggaactaaatacaccaccaagtggttaggattaactctatatcatagctaggaagaggttaaatgatattacttataaaaccaaagatatcactaacagtaccactcaagtttccaagcttaaacttgcaaagttccctcattggatcgagattgcgacaaccctaaagagaatgataagtggtctctaagtcaaccgaataaatagggaaaatattgtcattgaggagcccatgtttttgaagattgatcttagtagggatccaattcaaagacaacctccaatcaaaacacttaacctttggaggaaaattaagattccaaagagtatgccaccagttagaaatacctagagacgaagaagtagtagggaccacattagtctggacagccaaccaataaccacttttaaaaaaaaaaaaaaaaacatgtttctcaagactccaacaaagttatcagtagtgtcattgaaaggccaaggaattgataaaattgtaccagcttcttctatgctaaaattaaaatgaaccaaaggcacattcaaactaccatcatcaaggcggagagaggagacagtggcatcatctctaagcaatctaggagataaagataaatagccagttttcaaaggaatctagctgtcattataaaatgagatagatctcccattgccaacttgctaaataggtgcatgatcataaagattttttctccagagaatattcttccaaatgtaagacccatttctctttaaagagacatggccaaaatctttataccggtgatagaaacctttgagcacccaagcagcaagagagttaggaaaattataaaagtgtcccacttgtttggctagcaaagcttgattaaaaagaagaaaattacgaaagcccattccaccctcatttttatgtttataaagatgatcccaagtgcaccaatgcatcttctttttaacattagaaccataccattaaatagtagcacacatcctatagatatcattgatgaaatttatagggagtttgaacagattaataatgtaagtggggatagattttgtaatatcttaaaatttaaaaatgaattaacaatcctaaataatttaatttaatattattgtatgattatattatatcaattatataatagtatttggaaatatttgaattaaagacccatttgtgtgttaggggtatttttgaattttgacctaaagggagtaaaatggtaatttcattatatattgtgctaatggactatattattatgtagtatatctttttattgtgttataggtgaattttgacaagataatacggtatagtcacaatcgggtatttgagctcgaattgggtttgggatctaaaatttatggattgtgtgattaaggcaataatcagaaatatttgattatatgagtgtgtgtgattgaattggctattatgcctttggatgcttagtagattgacttttagccttgagcgcaaagcggagatttgaccaaaacttattaaaattatatatgacttatttctgaaagtaagaagaaaaaaaatctattttcttgtctcttgaatcctccccactggccctctccatctctctaaccctctttgaggtttcttttgattgttgaggtgatttgttgtaatacaagggagtttgttgtggagctgttgttttagatttgaagaagatcaaaagaggtaaattcatcttttagtgtttgtaaattctaagttttattcctatctttgaacgtttacatgaattcttacttagtgttcttgattggatcttgggttgttgaattcatttatattgaggtatattgagctagacatggaatctaagttgtaggtcttttccatttgtgtatttgctgttaaaatgtgaactttgagtttgagtttaaattagatttcttcaagctttgattatgtaattaaaagatttgttaaacttgaatgtatgtgtattaagaatgtgatactttattgtaatttgagtttgcattcactctgttatgggcatataaatcaattgcataacatatgtgaagtttgatttgagctggtgcatttttaaatttttaaaatttgggttttttaggttttaaaacctaggcgttgcggccttgttcttagccattgcgacacccatgagctccaaaaaaaatagggatcttccttgcaagaggcgcgttgcagcgccctcgtggcgttaattcccttttggccctagattttagtaaacttgttttgacaataactttttgactctgaactccattttggacgttctttatatcattagaaagctcgtgacgagctctattacttggtccagagttggagtcctaaatttgaatacttattaaatgtgattttggaattaaccctattttgtataagcccaggattgtgactaggaataccgacacttgcttgggatcacctgtggactagaaattttaatacccggaattaggaaatagattagcaaaaccctaattggataattatgaataattgaggaattatattattatatagttcaatatatgtgattttatatgaaatttaatatgttaaagaccccgttggtgagccaggggcattttggtaattatgacccga

SEQ ID NO: 378797 - DNA, 3806 bp, Cannabis indica
gagaatctactacaccagcattcttctcggcttcgctgatagccaacttcttcttagtctctgactctttctcaaccacctttttgtctctctacagcaatcaatacctatatgatcaaatccaacttggatcaaaatgtaggccttcactattaagaattgatgagtagaatagctcatttattcttataaatgcataaatatttctaaacctttttaatgtggaaatcttaacatggattattaatttttttttttttaaaaaaaaaaacatggattattaattcatcctaacaaaaatgatccaaagtttgggctaatatgagaaacttctatgtgtattcttttaatagataaatacacttgcaaggacctgaaccttaaacgctgcatcactccacactcattcacccaaccacttggaattatctaaatggtaaatgaactttgtattggttcctaaggagtataccttagtgcgttcctcttccatttgttcaaagtttcttcttatactttctgggatagttggttttgtgacacgaacactaattatttcgatgcctggagcataacgtgtgcagtcaacctgaagagcatctttcatcttttcatcaatctggcaatattgggggtacactttgtcaatatcaatctttgtaatagaagatttggacaaaatcaaatattgcaaacacagcatgtacaatccagtaacgatttaaagttcattaaaatatgatatattagagtgtgacccgcatatcaagcaatgagacacaagagtgcaaaaaaagaaaaaattatgttcaatgttacatagcactcctcgacaatttaacacaatgtaacactgttcaatgaacagaaagaattgtgaatatcaacaaatcctgcaagcttactgtccctgtatggattaatacacctacaagaacattaagcatgatttgtaaaattgtgatacaatcacttgggtagaactcgctagcttttccacttaggtagaactcactcccagaagctagcctaatagaggtgggtgcctacactactaaccaatctcatacttggtcaatgtgggatcctaacaatccacagattgtagcagacatccacggcagccctctttacggtggcctaattcaaagggcactccttccgtatgtcgcctcttccgcgatgtcggtcctacttgagagtgcatggctttgataccacttgatacagccacttgggcagaactaactcccaaaagctagctaagagaggagggtgcccaagtagttacatattgctaccaatctcatacttggtcaacctagtatcctaacaaactattcaacattagactgccaataagtttcttaacaattgacctcaagtaacaaatagagaacaaacttgaaggcttgagctgctaatatctaagcaaacaaaactgcattaaaaattaaaatgatctacccacattatcatctataaaaggttttaccaaattttcttaattacctgatcaaacacatcaatgtagacttcttgcagactatgggagctgcagaactgattgatctcatgatgaatcttgtcatatatccatgtgttatcgtaatgcactccataattcatgagagtgtcatacacatgatccttacgaaggcggttaacaacctgaagaaagaattccagctggtcacaaattataaagatgctaaatttaggctttgtagtaaaacaaaatataatgcctcatcaatttacctctatcttctcaaaagtaatcatgacaccgcctttagtaccacatggaatatccctcacctgaaattttggacacaaagactcaaacttaacgatgacaattaacaaaatagaagtcttcgtattttataagttgaaagccaaaagttacctgatctgtctgaatggttacttgaacaggctcatattgggtaagcaaaggcatcttgaaatgaaaacctgaagatacagcattactacaaacattcaaagtagagaccatatgtaagattaggagaagtgatgtctgaagttaggacctggatctgaaattgccttcagaagggcacctcctctccaatatgccccaacatgaccttccgggacttggtgcacaagggaaatgctattactagctgttgatgttgatgaaagcaccaactgtaatcatcaacccatccagtcaaagaaacatataagatatttcttgtacattctcagccaatcttacaaacttatgccaaacttaaaagatatgcttcttgatatttctagattatcaatttatcaatacactcttgctaaactttggaaaaaagacatcttataaagtagatgaaacccaccattctcccttgaaagtgaggggagaataaataattatttaattccttaagtagaaatataatgtagctacatcattttggagcctctacttcaaacccgagttctaaaataattctcataaaattcaaatctatgatatatatatatatacaacagtggatttagtctgaaaaccacacaagattacacaaaatttcaaatgataatagtgatcacagagctgcttgacatgcagacacttcatttaaaatagtaaatgagctaatggaagattaaaatgagatcaatagaagacaaatgatcacaaaggaaacaacaaaagatcagatccatgagacgaaattaaaagcaatgcatcccaatctagattctaaaccacaacataaagcgacgagattgaaggaataaggagcagaaagaaatcaataaaccctaaaatcttaacaaaatggacataatcaataaaacgagaaattagggaataaaaaaacatgaaaaagactttaacgatacagatacattacaaaaccaaaatggaatcgatgaatcgtatatatgcaatgtgagaaagctaaagcaaatggagaccaagaaaagctacgagttagctgaaacaacgcattgtgaaaaagaaagcgaagtaaggaactaaagcggttaccaacttaccatggcgaaaatgaagatgagtcctacaaatagtgtcagaagtccagaagaagagtcgcctccgctttgagatggcgggggaaaaggagggggcctaggctgttgctgtcgctgagattgatccatggcggtagagaatgacggttttctgatgatgtgtttttatagctttcgcagaggaagctatggcggtaataagaatttggataatttagacattcttgcaaaattaatagcaaatttagttcaaaaaaatggctcaatcttatatttggacttgagaaaaaatggtaataagtatcaatttgtgctaagcacatattagtaaagggaaatttcattaattgaccctaataaaataccccatttcaaaatatataccctccactaatttatacaaattaattccactattactcatttgtacccaaaatacccctcaaatttaattttcctattctctctctctctttccgtctttccctctttcactctctctttctctctctgtcgtttgctattccctctctttccctctctcgttctctctctgtcgtttacatctttcgaacgttactccacgacgacgacccaacgacccaacgacccaacaacgcagtccacgaccacgaccccagtccggccacccacgaccctgaccctgacccaaccctctctctttcacactattctcgttctctctttctctctttctctgcctattgctctcgacattggaacccaacccacccacacccacggccgacatt

SEQ ID NO: 378798 - DNA, 5886 bp, Cannabis indica
taatgctgagtttgatgactatggaaaatgggatgagccctaccctcttctaatgaatagaactgagatgacgaagaagctcgtcctaaggttggaactaatgtgttctcgttttgggctgacctattggaaatgagtgctactataagttgtaggctaagagctgacgggtttgccataatggtgagtagggatccaatgtacgtggttgatgctatgaggcaggggtcgcaagctaatgttgtaagtttaactttcttttgacttgaataaacacttcgtacctcacactgtttgattcatttgcattttccgtttcataggtaggcttgatgggggagagaaatttctccatggtaattcagctagcctatgagctagaggtgctgagggtagagcatgcgaatgccgaactggagagggaggaagctgccaatgctttagctgaagccaatgccatgatgaaagctattgtaaagcaaagggtgtctaattctttggacaaggccttgactcgcaaaaggaaggcgactaagaatgagagggaccgtggagacaagtataaggacttgcattttgtggctcttactaaaatcaaagacttggaagctgacttgaagcaggccaagcttcatgtctaagagaaaaacaaacatctgaccaccctatctcttgagtatgacaaacaggctaaaattatataggacaaatacattaatgaaaccattctagaaagaaaggtgaaacatcatctagagttgcaacagaaggcaaaaaaagctgaggtagaggctatttaaagggctgaggaggctaagactaaattaaattaatctgttaaagactatgaagagtccccaaaaaaggtcaccgatgtagagggtgaaaactcagatttaaagaggcgtcttcagcaggaaatcttggagaaacaagagcaagaagcccagcacaccaatgctctagaaaaagtatttgtctactcggtttgcaccatctggtagcatgataaatttgtaatagatctcattgatactaaagatagggaagatctgatgcctaagctcttggcactggtggaggcagacaaagctaaagaagcagctcaaaagacaaaagtagtcaatcctggaactaccattcctataggtgagaacgtgggttactctactcttccgacctctaaggttccaatcttgactaccgctgtgatctcgaaggtctcatatgatgttccagccaaggatgcacaatcatcaaatgatctagctcagccttaaccgtcctcgcctatcttaaaaaactctatatttactttttttttttgtcttttttgggggataagggtcccacttgttgtgtgtgcagagacaatattttatacccttgtcacagagtttttaagtacgtagtattgtttaatcaattccttatatatgtgcactttagcctataaaattttgctaagttttaatgcttataacctcgtgaggttctggctccaaaggtttaaacctttaggttttcgattaagcgcttagacttaaataatttttctttttttttttgtaagacaaatatttgaaagtatttttacaaaaaggtttctctagaactttaaataattaattaacctgaactaattaattacttaggaatcggacctaatttcttggtaagtatcacttattttcagggctatttggactaactttttaattgacctagatcaattagtttaagtagcctgaatattctggttttgttaacctgggtaccatgaagcatgaacttcaattttaaattaacttggattaactatttaatatgtgagaattgattccatgtataataaggtagtggcttacttccggttccctagggttccgattttgggcggtactccctactcttatgcttcgttaaatgctaaattaacttctaaaatagtaaggtaatggcttacttccggtttcctgagattcctattttacgcgatactccctactcttatatttgagaatttattttagctatttctggtaaatgaggtaaaattatttatgacaatatcatatatggtaccccctatgtgattaatagatagaccttttatcagttgttacatgggaaaacttttgaagaccaaatatgaaatgaaaactacttttttagtcaaataattcctaccttgaggcatacatggacattagtactaaaataaaaagtaaagaaaaaagaagaacctgaccacctccagcatattaatagtatcggcacaagtggttagcattccatgctcttgggattcttgttccatctagtctctttaaatggtaatttctatcactaattctatctataacttcatatgggccttctccgtttggtcctaagaccctcactccgggctcttgagaggcaaggaacactcttctaaaaacaaggttgcaattttgaatcttcttatcttgactttgaattttaaattcccaaaaaaatttgatacatttaaagttggacatgtgactgttctcgaagctcctcaattaaatctaaggattcttgaagtagagcatgttattgagttgtgtcgtacgtatccctcctatgtgtaggcactatcgattcaattgggattatgaccttgcatccataggtcatagagtatagagtgtggcctgtagaagttctttcggttactttgtaggccaaaataactcttggaagttcctcccgcttgtgtgctttacaagcttcaagattctttttcaaagtggtcataaaaatttcattgatagcttccacatgtccacttgattaagttctggctacaacagtaaagcttttaatgattccatgttttgcacaaaaatcagtgaattgatcactatcaaactgctttccattatcaaacactatcgtgtgttgaagtccatatctacacactatatttttaattacaaagttgatggccttcttaaaagttactatgttcatgggttcaacttccacccacttagtgaagtagtcaacaacaacaatggagaacttgaatcctcctttgctggttggaagttcaacttccacccacttagcaaagtagtcaacaacaacaattgagaacttgaatcctccttcgctggttggaagtgatcccactaagtttatttaccaaacagtgaaagaccaagggctgttcatgaaagtaatctcttttagtggggcccttcgaactttcaaatagtgttggcattagtcacatttttagacatattttgtacaatccttcttcatagtaggctagaataaccttgaccaatgatttctcagaaaggctgggtccggatgtgtgatctctaaattttttttcacttagttcgtgcatgatagtgcttatctatgttcacactatgcacctcagatacaacattgataatcctctcatgtagagttttccctccatgatcacgtatctagaggctttatactggacctttcgtgaagaaactttatcctcatggattgtacctatttctaattatttgagtattagaaccatccaggaagttgagtggtcaatgatggatacccgcagtgttttgcatgcttggagtcatcaaatatgtgatggggactagtccgtatttttctatttctggatatgttgctaattttgccaacatatctacaaaagtgttgttatcccttgggattttctttaccgagttttactatgtaactagccacttttttcttcttttgtttagtactccctagacacttggttgactacaagctatgaatcactgtagagttcgatgtttttaacaccaaccactattgccagttgtaaaccagcgatcatagcctcgtgttacgctttgttgttggaagctccgaactcaaattgaagtccactttgaagctagaggttctgtggagatattaaaatgattttgactgcagaacctttttcatttgatgctccatctacgtatattatctagacttctctctctatgactaacgtttcaagatcgtcatttatccccgtgcactccacaatgaagtcagctaaagcttaaccttcaatcaaaattttgggctgatattgtatgtcgaatagactcaattccatttcccactttaggagtcttcctgatgacttggacttctgtaatacttgacagagagggtgattggtaagtaccattatggcatgagcctgaaagtatggtcttaacttctgtgaagtaattagtaagcaacaggaaaggttctcgatcatatgatataaggactctgtgtccaacagtctcttgcttacatagtatactggaagctatacttttccttcttcttgcactagagtggcgcttatggaatgatctgacactgccagatatagaaacaacgactctccgtcaactggtttggatagtattagaaccttcactagatgtcattttagttgctaaaaggctatttcacagtcagctgtccattcaaatttgtgatttcctcaaagtacgttgaagatcggtatgcacttatctttggatttggagataaatttgttaagtgctgctattctccctgtcaacttttggacatcttggtgcttcttgggtgaaatcatgtttataagagctttgattttctccaagtttgcctcaattcctcgtaaacttactatgaacctaggaacttccctgaggaaactccaaaagtgcatttctttgggtttagcttcattttgtactcccaaattatggcaaatgcctcttctacatcattgtagtggttcttggatgtttttcactttactagcatgtcatcgacataaacctccatattcttccctagaacattcttgaacattttgttcataatttgtcggtaactggctccaacattttccaatctgaatggcatgaccttgtagcagtagattcctttgatttttttgaaactggtatgttcctgatctgccacgtgaatttttatttggctatagccagagtatgcatccatgaaggttaagagttgaaaccccaaggtagcatcaacaatctaattaatgcacagaagttgaaaacaattctttaggacaagcttcgtttagatctgtgaaaccgaatgggcaagccatatgggatatcgagcttcctcaaggaattcaatgtttgtcaacttgtctacttttgtttttactgcttctaccctcagtggatctaaaggtctcctcttttgctaaactagtttagcattaggatctatgtttcatgcatcgaaaataacacgaggactaatgtcaattatatcagaataactccaggctaacacatcactattttccttaactgtggaaacaatcttctccatcactgtaggaggtaggttcttccccacttggataaccttggtgggatttccatcatctatgcatacttcttccactttctctattggttctatgacacgttccacaccaattcgtggatcaagctcatattcctggatcaccccctgtgctagctgggaagatgttctggcatcagagtcatttccttcccaaaccataagtacaattttggttgaaatgctatagaaacttcgcgcacttctttgatctcctctgatagttcctatgcttccggtattgatgggaaattttgagcatagatgccagatggatgtcaccactccaaaattcattaaaaatagtcttcctaagataacattataagtaggacaatcgactatcataaatgtgttgtacttgaaggatgatatcgtgatgcttctaggaacttccccatttatagtcatcgaaagttgtatttttcccatcgggatcaacgtatccccattaaagccttg

SEQ ID NO: 378799 - DNA, 1652 bp, Cannabis indica
attgaatagacttattatctaaattttccttcttgtccttgttatagaatttttttggttactctatatgaatagttttaatcttagttttcttgattttgctttttagttccttattatgaatatccattgattgtttaaactaacaatggttttctatcacatgtgtcttccaagtcataacaggatggagttccttgaaactctcccactcaacaaggtaccgtgacaattgtgaagttcaatgatgaagtcactagtgacttagtcttggaacgggtgtggttcaatttgataagaagcctctgattatgagactttggacacaaaatctggacacaataaggtttgtgaaatttgttccactctagattagattacctaagcttggtttacaataatggggacaaaactgctttgagtgttattattagaacaatcgagaaacctataatgatagacaagtttacaaaggagaggtccatgattcgattttgctcgagtgttagtggaaatgaaaaataatggatgaccctcattgttcattttgagaatgagagggggccaaattcaagatcaatttgtagaatatgaatggcttccaatcaagtgtggagaatgtcatggatatggtcagaatatggcacaatgtagaaaggaagggttaagaagtctcaggcaagcaaggaaaatcctagtaatgtaatgatattgttgtagaaactaatgtgaaatagagtcaaaataatgatcaggttgcaagcaggacacaatgatattgcaatggatgcaaggggtacaacacatactaaactgaagaaaactgatgacaaggataattaggaagtccctaaaaagacagaaaatgctaaaatgaaaagtgtagaaaataacatagaggctgctaaagtgaggaacacttttaaagtgctccaagaacatgtgacaggggagatagtagggaccttagttcaggttttttctaatggagtgcaccaaaatggttagctggaacgtgcatatttgaagaaacgagagaaacaagttgctatttgggacctatttcgtgtgaataaaattgatatggtagcgttgttagaaaacaagcttaagtttaagaaagctacaaggatgatgaataaggatttttttaattaggatatgctttatagcaatgcttctggtgacaaaataatggtgatttagaggaaggatttcatcaaagttcaggtgctgtattaagatcaacagtgaagatactgacatttctttcaaatgttgatagataaaaatattaacatcaaaatctcaatacatgaaagaatttgaaagggccataactaatatttagaggattgtttgaggtttttaaggtgatattctcagttaagatgacaacttcagctataacaatagtgagagagaatttaaaagattttaagttttctaaatataactttaattaatatttttctaattatattattccaataagctgttataatcataatttttgtatcacatttgatccgatggattgaaaatagggttcgtttggaacgccgtattaggtcgtattgtattgtattgtattatattatattgaattgtattttatacaatatttttatataaaactatatgtggtatta

SEQ ID NO: 378800 - DNA, 5534 bp, Cannabis indica
aggaaaaaaaaggataacacacaatatgcaaatgacaacatacttggaaatgaaggattgttgattttacagatctattgtttcgccagaactcataatattgtccccctttcttggtcggtgtgcattcctaaaaggacataacaaaccatttagtaaaaaagaaacacagaaagacactggtttaatattgatatgaccagagaattggtttatttgcattttaccttgactgaaccttctcctgattgtggaacattttcataattcttatactgttctactctagtttgcctatacttctcgcgagagatgctcaatctttcccaaggaattccttgaatatcctgccctctcctagcatccgcagcagatgtatctactattttattctcctgcagaagtaagtgaaatatgagtactaactcactaagtactaattcagtaattataatttttccaataggtgtgtaaagatgagataactaggaccaaccaaattatcatattcttcatcatctgaatctgaatctgtatcaccattttctgaaccacgcaaatacatgatgtcatcaccttctgcaatttcattatcatctgcaacatggcccatctcttccccttcgtaatgagacatgctagcctaagtgcttatacctgagaaaaaattgatgtatcaaataaagaggggtaaagcatcataataaatataacctaaatataataaaaagaatctgctagtatagtgcaagtaagttctacgtcttactaaaaaaataatagcaaacaaatccagttatgatgatgaaccttaccccaagggagtattttaactcacttattatcagtttatgcccaaatgcaaacacagagaactataacataataagatcaccataacgaaattatacaactttttgtgacttaataaactaatgcaggtcaataccttcatcatcaccatttacaattagaacgcacaacaaactccaaatatcagtgtctttatttactcatatctatagtgagggaagtaaaagagatgaaccatttgaagcataacccagataagaggccctctacacttatagagtatagacactataaatctatgtagttcagctgcaacataaagatagtattcaccatcttttatttatttattattatttttgaagtttaacaaaacagggtatgtgagctcgtgtccctgagaacaaactttcaacaatatgacttaagacactaatcaaagttcacttaagaaggtctagggtaatactaggttcaacaggcaaagatgaccaaggaactgatataacaaaatattttaggccaacatccatcagagcattaatatgctcttctcccatagttgacatatcatttaaacattcaataatcctcaatccaaacttaaagttacaaatatcaaacaagaaactttaaaaccctaaactacaataccacacacacacggaaatataaatgtaaattcttcaaagcatcggatgattaagaggaatacaaaaaaaaaaggttcataattcccacccaaacgaaaattgaaactctgaacaagttgctgttataattgaaagacgagaccgtcaatcaccacgcgatctgcatcaacaaaaatgaaaataaaaaaatttatataaaaaaaaatgtttctttcagtgaaacctaattaaacataacaaaattgaagtttatggggttaagaaagtatacatgcaaacacaggtcgtatcgcgacggcgacaatactgtcgtctgagtcggctttactattgaccactgcttttggttcgattcaacatatataacagaaaaaaaaaaaaaagagggcttttttcagtttacaatacgtttaatgtgtttggttgtttaagattgtttctgcaccgtcttcttctcttcggaagaggagagaagatgagatgagaaggagggacaggtgtagatgaagggtcaaatcagatttacgcttatgccccccacctatgtacgacaaacctcattcccttccgatctcgtaactgttcccattcctacttgttcatcacgatttctatatatagaggtgtcattatcactgatatcagatatgtttccgtttcatgtcgtttaaggtaaaaaaacgacttgtcgtttaatcagacaactgaagctacgcaccagcgcgtgaaaactctttcttcggattaaggcgaaaaccagagtcagtgtactccttcccttcccttctctctatctctttccctctctctatctctactttcagggtttcgttgaaattcccagtatgaatgcagtaacgctctctaatacattgcagcttaactatcccattttcaaaactcagcttcaatttccatcaagaccaatttttttgcaagcctcttcgacctgccggagaagcttcagacgcttgattcgacggtcgtctatggtggtcgagactggcgtggaagattcaagcggaactgtttctgaggaagacaacaaaccagaaaccccttcgtccccaactgagtctgtagctcgacgccttattctccttcgacacgccaagagctcatggcgagaccgttcgctacgaggtttgttcatctgagttacgttcttttctataactaaattatgtattgaatcgaaacttgatttgggtgctgaattttaatgtctttgagctaaaaaaataagttcttttaaattgtggcagatcatgatcggcctctgagtaaaacggggaaagctgatgctatcaacgtagctcataagctccaagaattgggttgggttcctcaacttattttgtgtaggtgagaatgtagagattagagaagtctgaaaagaaaaatttgaactttttttggttttttgattaggcaaaatgagatttagttggctttggagattgaaattttgtttgttttctgtttgtgatttttggtgtagtaatgcattgagaactagggagacgcttaaaattatgcaggaagaagttgaaggtttcttggaagcccaagtacgatatgtttcaagcttttattctgttgcagccatggatggacagactgctgagcaccttcaacaagttatatgtagatattcaagtgatgagatacttactgttatgtaagttctgtcaccattcattcaacttacttggccagttattcaagtgaacagaatgggcaaattaattttctaggacaagaattatattagttttattgtttttgcttatggtttacttaatatccactcaaatgtaagttaaactcaattaatatcatcaaaagcaactgaaagatataacattttcattgccatagtaatagagtatgacttttgcaggctgagtcttcaacccgccttgtgttgatagaattgttttctcttcgaactctttttcatctacttccttagttcaatttttcttcagtgtggatttttcaatctttcttatgctcttttagctttatggtgatgtttggcatttaactttacaggtgcatgggacacaataagggctgggaggaggcagcctcaatgttcactggtgcctccatagaactgaagacatgcaatgctgctctgcttgaaactactgggagttcatggactgaggttggttttcctttctttaggcaataacattgtccttgttaataaacaaacattttcttgtctttgaaacgagaaatcctacttggtcaaacaaaagtaagaaactatgccatttaactccaattttacactataatgattgttggctgcaatcgtccctttcatatttgcagccttacagagttcatttaagttattgatgtcagtattgcaataagattttgacagatattctgtattcactgaattggttcaattaattatcaaccttgtgagtaaattgattatacttttggtggcttttgaatcttgctgtccttaactaatgaattcattattttgcctcaggcatttgctttggcaggacttggtgggtggaagttgcagggtatagtaaaaccaagtagctagctagtactacttaaagttaactatataatcttaaatactaaccaaaacgaaaatcttgccccttaacacatctcaagcactaagaagttcagatcaatgctttgcatcttttgataattcttcttgctgatgataaattctccttcctgagagttgtgaaagtggcaagaatctagactcggggctagcaatctggatagatgggagcaggacggtgtcgtcgaaatctattcaaactcaccattggctcgtttgtattgactgttggtgaatttttccacctggaaatttgaagtgaaacttggtaagactggttgtaaaagtgcaagagctgaaactgtgtgctcgttctttgatctattctattttgatcgttgtaaaaagtatccaagctagccaagtgtaaaagatacaaagttatcattgagaattttatcttaatattatctgctaattatcgagattttccattgcttcaccagttccaaagatatattgaaattgatttccacaaaaataaaattaaagatatattgagattgttaacttattctcgaattagcatttacattgagattgacattggcatgatttatgaaaagataattcgaagatagaaccaaccaataatcatactcaatgaattcaatgtctcgctgaaacattaacaagaccccctttaattggaatatcaaactttccagcaaaaaaacaataaaaagggaaaaaaaaatgttttaaaatatattattgtattttccgttggatttatttgaagtatttccacttttccttaacgtatgttacagttagatccgttaacctttaaataaaatgtcgaataattatgtcctttatgacattcatcactacattgtttttgtttttcttatttttaagtagtaaaatatcatcacaagggggacacgattgggccacggcagtgaattatagaagaaatggattatagattgtgaaaatatgaccataacaataggtagattaaaatagaattttgtattgttttgttctattccaaaaaaaatactcaaaaacttcggaatttggacttaggtactcaaaagcagaggaagtcaaatattttcttttttcttttctcatttttctttttaaggagaagggaaaaatagatattggttaggacaagtggggtgctgtgccgtgagctgtgttgtgtgtaccagtggctgcggttttatcttccttcactcagctacctaaaatttcttagcttttttctcctttgccaatttctctgacccctgtacggagaagaaggcactacccctcttctttttcttcctctcagtaatgactttttctgggtttggtattgccattctttgtttttgctgtcttctacgctaaaggtcacactttgttttggtcccttttaagtcctcctgtaaaccaaaattcctgcacctacgccactgaagtttttttttttttcttttaaa

SEQ ID NO: 378801 - DNA, 4503 bp, Cannabis indica
aatcaatgtattatttgtatttccagcaataaaataagttattattattttttttttaaaaaaacttttaatttttattatttccaacaattaaatttgtaaatgataataataataattattaaaaaaaaaaaaaaaaaaaaaagcaaagctatcctttgtttggttggggagatattttaaggagtgtctggactctgggctctgaagctgtggagcatcgacaacaatggacacccttcagaggttcggctgcctcaccttttccttcaaatctccattcccaaccacttctccaattctaattcgtcctccattaaacccatctaactccattctcagaacaagccttcgtccaggtcaatctcaatccttttctcttattcctttttattataacatttaagtttttagacattttcaaagaatttttgttgcaaatgtgactgatttgcagtgagtggaataacgaaagaagatgtagtccaaacattcctcagagagagacaattgaatggagattttatatcaaaggtttctgatatgttatggcaggacgaagctaccaagttgcttagtgagactgagtctgctgtacttgctgatgatgacatttctcaactaccaaaccaggttacaattaacccagactttttaacttcttcttttgatattcaattatgggtttttagattaggaaattgtaacaagttactcacattttagattttgtaatgaattattcaaccttttatctttgtttgacctggatttgctatgatgacttaaattagtattgttaagctgagaagattatgcaagtaggtacagtataatgcataatttgaaacagagaaggaaaaaaaaaaggcaggaaactgtagtgttgagaaggattgagcaaaagtgacattcttgctagtaatattttattgtagataataatttgtggcatggaggatttggctatattgtaaaagtcattatttttaattttttgaaagaaggaatttctctttataattgaatttgagtgtatctagttttgttatatacagtacccatgtacagatacatgcaacatttgaattgtgaggtaaatacaagaaaaactaatttttaaggataatttgacatactagatgtaggagaagggaagtctataattgattgaagagcttcaaaatgctggtatactttaattagcttctgttgatgatttttgcatgttggaatgatgtgcattaattttagttcaactcaatacaaatcttcctagtggcactattgctgatcatagccttcataattggtttttagaccttgatgtgggagggaaattcatgaatttgtacagcttggattttgatgcaataatctaaataaattttgttttaaatgcatgactccacagtcgattggaagatataactaaagcatggtaattgtccaaacagaaagattcatttagcatgatttccatgtaaaagtttggtctcaaacagtcatatgcttaatcaaaaagtcatttatatgatttttctgagtaaattatgttatcttgctgtcgtgaaatttcaaaataaaatattcttgacattagtatatgctcagattttctgtacccaatctctatatatcatcatatttgtgatcgtgatctttcattttaatttagtgaacaaacaacgagtaaaccttttatatatttttctaacaaaatctgatattattaggtgaccgagagtggtgatgatggtggttttttaaagctcacaagaacccaggaatggatacaaggtgacatctctgcaccaataaataaaaaggctattgctaaggtaatatttttaattttgttattggtgtgtatatatacattttttttgttatattgtttgctggtatattataattgaagaaagaaagcaccttgagaatttggttagagttctggatctggattatatttattgttagttctcaatcatctgcatatgtcactacaggcattgcaggatgacagggatagaaggaagagactcaaccttctccaatatgaagctgtatgatacttgaactttgttccttggtaatttgtgtaggtcagttatatgtgtgtttcctgtgtttttcatcttgcatgtaactgtttctgctgcagcaattgttgtgaggaatgacaataactactccttcaccctgccctttcttatatagggaacaaataaggttttagtttgtctccatgtgtttatatgcaaatacaactcccccattcaccgttagttatttcagctgttaagctttcagtacttctataaagatagcagtcaatgtcattaattcttttcttcaagagattgaattgattgaactgttcatttcatgtctttattttaattttctttttttcttttatatgtatataaactttatttccaagttgctcaccttagttactttacatgctgcaagattaacaaggctgtgtgaaatatttttttctttaaaaagatgaaagctaatatgctgtccatctttgtggtcatcaaatgttaccattggttaaatagcctgaattttatgttactactgttttttttctgcagttgaagagagaactattccttgtgtctattggaattggaattgcatgcagtggttactgtttggttgttctatcagtccaggtacactttaattaaaaaaaaaaacccctatcttttaattatgagaggcagagtttctcagattttatgagaaattaagagaaaaacactccctagcttctctaatttgttgatttttcttttaaggaaatgaaaagatgtttgaaactaagctatgtttctatcgagagctaactttcattttaattgcacaggctgctattagttatgcgacaggatttcttttcaggttggtttgctgcatgtttaagtaataatttgagggtagtttcattatagtaatggttaaacctcccaagtttcactcttctttcttcatagcaagccaatgaactttgtctaagtggagttacaaaagcacaacttaagtgtgagtttccttaggaacaataaatatttaagaaaaattatttcccccagaaatgaccctacattgatgagctatagttaataccaggccattcagtttagattgtttatgggccaatggctgtttgatgatctgtatttttcttgatctgttggtttatggaaaacgaaaggccagttgcatatcatatttagctcctcacatatgtttcttcttgaaattgtaatatgattgcattttctgtgcagctgcttgtatctccagcttctgtaccgccatgcagataacctgtctagagaagcagttcctgaaatcttcaggcagaagaaaacaaagaagtacaaccatattatttcttatttacattactgctgtatattggtctttgcagcaaaatactcatgccctttttttcaactgactttacttctcctgctatgctgcagaatcggaataagaagtgatgacttgaaggattcatttgagaaatccatcaagggtagtggtatggctctttcatctccaaggcttgtcatcccagcagcaatatatggactttggattctctctcatcaatatatccctaatgacttctttgatttccaagtaagatatcgaagtgttatttcgttgaatggaatactttcttccagagactgtttttatcaactcgtcacacacctctgatgttatttttgtgtaccatattttggtcattacagcttgtgccagcaatgcttgggctgtttgtatacaaagctgctgctcttgttcaagtctatagagataacgaagacctgcaattggtttttccagaaaacgactaaggttcaacacgattggaaaacttgtacttaattctttttatacttaagaaaacccggcaatttataagcgaaaaagaggaggaatgcttttggaatggctaatagttaacattatatattgtacttactgtgcaccagttttgcggagcggggcccaaaactgcttcttgaagatagtttgaagggagttcagtcaacaaatggattcttaactctggaattctgttctctctagcaagttttagtgaggtcagcttttatctgcaagtttagtgtatattctttatccagttttaaaggaaatgtaaggcataattttgacaagactagttggatatgtttttcaagaactcctcttttcttctttttttcttagctttttagacatcttgggttggtcctaaaagctctgtttacaattattggggcttaaattattccaatgctctgtttggaaccttaaaatccgagtagggatgatggtaaagtgactttgacaataagaagttgagtgcttttgtacaagtgggtttatcatttatgcaacttcttcacttttttttgaatgaatcattgttgttaggggtgttcatcaaatcgctcaaaccgcccg

SEQ ID NO: 378802 - DNA, 3881 bp, Cannabis indica
tcgattcccggctggtgcatttctatggaataatgatgataacttgcgccatattcaaggaggggtccttcatcataatctgatctcagatacaaaaatgcgcatctgaattctattttaaaattttcttacctccttaaaataaggatatactctcagtcaagtcttgtttttttctttatttttttaacatcagttaagtatttggaaacgaattgtttcttttaactaacatgtatacattagaaatagtagagagagagattattgccaggataactgaatctcctacacaaaaggcaacccgatttatctataataagatatagaaaaaaggctctaacagtcagaaaccaagtacataacttgctatacattaaagtgactcctgtcactttcattgttgttgttgaggttcaagatgttgaacttgcaaagagggcatgtagcatttatgtgtaaccatttgtctatgcaactgcaatggaaatggtgacggcatggaagctccctcacttcggcttcatcgtcatacgctgagaggcagatacaacattcctgcagtttataccaaatgtatggactcattcagatcataacttcaattttttcttaaacattatattgagcttcattgcctatcaaatcagtattgtgtctgaattccaatagaactaatatgatatgttatgagactgagataacttactgcatcctcctgagaaagttgacgttcagttggcgaatctgtgttacattcgatcattactccttgaatagattctttgttctccccattaaccatctctgaatcactcattatgcggaatgtgaactttggcaaattatcaatttcttcttctgttgctccctcctgtttcacacataataacagatcatatatagagtaacagtataccaaaagaaagatggttctctcatacttgcacaaaacataaaattaaacaactaataacttatatacagtaaagttcaggtccagattacatgcttgcaccgtttacctgatccgatacaacatataaaattgcaattatgcagggcagaaagcagcaaatagcaatacccacgagacaagcgatggcaacacatagaatgacaaagaccatatcaaaagctagaaaggtaatacaaagcctgcaaaacagagctgcacgtaagccataatacaaacaagacagttaaacagggcaattacactcttaagaagatggcttccaaggaattagaacaaaccaataaagttgaggtgaatcacgagtcaaacatccacccccagcagtcacccagtaaaatccaacagcccaccatacaaaggaaaacatagtatttgcagactccagatgctttagaatactgtcaagtaaacaatgaggttcaaccaacaaccaaattagttttcaatctaaatagaatccacaaaattggttttttcttatttattttaatcttgaaaggcgaaaaacagaccatttctgagcctaaaataagttttatagcaacaaattttcccagtttttttaacgtgactactgaattgaaacgtaattttataaaaaaatatgaacactctaacctggaattatcatcggcctcactctgttcaattgaatattcaacatcgctcccagaactcgaactccaatttccactactttcccaatcccgactgttcccgaacgcttccgtctccggcacgtgccgctgcagccacacgtgctctgcgaagacgccacccacgtgaaaaagacactgaaacatgtagccgaccacccatagtctcaacggcacggaaggcttttcgttcatgctcagcaacagcacagcaataccgctaaccacaaacaccaagttccacaaaacatcaagcaaaattatggctttagagcgagcccacccactttgcctctgttcgagctcctccgccgcgttctctcggacctgaaccgacgactcccggagcatcattcggctcccgctggcgcgccgtagtacccgagccgctcgacgcagcgaaaacggcgtacggcgcacaactcgtcgactccgtatgaggttgttgtggcctatggagctacccagtaacggcgcggagtccatgacttcagccggagaattatatatactatggacgtgtttattcaaatcttgaagtagattttgtgaaatttttataagaaaaattcataataatttcgggttttaaagaatcggatcaagtgtaataaaggaagaaatactgttcttttctcttaatttgctcgtacacaaatttgaacatttgaaaatatttgaagttgaaagaaaatttaaatgtcagaatggagctaaattactaaattctgtctctttttttctggaaggaagtggcgatttgttttttatttcttttgcaatttgaattcatagaaatggaaactgaaactattggggccaagcgattgcttagtccattaattggctccgcgtgtgaataataataataattatagtatcaacataataatatgcagattggtttttcttatttggtaagtattcatttgataattgagattttggtctctgggctgattattcattgtttctatttcattacttagccgagtcaatgaaagcaaaataggagtgatccaagcatttattgtgaatatatgaaggtaatcggactccgtaatagcattaagctaatttataggtactgaattgaaggattttgagaatgtccatagcctcagccacagattttatactacagattttcaaattacatgtatcttatgattggtattccctaaaattaaaggatacttaaactatactttttgtttttttgaacaagataatataactttactctgataagcacatagtaccaactaatactttgccttttatttctttacaaaatttggtgaagtttggtatgtcaagtagataaaatgacattgttggaaacactaccctccacctactaaacggttcttcggccacttgggacttggcctttgtaatttgcatgttttaggtaacaaatacaactgctgaagtgattatctacgtgccttgagagatggccttattttatcttatcttatatcgtaactaaacttccatccttttttctaagcatttttagattagtacacagaatttggagacgtctgcatgttattggtacattttttttttttttctttttttataatccctgatacattttactttgactataagaaatggtatatattcttagtgtgaacaaattaaataataaatgcatttctattaatatttcctttgaaagatcattttgtattaaatatatcaaaaatggcctaacgtcttcttcttatctttgttttgaaggcacaaaatttttattatggggacttaataaaaaaaaaaatttaggtctactttatttaatttatttatttttgtagggtgttttaaatgttgtgtgctatatttttcaaatgaaaagaaaaatatttaatttttttatgcaattttttttactgggctatagcacccacaattttgtatgtgtgtctgtcactagttccaaacattagattgtattacaataccatagtgttatagtgttagggactctaatttttataaattatgtgagattatatttgatattttgattatgaaaaaaagtatttatcaattaaaattattttaattaatgtgtagtaaaaaaaaattaagttctcaaacttatcgtgataattttaggttaggtaaaatagaatgaaatatgatatttttctttctccaataaataaaatatgatttgtcaaatattcgcgttattactataagtccattggtgaaatttcgcttag

SEQ ID NO: 378803 - DNA, 3486 bp, Cannabis indica
agttatttccattccgtttattattaaagcttaatttgcacgctaattttattagtaatcccgtctaggggattagggcttcttaagtatcttgggaagcgtgcctagttatttaaggcgttacaatattgcacaaatcgatatttacaacctattagcaccccatccgggccaaaataatttatacatcaacaaatctctctatacaattgcacattatagatcattgaaccaatctttatctacatcattaatcttttttggtataaacattgcaactctcatcttaacactccacttagtgtcttcaacaattcggttggaagttaaaggaacctcttgcgaaatcacattatttctcaacctccaaatattgtaaaccaaacctgcaattgcagcaacaaagaccattttctgaaattttgaaatctttgctctacctatccatcacagcaaatggggaagactggttgatacagcattccacttcaaccaaattttaatttcctgcagtcctttaacagcaacattacaatcaaaaactaaatgccgactagtttcagcatgcatattaaagactattggaaggaagaaaatattattgattgaattgaagatcccaagagagttttttatatagtgtacaactcattgagacaaatcaagaactaagctaacaaaattcggttagctccaactaattgaacagtcataacacactaaccatataactgattattttaactactgaaacacattaaatttattaccccctcaagatagactaaatatatcgtgtacagacatcttagataactgggtaactaagctaaaggtttggtaaaaatgtttgggagttggagagtgatgttgacgggtatgagctgaatgatggagttcttgatatcttttctcgaatgaaatggcaatctattttgatgtgtttttcctttcatgataagttggattgttagcaatatgaatggttgatcgattgtcacagttaatgaaagctagagttggttgtggaatttggaaatcattgagcaaatatctaagctaggtgagctcactagttatagcagcccctgcacaattctttgcttcagtacttttcgagatggttgtttgtttctttattttttaggatatgagactatctccaagaaagatacaaaattcaataactgatctccaagtgattggacaagatgcccaatctaagtctgaaaagactcttaagtgtatagaagtaaaagcacaggaaagaagcccttggcttgggaacccttttcgataactcaacaaatgatgcaaggtttgcatatgtgtagtgtgtggaaaggaaataaattggctaagggtgttgacaacaaaggtgatatttggccaagattgtaatgaccgcatgattagattatggattaataaaggcaattagcattaattattgacattttatgagtatacatgattttatatttattgtgagttccattttctgaaatcggcattagagttgtaatttctgaattccgaagattttattaaactctaagtgtattatatatgtcatatgcaaaatttaaaatttgtatgatatttactcgatgacgatagaaaatgtgacggatggttaatttagtcacatggattagcttagaacttttttatttagtggggtattcataagttgatatttggtatatcaaagttacgcgggattatagttttgaataattttacccctaaggtattttaccatttaagattttaagtgagggcattttaggtattttaattggaggtttaggtggctactttattagttggcaactggccagtaactaaaatcaagtagagtaatgcaaagtaagagccctagaacttactatcttaagtttttttttattattttctctttttgtttttagcatgaaattgtagaatttgttgctttcgaattagggtttgttctagattgctttctattgtttagtcaagttgatttaagttggattcttgtggttttgaatggttaatcttgtgttgaacaagtttaagttcaagaactaaaacttggtccattaattatgaattgggtatttttgtgtgatacttagttttaccacttgaaaatgattcattatgttgttattaggtatcctggagcttagattcaagcttggattggttttaggccgaattggaggttcttttttggtagtgaaaaatggcagactgtagaaacggtctaccatttttactgggaaagatccagaaaaatggcttgccgtttttatagaaacagcctgtcattttttaggcagtttctctgtttagttgattttctcgtgtgtcctagatatttagggctttgacatgctaattattgataaaaaaacttttagtttcgagtttagatccccaaaaaggtttagaaagttgtttacatattttacgtgattgtgacatagggcctctgttcaatgtgtaattttccattcaagtcgatcgacacgcttgtatttgaaaatgaggtaagactagcataaaatgtatatgtatatgtatatgtgtatgtattttatatgcatgttgttatatgattcatatgctaccaacactcgtacggtagcagtactgagtgcatgttgtacaacacatgatgtttaagagtataatttggtgttaccaacactagtacagttgggtacgtagtgcatgtggtagaacacttagcagtaatcgagctaaagttcaaaccctaccaacattagtatagtagtagtacgtagtgtatgtggtacaaaggtcgtacctttattgagaatattcttaatcatctgttaagccttgtggataggcgtatgggcacctaaataaaagtttgtagtatattgtatgttatatgattttcttaccgaggttgtcgactcatagttatttcatgcatgtgtaggtaaaggaaaagctaaggctgagcagcaatgagtccaaagctcagggatgattgtacatgtctagacagaacgacttggagagttcagtcttgggacaacttgggcttctttttgtagtcattgcgcgacatgtttataaagtttattttggttgtataaataagttaaaaaacgggttcccgcctcttaaaagtatatatatataactacgattataaaagtataatattttcaaaagtttatatttataagaattttcgataaaaaccccttgattagcaaatgtgtgcactgtaattgaaaagtcactgtagcgtgcctaatcattagggcgttacaattttggtgtcaaagttgcccagttgtcttaccgaagatcatcaagacatgtacaatcattggcagagataagctagactcactgtgcagtaagcctttacttatttagtaagttatgtgattagaaaagcattctaggaagcatgtgttacgctaaaattagtctaagtttcgggtcgtattt

SEQ ID NO: 378804 - DNA, 6880 bp, Cannabis indica
ggcaattattaagtaaatagtaaataggatagaagttttttttgaaggaaaaataggatagaagttaggggatgatattaaacaagtaggcgcgtgcaaaacatggtagagtcgtagaggaagttgagagtcaaatcggatcgagttatttatgatttgttagagtgaggtaatagttgcagatttttatgattttttaacaaaaggtgcaactaattaaccaacatttactatttattttctaaattattatcaaatttagtttataaaaattctaattaggataaaatttatgtttaatttatttaaatttattattattattattattagaaaatcctgaagtaaaaattatttattctttttttttactaatttaccaaacaaagatattactagaattcttagaagaaaaaaaaaaaaaaaccaatatgacaaattttttttattttattgtttgaaagaaatttaaaatatttttttttagatatgaagattggataaaaaattataataacattatttttttagatgagtggaatgaattattatattttttttaaaaaaataaacattactcatgcacatttaatacaaaaaaaacataaatatatataaaagataataaaaaaatagcctaaaattaattttactttttattctaaaacaaaatttaaaatttgttgaaacacgttaatcccagcctttttaatttttattttcctttaaaatctaaaactaataactaaaataaataaataaaacctagaacaaaaataaataaaacaaatctataattaattaaattgattgaattataacgataagaatcaaattaaatttcatagtctattttagaaaccataactcaaaatcataatggacacctattaacgcaaatttttgttaattaaatatttaatacctttacgtaataaatgtattatagaatttaataataataattaatgaacacgagatattttacgtagtttttttctttacggtgtataagatgacagttatttttattaggatctatacagttattattttttatatgtatatttatttaattattttatgtttattcaattatacttatgttaaagtttttataattatttgaatatttagaaattaacactaataattatcaaaaaaaagtgaagatagaacaaaattttaaactttttctaatttttagttgagttacaattattttggttagtaaaagtatgctatatcaagtgtattcaatatatcataagtacaaaaagagcgtccgctccctgtttgctctgtggcggttttttctttcttcttccttaatcgtgtttatccaattaacagtctctccttcttctccgatcgtgcgtaacctccattaaactgccatcccaccttcaacctccactccgaccccatgatttccatcccctaccaattctccatcagtatctccacgatggaaaatcaccatatatacaggttcttagtcttgacaaatcactcataccctaactttctacctatggagcgaatcctcaaagatatgtcttcccaaattcaactcactgagaaagaaaaagttgttcatgaaattggagaatcaagcaactctgccattcctaccatctctgaatggagtgtttttgcctatgttctaacccacaaaaaaatcaacacaggtgccttcattcttcaaatgtctgatctctggtctaaacgttttgaagtcaccataacaaatcgaaggggctattttctggttcaatttggctgtgctggcgatacacagaggactctttatcatcaaccttggcatttcaataatcagcccattatttttgttgctatttctaattttacaattcctattgaatccaactttactcacatttccctttgggttcaggttcatggtctcccatttctaagcaaaagcaaagtcttggttgataaaattgggtctgatatgggtgaatttctggaggttgatgatgaatctttaatggagggttggggcccttttatgcgcgtcagagttgatatggatgctacccaacccgtcctccgtggaaccttcctcaaattcatcaacatgaatgatagtttatgggttgatttcaaatatgagtcactacctgatttttgtcacaaatgtggaaggttgggacatacttatctgagttgtctgcaatttttggaggtagaggacaatagtggtgatacttctcttccttatggagtttggatgaaaggtgaccctctcccccgtcctggtgttggccgtcctttgcgaggaagtaaagccaacaatgtggcatggcctttactaactcgttttgtccgcaacaccatacaacaagccttacaacctcccccgaacaccataccagcatcttcccatcaaaatcccataatatcaaacattacaaaaatcccaccacaactcatcaccaacacaaacccacattccactgcccacccatctatctaatccccccaacatcttgccaaaattaactttgccaacacactctgctcatggctcacccataatatcaactcctcctaacactaccatagctgacaataaccttcctactgctactcatacttacaaacgccaagctgtccatactggagattccttgcgatctatactcaaacgctgtcgactacagaatactgctgaaagttcctccaaccaagaccttatgtataccatgatggacactattgaatcctcaactgtcttgccttctgaagcttcagatgacattgcagcctttgtgaatgaccaattatcaacacattctgctgattgagcaacacccgccactcgccatgattgctataagttggaatgctcgggggttggggaaaccgagcaaattccgtcaactgcgcctgcttaattctcaacaggctccccatttattgtttcttatggagacaaagttacctactgggtctattaataagattagagctgctttgaattttcccaatggctttgaagttcctaggaggggtcttgggggtggattaatgttgttatggaaagataatattgatgtaactttgctgaattattcaatgaatcatattacttgctatgttcaatgtgacaatattcacaagttctatttttctggtttttatggtgcacccgaaacacaactaagacctcatacttggagagttctcaagagacttgctgatatttcccctattgacccttggttggtaatgggggaatttaatgaaattttctcccctgatctcaaagttggtggtgccactagagaccttacattcattgataatttccatgaggcagtgaattatggtaacctctctcgtttggattatactgggtgtgactttacttggactaatcgggctcctggttctctacacattaaagaatgtcttgattatggatttgttaactcttcttggcataatgttttcaataccacaactcttcaccacctggactattattcttcagaccacagggcactcaaaactgaattccacaccagcaatgaccctcctcttaaccagaaattcagatcacgtttcgctatgaagctctttggctcaacgatcctgaatgcaatgaaattgttgatcgacattggactacttctgaccataattctctacaccaagttgttcagaatattcacactgtttcctcacatctgcaatcatggcacattaataaatatggtaatatcaagaggaaaatatctgatgctcagaaaaaagtctcagatctcagagcatctgatctctctagtcaagctttcttctatgatcttcatcaatccgaacgaatccttgatgatcttcttgagcaagaggaaacttattggcaccagcgttctcgtattaattggttaaaagctggtgatgctaataccaagtattttcactcccgagcttctggtagaaaagccaataaccacatcaaaaaccttcagactaataatggagagttagtgactgatctgcaaggtatttctggctgtttccaggactattatgctaacctctttgccactgctggtgttgatgctactgctatggatcttgttttggatactattcccacaaccattacacccgaaatgaatttcattcttcagcaaccctttacaagtgatgagatactagctgctttaaatagcatgggaaatgacaaaagtccagggccagacgggatgtcggttatgttttttactaatcattggagtaccattggtcctcatatcactactgctgttttggatgtattaaataatcgctcggatccctcatgtatcaacaaaactctcataactctcattccgaaagtcaagcatcctacctctgtcacgcaatatcgacccatcagtctctgtaatgtcatctacaagctcatttccaaggctattgttctcaggatgaagccagttttgcacttagtcatttcagaattccaaagtgcctttatctttgaccggttaattattgataatgtgttggttgcctatgaattgcttcattgtctacgcaataaaaccaggggtagagttagctatgcggcccttaaacttgatatgagtaaagcattcgacagagtagaatggcattttttagagcgtgttctattgaaaatggggtttggccacggtcttgttgggcttattatgcgatgtatctcttcaacaagcttttcattccttattaatggtcatgttacgggacagttgcagcctcaacgtggtattccacagggagatccactttccccatatctctttcttgtctgttcagaagcactttctcggttgctgcaattacatgaacagcaaggtatgcttacggggctcggtgttactagacaagctcctaaagtctcgcatctcctctttgcgaatgatagcctcctattttgtcgtactgatgctcgttctcttgctgtggttaaacacacgttggatgtttatagcaatgcttccggccaactcatcaactatgataagtcagttatgtctttctctccaaacacttccacagcagatcagaatgcatttagtctcctccttggaatgcctatccagtcttgtcatgagcaatatttgggtcttccctcctatactgggcacaataagagtgaagcgtttaatgaaatcaagaatcgtatttggaagcttcttacggcttggcaagaaaagctcttttccattggggggaaagaaattcttctaaaagctgtggtccaatctatacctacttatgctatgagttgtttcaagcttcctgtatctttctgtaacagtattgagagcatgatggctcgtttttggtggggtttcaaagcaaatggtcattctatacattggaagagatggaactacctatgccgaagtaaacaaatgggaggccttggattccaatcttttattgacttcaatcaagctctccttgctaaacaagcttggcgcttgcttgataagcctgattcgcttctttgtcgaattctccatcaccgttattttagccgtactggttttttacatgccaagttgggcaacaatctctcttatacatggcgaagtatccattagggtaaagagctccttcttgacggtcttatttggaaaattggcacaggtacttctgttcgtatcaatgactcttggctcccggggattaccaactttaaacggatgcatctcatgaatcctgacaacaatctccatgtttctgatcttatcaccaccgatcgtacttggaatatcactgccctcaagagacactttctcagcattgacatagaccgtatattgcaattgcctttatgccaatatgcttctgaagataaactcatatggcatcactcagcatcgggcatatactctgttaagagtgggtatcatctggcgtcttccctacgagaatctcgatctccttcacactctcaatcacaaaccagctggtggaataggttttggaagctcaaactaccccgcaagatcaagatttttgcctggcgtactctccacaatgcacttccccttgctgctaaccttcaccatcgacatataatagatgatcccaaatgctcaagatgcgctcacagcaatgaatctattaaccatgctttcttcctctgtcgggctgtgaagaacctatggtataaacttccctttgccattgatttttctggtttggttaacaataacagcaatgattttcttcatctatgtttctcccgccatgatgatgctcaattggagactatcctcactctcatgtggtttatttggtatgatcggaataagacactacatcaatcctatagtcttccacaatctgtccttttagacaaagcaatggcctatctttatgaatttcgtcaagctactactactgctcaaacccaggggacctcttcactcagagattaaccttggcagcctccccctcacggtttgtacaaactcaatgttgatgctgctttagatgttgacaatcaacagatgggaattggtggtattgttcgcaactccaatggtcatgtcattgctgcaatttctttgccaattaaagggaatttcactgtcaaagagatagaagcaaaagccatctcctactgccttaattgcctgcatcacattggctgccagatccacttcattgaaactgatccactcatagtctctcagcatgttaatactcctcagcaacattatgggcgattcaatgacttaattaatgatattatttgtcagatgtcctctttccccggtatctctattagttatgctccacgaagcgctaactttgctgctcatggtctagctagatatgcctt

SEQ ID NO: 378805 - DNA, 4090 bp, Cannabis indica
ttgtgatgagagctgaatatgcacatttgcctaacctcaccattattgatactccaggttttgttcttaaggtgtgttgtgttttattaaatgttcagagtggagttttttagaattttgtttgtactatactgttattgaattgtgtctatttatgatgtttaattagccttatgataacggtttaattttgatgaattgataaggtaatgaaagccttggtcatctgcaatttactaacaagccttgtaatttccattttggttggcaggcaaagaagggagaacctgaaaatacacctgatgagattctttccatggtgaaatcacttgctagtcctccacaccgcattcttctctttcttcaacagagtagtgtggagtggtgctcctcattgtggttggatgccattcgggacattgacccaacatttaggcgtacagtaatcgttgtatcaaagtttgataatcgtctcaaggtatgagcttataatatactagaaagaatgacatttgaattccaatcatattttaatggattaaaatagactgatttgcaatttagggctgttttagtcatctttatgacatgaattccaatcatattatgtgaatctagtcatatagggttaataatgatttcttctaattgattttgatggctgaattcttttatgcaggaatttagtgatcgatgggaagttgatcgatatttgagtgcaagtggttatttgggagatagcactcacccattttttgttgccctaccaaaggataggaatacaatttcaaatgatgagtttcgtaggcaaatatctcaagtggacacagaagtcatccgtcatttgcgtgagggtgttgcaggaggatttgatgaagaaaagttcaggccatatattggtttcagctgcctgagagaatatctggagtctgaacttcagaggagatacaaagaagctgcaccagcaacacttgctttgcttgaacaacgttctagtgaagtcaccactgaactgtccagaatggactccaaaatacaagctacttctgatgtttctcaactcagaagatttgcaatgttgtatactgcttctatctgcaataatgtggtgcgtaatcaactcaataatcatggaaaacaatataatttacaaactatctatagtggtgtcattggagcaatatatttttccatgtaccaattaaattgcgactccacacacaagtagttccagaatttgatttcacaagctgatttatgtcgtttttttttttttttttttttttaactttctttgctcattgttaaagagaggactgattgatggagcagcagatcctgctccagagcagtggggtaaaacaacagtggaggagcagtatgaaagtagtattgggggttggccaggtgtcattgcagaaataaagcctcctaatgctactctccggctctatggaggagctgcttttgaacgagtaatgcatgaatttcgatgtgctgcatattcgatagaatgtcccccggtatccagggagaaggtatattctattttgttcaagcaacatggggtggcactgctttttataatgtgatgactattaagttgctaaattcattgtaataggttgcaaatatattacttgcccacgctagccgaggtggaggtgcaggagcaactcaggcagcagcagaaattgcacgagctgctgcaagatcatggcttgcccctcttctagatactgcttgtgatcgccttgcttttgtgttagggaatctctttgatcttgctttagagcgaaatcgcaatcatgactcagaatgtaagaaacttttaccaatgcttttatctaatctgtaaatgaccgctaatttatatgttaagtgtacctactatttatcgcagccagttagttagtagtggaaaactttttttctcttatgatataattttcagattttaagccattttcatatcaacttcctctaccatgcaagaaagagaaaaagtttcctttaaggggagggaactgatattagaaattcttctttaattaaaataattgatcatccttttcctttcctctgcttattttcagattagatttccatttttctgatcagacatgctattattcattcattgtgcagatggaaacaaatcaggaaacatggatggttatgttggttttcatgcagctttaaggcgtgcttacattcaatttatcaaggatatctcaaaacaatgcaagcaactagttcggcaccacctcgattcagtaacaagcccatactcattggtgtgtaatgagaatgactttcaagttggttttggatctactgcagcctctgtttacaagtccaaccaatgttcagttggttggctttcacttgaattgtctgatggtggggcatcagggcacgaagaatcagctaaagatcaggagaacaggcctccagagaagagtgctctgcagaccacaccaggtaaaggtacagaacccagagatgctcttagagaatgccaattgacagtgcctgagaccccatcacctgatcagccatgtgatccaacatacggcggggccaaggagctcggaaatggtgctgatatcggggcgagaaaacgatgctcaaggatgactggcaacagcagaaatactgatcacatgagatttcagaatggtggtggtcttttatttggaaatcgagatggtggggtaagaccaggctcggcttatgcagatatttgtttatcagcagctcatcacttctcacagatacgtgaagttcttgtggagagaaatgtggcttcagctctgaattcgggattcttaactccttggtaagctttattcaattattttaatttgcatcttttcctctaagcctcaaaagttgttggttcatattgtgctgtattttagtctccattgctttgtccattcttgtaatggaatattccacattcttgccatacaacttgtaagttcactcatggagtgaattatttcgatagtagggagcagtactgtacaaactacagattagggataggagttcaggagaatcttctactttttccctttttgcatcttttcttgttcaagtcctcagaactcctacggacacacacacatatgtagaagtggattttcatatcatatttcttggcaaaatgacaatgggacgcatcaaatttaacattatatatctgtttgtcctttacttttgcagccgggatgggcttgttcaggcagtggagttggatttgtttgctgtaaatgatgagaaattcatggacatgtttgttgctccgggagccattgacgttttgcaaaatgagaagcagtctcttgaaaaacgtcagaaaattctgctctcttgcttgacagagtttaaatgtgttgctcaggcactttgaaaggcttgtgtatatgtatctataagcggtttctgaatacttcacagcttgtgaacatgaaagggattaggatgagaaactcaaaatagtaggattattttttgtcattaatttggttgtaaaacataatatcctttgttgttgtaataaaatttggttatttgaatattgtttattagcttcgaagatattcatttcgaaagatcaagtagtggcgaggtggtacacactaccactggcactggctgggtctaaatgtattcattgccttgccaccaaattttacatacactagttaacttttataattgttgtattttacctttaataataataattattaattaatatagttgagtagactgaactaatactgcttctttctttctcttttttcttttttatatatatctaggcaagcaatgttatgaatctaaattcaaagaatgataatagtcaattcctaatctactaattttaaagtaatatatatttcaaagtacagtaaaacttttatttaagaatactttattcaaaaataacttctaatttgttataaaaaaaataagtcctaatttgggccagttataaataaaaataacctctaaattctaattaattatacattttctaagtcccgtattaacctctatataagaataattacat

SEQ ID NO: 378806 - DNA, 2301 bp, Cannabis indica
caaacactaccttaatgtgtcagaaaggaagctctcttgtatgaaatttctacgcattctaattgatgtatgccatgtttcaggtgcaaggtgacggtgtgatagtagccacaccaactggtagtactgcatactctactgctgcaggaggttcaatggtaaggaagcataaggagatgagaaattctttgtgctttatgatggggattgggttttaatattatttataaaagcgaaaaatagaacagctgtcaaaatttgctatgtgaaatactcgatttgatgttatgagttcttggtagttgcttatttgtgcctacataattaactactttatgcatatctgatgatggagatatctatttgtaggtgcatccaaatgttccttgcatgttgtttacgccgatctgcccccattctctctcatttagaccagttatacttccagattctgcaaggcttctattgaaggtgaatacattgcatgaattgtatctagcaagcagtaaatatagttaaattttggatattgttctgtttgagttgttgaccacaaaaagaaagttgagttttaagggagaagcttagaaaaagaaattgttgtttggacagattccagatgatgctagaagcaatgcatgggtttcttttgatgggaaaagaaggcaacaactttcaagaggagactccgtacgaatatatatgagccagcacccacttcctactgttaacaaatttgaccaaactggtgattggtttcatagcttgattcgttgcctaaattggaatgaaaggcttgatcaaaaggctctttgaggtctcttaatattaaggtgaattgaaaatgaaactcattccactcttctccctttggcctaataatattcatgtatattactactgtacatattgtatattatgtttggactacagtcctccaaacaaacaataacttaaaatagaaaatatatatgggctatttacaaaaagatgccatggcccatttcttaattacaaatgtaattgttattgtatacctttcttatggctatgtagcaataaaaactgttctacttctaaagaaagatcttttaagtcactaatgattctgtctagttttttctttctttctttctacagatgggtctattggcactttttaattagttctagtttgataaattaataccaatattcttattagttttccatctagtaatatactatttttaagacttaatttttgagaattttacacaaaatactagatttatcaaaaaatcattatattatcgaattgctttcttcatttgtacaacttcttcttcgtatgctcatagtcgatggaactcagaagcagcaatttatatgcctgaccctagccactcaaacctagaaggcaggaaaatcaacatggcttatcagctattcaaatggaaccgtcgcgaaaaacattgatccaggtttctgaagattaagctgaatttctgcctgaaagcaaataaaaataaaatgaaaaagagacttaacattactagagaatgcatgtctcgattctgagttcttggatagaactatcacttagaaaaacagagtatcgaaatgaaagtgtattgaatcttttattgaatatgttttgtatttacactgcatatattagtcctaatgaacttattgacataactagaaaaaactaagtcctttatatactaggagctttagtcggtacaaagtgtaagatgtcaacttgatcctaatactaagatagttaagaataactgtcaactctcaacagaattaacaaccatctcacactatcttactcctttctgtgtattttttgaacacatatttacttgttaaggaatctctctaaatggaaaataaaagatacaatgaatggcttttcaagccttagtagtacaaattaatatagggaaaaatattcaaagatgggtctgggctacatttataaaaggggtacaattaccagaaatgtgtgatttttactatttcgattaaaataatttttagtgctagaaaattactttttgtctcaacgtgtcaaatagaaaagtgatgtagaacagtcttagttttgtccttgtaaaatttcaaaatttttcgagatgtgtagggtaagtttttaagagaacaagggttagattttaacaaaacactaacaagtataagaaatgtgagatctccactatttcgattaaaatgattgttagtgcatgaaaactactttttctctcaacgtgtccaatagaaaagtgatgcacaatggtcttggctttg

SEQ ID NO: 378807 - DNA, 4853 bp, Cannabis indica
aacgaatcaatacgtaagggttcgagagagcatacattgctagctactgcaatgatgagtcatatgacaatggtgaatgaaatatggtaattttacacaaagcatgaggaacgggagcttacaactaactctaaatattgtgcctataaacacttcaaagacagaatttatgagtaaactgtcaaatactaactaaaaagaaacaacaataagaaaatgtggacaaaacatgctcagtgaatagcgaaatacttgaccttacacacatagcagctcaatattctctgtttcgatattgtcctctccaatgccaatgacaacaccacctcaaccatttttcttgaaagtgttctttcatttttaagaactgtattcttaacaagctgcaaaagcaaactcagcagtaagaaatcaatggaaaggatagaggagatactgaataaacaagctctaagctcaacactagaattttaaattgatgttgtcgttgaactaagacagaaatcagaagaaaatatagaaaggatttcaagcaacatctatgtgatatttagcactattatacataatttgtacagcggataacaaacacaacagcataaactcaagcagttaaaccaaccatctttgacaaagactagaggataaagataagtagaaaatgtaaaccagaacaacaaactcccagatacattcattctgtgcaaggcatccaaaacaacgagacaaaacaaaaagaatacttaaaaagctttcttcaatttgcatgggatagtcatcttccaaaaacagtaataaactttacatgagccaaacacgttaaagtcattcggctaatccaccttgaaatttatggtgagaagtaagaagcacaagtagatctaaatgtaagaaattatacaaaattctgatacaattcaaatagcatacatttaacagccatttacggataaaaaaaaaaactactcaaccacaaaatgttatctaggtcctgatatctgctgcgatgagacataagaaaagtaataacgtgcatcagacattgagcttctagaagaagcatttgctggaggatgtaactcggccacattttgctcagtcacctcctccatcacagaagtctcagtgaatcgacgcccataaaagcgcaagaaatttagacattctaatcttggctgacaaagaggcatcccaccttccaacatgccaacaacagcaaccatgttaggccgcagaactggttcctcgtgaacacaacacaaagctacacgtaccaacttttccacctcttcactagtcacacgtccctcaagtcttgggtcaacaaggtccaggtaccttccttgctcatacatctctagtgcaaatagtgggaaataaatgagcccagacccagaggaagaggatgagaccgcaccaccactattgctgtcattcacactatggctttgcgaacgtaaagaacaattttttcttccactaataagttcaagcacaaccattccaaaactatagacatcagttttctctgagattgcagcattagtaagccattctggtgcaagatagccgcgtgtacctctcattgttgtgaaaagactagactgctcagggcttagaagcttagagagcccaaaatcagatattttgacctgaaattgatcgtgcaagagaatgttttctggcttgatgtcacaatggatgatcttctgttcacacccactgtgcaagtatgcaagcccacgtgctgtcccaagggctatttcaaccctctcttgccattctatgactggtccactgccgaaaagggttcggtccagtgagccacgattcatatactcataaaccaatagacgcagtcttccttgagcacaaaaccctttcaatttgaccaaattcgcatgatgaatattaccaataaccgcaatctcagtgcaaaattcctttttcccttgaatacctaaattagttatcctctttacagctacgtcagttttgtcaagtagtgtacctttgtatacagaaccaaatccacctgagccgatctgggttttaaagttatcagtagctaattcaagctcttcatagtcaaaccttttgggtaagcctgggatgtagaaggcatccagatctcctgaagaaaatgatctttgatgacctaactgtatctctcttctcttggagaatctccatctcctgcacaagaggaaacctaaagctaccaaaagaaataagccagtgaagggtaaaagcacgagagcaactataggaaagttccttccttggtcattgttgatactgtcattgttcggtgaggtaggtttgacaagggctttaatataacccaacatgtcattttgacctgtattgctgaaaatgatggaccccaactcattttcgagcatgtagcaagaactagatgagttttcataataaaatcctaagcaggaacagttctttgtgcagaaatcttcgcacattgataaatcaacaccaaaaataggctgagagaagacattggaaaaatattccgtactgtagccaagtctcagatatgaaacagatgaatccaggtcaatactttgattggctgtgctgcaaccaagtggcaaagaataggaggaataggaactaacacttggtgcacagccactggtgttctgtgagtttccatggaagcttgtaggacatgaacatactgggttagaggatgcagcacttgcagtacacaacccaagcttgccacaaatgaaaggaattcgacaagcatcagtgggccccaaaaattcctgcttccattcagaacctaaaaagctattgacagtaaattggccagaagaatcaagcttggcaattcgaaacttggaaggagacaaaatcatctgaatcacaactgccgatccattacggccgaacagaaaaagaccagagctattcattgccatatattccactataaaattggaatttgtataagctcgtgtatccatggataatttccaataagtttgtccatgccattgcaatagtgcatcagaagcactaatttcaagcctataatcaccagttgataaatcattacttgatacggaaccatacagaaacaattcagcaggcaagtgttgtccgatcacaactgtgtctgtcggatgctgaaaactttcccataaagtatcattgaattgatcaagcagtataagattacccatttcagtcagttgtaatgagtatactgacgactccaatggtggagttgaccatttgggattgcctcctacatcagcaatgctaatcccttcaacatttagagtcatcttaccagaattggagatgggagcatcacgattagcagaccagatgattgtgtttgaggccacatgaatgacccaaaggtagaagttggacagctgagggctgggatttgaaacagcagctttaaaagttccatttcgagatgacaagaaggcaccagcactatccacaaacagaaggtttgatgcagtaaaatttggatatatgaactcaacagaaattaaaccagaaaccagaccaaagaaaaagaagactaaaggaaacaagaagaaggatcccaatgcagatgtccagtgagattcagaggaggagaaagtaacaagtttgatgggcttgacttgatgaaaaggtggataggtaatgaatggaataatgtctactctcgagtttttttccatttgattatttgctctctgtactgagttgtgttggcgttgacttctctctctctctcctcaaccaacttgatgtaaatcagttgataacgtaaagaggtaatcgtttattagatgatcacatcatcattcatcaggggatgtaaaatataaaactcagtgccggtctgacctaagaaagcctctatctaagcaaggaataaatgcctcaagtcaagggtaactgtccttttccctaataaattttccacactattattttccaatttaagaaaaactactctcttgatcttttcaaaacaacattgccaaattcttattattctattcgaattcataatagagcatgaggtatggttcattaaatattcagaattcggtgccagcttgatcttatgaggtgttagtttattcaaagaccattcttttgtccaacttcatgcactatcctctatccttctctttcttccttatttttcacatattctattctcaattatttcccaaactctttttttaaaaaaatacccattacgtttaggattacttagataaatatctatatattaaaagtgataattaaaaaaaaaaaaatggtttaacgtttttattttaatgttttgtttttgtgtattaaaatgctaacgtcaacttaacaaaattgttaacttacaaaatatatatgggtgacttaatacgtcaaatatgtaaccattggatatatggttacactaattttaataactagatcattatcgaatgattataattaattaaaaaattaatatattacttataaccgaaaactaccttttatttattattatgttttgtatttttataaatactaattaaataatttatttaaaaagtaaatttaattaaaattactaattaatttttgcaattagttagtaaataaggttattttagcaattaattttttttggcattcaaagtattaaatatctacaacaaaatccttaagaattcaaaaaatttagacatatagacgtaaattaaaaaaggctaattatcaaattttttcttctgaacttttgacatatactaaatcatgccccctgaactttttttgccgttaaaaattccccctgaactattagagattgtcagatttaaggactt

SEQ ID NO: 378808 - DNA, 5416 bp, Cannabis indica
ataagtgttccccttctgtgcagcagcctcaacccgccttccccctacctgagaaaaccatagtagtggaattgaacaacaccataaaagacctttgtttgagccaaatacatcttgagactaatatgaaaaatgtataataccttgtccatgagccaaaacccaatagttggcatgaattgcaccaaatacataacggctagtacaggctgcaaacaaatccatattaatcataaatacaaacagaacgaggtgattttttttttaaattttattaagggatctatctgaataaggcaccacttttcacctggtttgatatccaagcttcctttagtccatggctggcagcaattattgtaagctccgcacacctttctgatgttacccgtttctgttttaaagggaaaaaaaaggctgtaatggagcaagtatgcagcacaaaaggcaatgaaactaatgaatataggcatgatgaagaggggtacaaaggtggagaataataacctctgaaacacctctattttctgaagttgatgctcctaagttagttgttgtttctattggcccagggcaaacaactgtaaccctgattcctttctggaaaagctgcacaatcaaataaggtataagacagaaattgataagagaagataaggctacaaagaggtggaacaattcataacattttctaaggtaaaattaactttaaagtgataagttaatcaagaagtacacagaaggggaataattcatcttttgttatctgcatgtgaacataataattcatctttcatcattaagacaatgatggtacaggatttccggtactaggtttcaactatgcagtttgcatatattccttttctttttctaatcaaaactgacaagtaagagctccaagagaatgaggatactgttgtctatcccttgtttttgcgttcaattacttcattggtacagtgagaacagctgcgcctcagattcaaactaaacctgcaaatacaagggaaatctgcagtatgttctttctaagaagagatatacctcagaccgcaaagtatggaagtagccattcagagcatgtttagaagcagagtacatggcttgacctggtgcaggtgtctttccagcagcactgctcatctacacataatattggagcttacaatgaaggacaactcagaaagaaaccgagttttgatccatctcagataaaatgtcgaaattagtatcggtgaatgatcaagatgaacatccacataccacaacaaagtgaccctttccccgcttcagcatgtaaggcgccagcattctcgtgagagatattgtcccaaaaacattgacatcaaatgttgcctataggtaacgaagatacctcattaaagtcatctaaaacaaaaaattgaattatttaatgtattaaacatcaaatgaaatattcaaaacccttgaatatatattcattgagagcctaaactcatttgagttttgacaatgtaggccaagccatcagccaaacactactactgactgacttggagatgaggtctaacattagttattccaaaagactccttttatgagataccttaagaccttcctccgacacttccaaagctgatgttttctgccaaagagccaaaaagtaaatgcattaacagagatcaatgattttaaaaatgatcaatacagtaactaacttagctcactaaaatatacaataacttaattattatcaatctcaagttcttatatcacaaacttattattcctcacttacaggacgctcgaaagctgcattatggaatatcatatgaacaccagtatcaggaaaaaatgattctgctttcagtacagactccttgagagaatcttcaccagatgccaaatccaatggcaaaatcttaacgccgtgaggagcatgcttacctagaatacaaatcttaatgaaaaattaaggacatttaacttttgaacaactcagatagggttataaattcgaataccagtgagctgttttttgactcgctccaattcagcttcatttcgtgcagaaagaataagcttagcccccaaattcgctagttgctttgcaagaacttcccctttaaatccaccatgaaacatggaaatggttttaatttacttatagatgaataagaataacatttcaagtacacaaaaattccataggtttatgctttcaggcttcgtttggcttcacaaggtaaggcagtaagccagtacttcatgctagtgtaccttttcacacagtgaagctaagcaccaccataaaggagcacatgaagattttgagacaacaataagaaaaacccgctcaagaatgtggattcagttataatatatatttttcaatattattacaacttgaaaagaaagccaactaagaatatttaaaatatgtgctttaatcatttaaacaaaagataatggcccaaaattttacatcaactttttgcaataaagtggcataaacattaaactaaattcaacatcttagcagaaaataattttaaacactagcaagaaaataacaaaaataaatcaattaaccagtgcacatacagaaaatgaatgttgaaaacaaaaatataaatgtatatttaccaattccacgactagcaccagtaatccaaataacctgaaacaataatcaatataattcatttactagaggaaaaaaaactttgttttaaaaaaaaaaaaattgaaactttgattaactttttaactttgaattcagctaaccttatcttcaatttcttcacgcttcacatgccttttggaaatcaaagtgaaatctcctaaacaagtttgaagattaacttttcagtttcagagctaattaggaaatagaaaatcattactagtctatgatacaatttatccatcaacatcttcttaccttcagctgtagcgaatttgaataatattgagaccaaaaaaagaacaaatattgaaatgaagatgagagcaaccgccattgttgtctgctttcacttttcaccctctcaactctcaagtaaatgctgaatacgttaagttcaagagatgcggacgttgaagacgagcattggtttgggccacccttaaatgggcttgaaaataccattaaaggcccagtccattttgccagacgactctcaaaaacgacgtcgttttgggcgatcaggtatactaacatctcatgcttcgcagtgcacacgtttctacaaaggtccatttctcactcttccccttaaccgctaaagagagaaagaggctgtagaagtatcttcagaaggtcttccaatggcggcgagaagcgcactgataaagtacctgagagttcaagtccaggcagtacctcaaaaccctagcaccactttcctctcttccttcaattcgatacgccgccgtttcttctcggaggaggtcaggggctccttcctggataagtctgaggtcacagatcgtgttatcaacgtcgtcaagaacttccagaaagttgatccctccaaggtattattacactctatattttgatctcgttccgaaggttttgaaaaattatagcataaaccctaatttgatgcatcttttacgaatgaatatgtaacgtattccaagtttctgatcatgacattttagttattgaacttctcgttcattagctagcaaatgggtacagatgcatataaatttgtaggttttaggaaaggttgggtttaaggggaattttttttaccactagtaatggtattttgttttgaatctgaagttacaagaaaatgaatgaagagcagttttccatttttaatttaatgttgtgcattgctataaatttttaatcgtatgtacaatgatcaatatgagagctaagaagtgaaaaataatgtgaattgctcttaaatcttcgaagcgccccacttacaatcttagtttgtcttggataagatacagatattgcacttcttagatggtttatattgatgttgttatggtctttagagctggcaacatcgattttttggtttgttgatatatcagattaaccttaattaactgtcatgcttgtgttggatataataactgtagacttgtagagtgaaaatttcatcttgtgcaactttggaacatttcatgttgttttttcgttttgcataggatgatttaggaactttcattagttttatcctcaattctatggttcttttgggatattcatctgtaggatcttctgacctttcttgtatatttcatcctaggtttcaagagattagtatggctagttccgtaatgcaagaaatttgggttgtgtttggttgaaagaaatgaaaacatgggaatgagaatataggaaaggaatgggaaataaaataggaatagaatgaaatgaaatttaaatttagaataaaaattgatagaagaacaattaattttttttccatcttgcattagaatggtcttttcttctatttttgacattctaatactttaaaatgcaactaaacaaaataaaaagcaatttatttccatttcattattccgggttaaaatatcagtaatgcaataatgctatcaatggagatggatattagtagcactaggttacattaaccagttgttgtccccctcttatcttatctgaatgcttgaaaaagaatgtaattatgccacttgccaactaattatgattggaaaaccttctactagtgtttgtctttttactcttcttttttggctcttctgacttgctttcatttctcttgtacaactgtgaacaagcaagagctcttatgtctcaattattctgtacttggcaggttacaccaaatgcgcattttcagaatgaccttgggttggacagtttagatactgttgaagttgtgatggctcttgaggaagaatttggattcgagattcctgatagtgaagcagacaagattaacaacattagtctcgctgttgattttatcgcttctcaccctcaggccaagtgaaagagaatcatgaagccggccgcattcttaaattggtcatgtttcttttctttttcagagttagctgtgaatcaaaccattcaaatcttcctttttccggtctccttcttatcctttttctgataaatgccggttggattttggattattttgttacaactttctaaatgtgggatttgccacatcgatttgttctttttcatttgatgaaaaccaaaaatgaaaccgaaaatgatatagcttgaagatgatatgagtaaaactgctgtaataaaattcatatgctcaaaatgctattttgttttgaccaatacatggtcaaaatatgctcaaagttagtactatgcgccaggtctaaccagaagagtacaacatagtatttgttgttgttgttgttttgtttttttttt

SEQ ID NO: 378809 - DNA, 2209 bp, Cannabis indica
cataaaacccaacatatatgtcaacctaggtgttggtaacagagcaaccttcgataatacggtcataactcactcaatattgatttcattagcgcaattcaacttgcattttaaagctatttcaagatatgtctcacactccaatcgtaatattgaagttatcaagaacaaattttattgtcaagggagttatgaattaattacagcttacctaaagtgggtcccgcggacgctgctcaagttctagaaattgacaaccaacctcctgagtcaatttcaccgttagatcatcattaatgataaaaactaggctaaatgtattttttttttcatattttattattgttttattaggacctcattccttataaaaggagagctcttttagttcatttttacattcagaaaagtacccataaggttagagcatctctctctaatttctctctatagaaattagagctttcaaacttaactatttttcttgtaatcattctcgtgagaataaaaacttgaagtagacgcagcttcattagtgtcgcgacacagggagtgaactattataaattcttgtgtgtgctctctattttacttagttacttctaactttcatctcatctatacatacgagctagttggccagatttctaggtcaatattttggtactttcattgagagctacaactcaagaagtcacttacaagatggttgcaacacgatccacaagtgtggaaagacgcaaaaaaattggccagcagattgagggcacgctggtcacttgaactagtgatgggacaagacctccatctcatatgccaactagaggccacgaaactagctccacagcttgtcccccaaggccaccaacttccaatggtactgagattagtgaacaaattccacctagggaaccacgtgtggaactaaaagaccttaaggaagccaatcctcgatttgaacaacttagccaaataatggctgacctatttcaatagctgcgagactctctcgataaacaacatgaaaaatttcaaagttggttcatggagcaattgatgaacattgagaatcagcatgatgagtaggtacaacgaagagctaacctatctcaacagatcagagaagattatcgctctggttgcagaacaactccccttaggagtgtttctgaattagctggagaaattacccgtccgccatctggccacgtgggaacaagtactaaaggagaaacccttaatgtacgaaacaattctaccatgcccggtagttgtgcaaaccctcaccgtgcaacaggtgttgaggctcctcaaaaggaagtaaactttgagcaagattctgaatggaattaaggtcgggtgtgccaaccaatgggtcctccaactcactttgagcgaccatgtgctatagaatgacccaagtgatctccttcccaaggttctcctcattagtggaaggcaccagcctgtataggggaagggacctatcactaacaccgaaggggtaaacaaaggctttacttcaaaattggaggtcatgaaattttaagagtaagaactaatgagccgctttacactcgaaagtatttatgagataagagaggtgagttatgttgatacttcactcacggccccaatggccaacaatacgagtacttctctcgagtacatggagaagagttgaacttgagcaatcaatgcaactctctttgcacttatgatcctattaaagactatttcaaaggaaataaccactacaatgttttggatgacctctctcgcagcgcatcatcccaagaaaacctggacattgtgccaaaaaagtcttcggtggttccttcacgaccccgtggatagatgaaaatagccagacataagtcgacatgcgtttttgatcgacttggaagacagagagacctggacgacaccctaaccagaggacatatggtggaatcaggagcttctagaagtgaccccaatcgggtagcaaatgttgggttttatgcccaaaataaaactcatttcaatataatcagatttatttattaatatagatcagaaataacatttaatgttgcatggttcacatgatttatttcatgattatatgtacataatgtatgaattcatctgaaaccctttcacatacttgatcctgtttattgtgctgtcaacacattggaaagtaaacatgactatgtgaataaag

SEQ ID NO: 378810 - DNA, 3847 bp, Cannabis indica
ttaatctagtggcttattagtacttgaaatgaaaggttcaacaaacctgccattgtttaaaacatgtgtgattttagtaaattactcagattgaaacaatttgttagccttgacattaatctcaaatagtataattgattaggattttggtgcttagtggctgaaatgattgtttaagtgtgcctaattcttagatagagagtcttatgaggatgatacactattgttccattccaatatttgaaagaattagtaaataagaatcttattgatatcaaagaaagaattaccattcttccaaacttttcgagacacttggatatctccccgagtaaattttactaacattactaaccgaattcttaactaacaccttaggactattaacatagctcagttaaaacattccatcttggctccgccgttaagaatttgataactcagcatctataatcctaatcaattatatttaagaaactacagtaatatcatggcctaatataagggtatggaatttcatgtgaattatttagagaaaaacattgctctagggagataccaaattgtctcgaaaagtttggaaattcataattcactgaattggatcgatagtgataccaacaattgtaaatgtaattgaggattgcaaagagagctttcaagtaattcaacataaactcaccagttaaactcttttcttcgataccaacattaactaaatatgaagggattcggttctcttttaactgcaacacgaaaaagaggaactcgaatgaatataggaaaagtaacaaaagatttaaaacaaactgcgttaagttaacatattgtaattatcgaagagtttcaaaatcaaaccttggaaagaagagcaatggcgaggtctaaagggtcaagcgatgtagggcctttgcaatatgctggtaagaacttcccgttctgataaccagccaggaagtgatatgccgcctggccaggagaaagcttcgatacataagggatactaccggtactgcttcaacagaaaagagaataaggcaatttgtttaggcatttcgggcaagttggataagaagtaaaatggataaaacaacgagctagaactatcatttttttttttgatcgaagtgtattacatatacatttttgagttacacaagctgggatccgatcccagaaccccactacacatgcacccccaataaccttctattggcactgagctagcctcaagtggtaaatggaactatcatcagaaagccactatatggacatagtttataaaacaaaaataactcgacgactgaaaaagatcgaaattttaaagaataaataggatgtccccacgaactataaatcttttagttatagagttttgccccgaactataaaaattcgttgtaaatcttatagtcatttatttagttttaaaatgatacattggatactttttctttcagaacaaagaagtaaaagaataaggacactattttagttaggtgtgttcttgtttacctatcgaaagatgcaagaatgttagcaacgggaggtttaaatagattcgaaccgcaagaacttccattttgaaacagcattgcaacgccttgagaagaaagaactgcaccagcatctgcagacactaacttatctgcacagctcttaacaacattttcaggtgcaaacaagagaaccatagagttgccaaggtttagaagcctgaaaatatcgaaatctccaaatgaattgcagctagaatgataatgcattgcaaattactaatccaaaaacagtacatgaaagaattaccttgcagataaagggaggcctccccgagcgcttatgataggtccagacaaggcagccaatgcttctttagttccatccttatccgagaaagctttaccgcacataacaagcaacgaatgctcgatatcaccaactataaatccatcctcacttccttgagttccaagaccaatactttctgcaacacctgcactgcatgtttcgaaaagaaaacaaagaaatgattaaaaatggtatctttggagtaaaagagtgggagttaacattgagcataccctatagaagtagcaacataaactgttataggacaagagtcatgagaaactgcacgggacaaagtctgccaaagaacattagaaagtgataacgcagcagtaggactctcgcttatcacacgaacttttgcatcaaatttcggtgatgaaccaatggttccatcatgaacaaaaacatttgagatggatgatatgtgagttgtgacctagcagaaaaccagagaacagaaagtataatggtaagcaaagctctttgttgggatagattggacatgctaatattaccaaagaaaatgatgataacaacagcaacaaaagcagttcagatagcttttcagagaccaaaaaataacttaaatataagggaagagtaaaaatgtcttgctagactataatatgtgctactaatatttgaacaggcagtacatctccaaatcctatacacaagttgataggcctccattgctaggaggaacaagggaagttatggtaaggcagcagcaggggaatagaaagttagctgagtagagggtctctagcggggtgtcgagtatttcggtatggtttgtaacttttgagggagagaagagacatctaatctagaattcccgggttaagaaatatcaactcggtttttcatgaattctactctcctatttccattattcatgctgcattacactaatttgacagggaaaacctaccacaagtcatgcattttcgtattttcattttctaatactagggttcctgtcttaaccctacattttttggagaccaggaaactataacaattagtaccacgaatggactcgaatcttggaccttgtgggagcaaccacatgtttgatcatttgagctacccttcttgagttttctactcaaatcatgcataactattcaaagatatgctattgaagaaaataactatctaaacaaatgataatagagtctctcttctcacatcaaggtacaatgaagagtttgttataatttattcaatccaaaccaaaattatagcaataaagccaaagcaaagagctaagacatgcctgctttaagagtttgttaaattgtgtctttgatattgttgaagcccattcaaggacatttcctctaataacaagaggaactcctgacaaggactctgaaaagaactaaattagttaatgaaaataacaactaatgtttaaagttaaagctcaaatttataacttacttacctgtaatgattgcatttgcaccatgttgttgaagctcataagagtttaagttataaaagactttgtctttcacatgaattataccctttgaagccaatgatgccaagttaataccataagacaatctccggccttttctatggaaataccaaaatgcaaatcaaacaccaaaaagaaagaaactttaaaaggtgtaagtaagctttttttttttttaactattattaccaatgattgggaaagacaactgtttcagcttcatcctaggcagctgggactgcatcattctgcaaaacccaaaagaagatgaatcatgtgttgtttagttccattagtttgaagcatatgatccttaaagtaatgaaacaaaagtgaagtggttacacttacattttatacaacaatagaaatatccttaaactaaaatctcaattatgcaagcaccccaaaaacccaacattaataaataaccaaataccaccaaacaacaaaaacgaatgacattttttaactatgaagagagagagagaggagagagagaga

SEQ ID NO: 378811 - DNA, 5358 bp, Cannabis indica
cgttaatgtttagtattttctaaagtattatatcgatattaatgtgattaagtcttatataactgagtgtaataattttatagaatattaataatttatcgcaaggatacctttaattggtgccctaatatcaatactcatctcaataaattgcaacaacaaatattatcaaacaattgtaaccctaatttgtatctagtatttaaattaaaagatatttttattgataataaagacaatttgagaattttagagctttgtattgtaattgttaatttcattcttgggtggtgatgatgatgataatgataatagttaatgagaataccttaacctcttctttttctattattgttgtttatttcttatgtttattgtcgtttcaaccgttttttcatactattgtcgttttccatggttttagtcgttttcactatttaactacttttgtttcacatttattgtttgttcattttatttcttaaagcttattgtcttttttaccatttatgaacttcctataataaatatagaagaatattcagtggttagtgatttcaaaattatttattaattcaaaagtttatgtgatttgttagataatagtcttcaaatctcttaaaatgtatttttttttgagtcagtgtcaaactttaattaaactaaaattctatttactcattcaatatttaataataacctcacaattatatatttatagtgattatactctttacaaattactaataaatctctacactatttcataatgtaatagaaaattggttcacacaactgggttcaaaccttccaccaaatgtattgttctatgatcttatggttacaactctgtgcattgtggaagaagtttgaagctccggcttcacacattatcagtgacggattcagaatttttattatgtggagcttaattgttattaaaaaaaaattaaacctactttatttaatttatttatttttgtaggaggttttatcaattatttgtactataatttttaaataaaaaaaaatatttaatttttttaatacaatttttttttatttggggctatagtccccacacctttttgtgtatgtctgtcactgcacattgtggattgctaagtagcggtacgtagcacgttatataatactaaacactattaatatctttagtatgaaaaatactaaaaagtactagtaatacataatactctttcatgtgtcaatattgttaatttaattaaatattaaatcttatataaattaatataataacttttaaaaactatcattaactaaataatacatctagaagtgttaaaccctattatacccaataacaatatccttgtggtatttctcttccatacatgaaagttacacatgatcaatcctacactagcacctgccaagtggagaatttccaaacccatgcaccacaacacgtggaactttgcatgaaaatacgtgtcaatatacatacatatagacataacatatatatacacataaatgtaagaatcattattacacataaccaaaatataataatgagcaataatttcagcaacttctacgaagcatggttcgatcgactaaagcacttagtccaccaactagttcatgcacaccataccccaacaaccctagaccaacacaaccacctccaacatctcaccaacaagctcatctcccactacaccgaatactacaaattcaaatccctagctatcgagcgcgatgccctaacggtgcttgcagcaccttgggcgactgcgctcgagcgctctcttcactggatggccgggtggcgtcccactacagtcttccatctgatctactcagaatcatcgattctgtttgagtctcatattattgatattcttcgaggtcttcgtactggagacctcggagacctctctccctctcagtttcgcagagtcagtgaactgcaatgcgaaactgtgaaagaagagaacgagatcactggagacttctctgagtggcaagatagcgccagcgaaatgctggttgcggaactggatggtggtggtgtgagccagaagatcggacggttagggtttgttctgagaaaagctgatgatctacggttgagaacgattcagagtgttgttgagcttttgacgccgcaacaggccgtggagtttcttatcgccgccgccgagttgcaatttgggattcgtgcttggggagttaatcacgaccgtacatcaattagagaatattgattgatgacgtcattattaattaattattaaaacacatcatggccgttcattttggatgggagtaatctaacggtaatgatttatatccacttgtgtgttttttctctttatggatttttctctttttttgggactaattctaatattttaaaatatttcatagcaaaaagaataatgatagtaaaaaataatgaggtgaatgatctgcaaataaattatgtaaaaataaattaaaaaaaaagattatgaattattttaattggagagaatcattttaaatatttgaatattaattaataaaaaaatattataaattattttaatttaaaaaataactttaattaaacccatcttgaggacacttgggctgagttcagtaagggggaaaaatttaagggaaattataaaaatatattacaaaaaaaattatttttagttacaataaaattgttaattataaattattattgttgttttgtaactaaaaagtttgtggctaaaagtattagtcataaaaattataatttattgtgactaaatgtgtttttaatcacgtaactaaaattaaattagtgataacttgtaactaaatattatgttttagtcacaagtaattttttgttgtgactaaaagtaacatttaattataaaaaatttatgttgtgactaaaaaattatcactaaaagtaacagttttttataatgatatttaagaataaaaataaaataaaataaaatttatgaggttaattataaaataactatccattttataaaatttatgtgatgaattctacatgtatgcttaaactattaattctttatatttaatttggggagttttcttaagtgctttgataaaaatgtaagtaactaatttcaacattttaagttactagtttctatgctttgataaaaatgtaagttactagtttcaacattttaagttactagtttctatgctttgataaaaaatgtaagttactagtttcaacattttaggtaactagtttctaagtataataagagtaagttgttaaaattgtaaattactctttcattttataagtcaccaaagtctttgaacgcaagagaagtacgggtgctttatctaattccatttgtattattttatttataacatattaatacacattatatattccaattttatattttagatctaatttaatttgtataataatttaaagaagtttatctagagaaggtgttttgcaacctcatattgttgaagccattggaatcaaggaagctctctcttggagtaaagcaaatggatggtcacatgttgtcgttgagtcggattgtttaagggtcattagtgatttgcaaaagtttaaaattatggcttctccttatggccatgttctttatgattgtatggctttgattgctgattttgatattgtttcttttatttttgctaaacggtctgttaataaggttgtgcatgctttggcgcgatcttctctttctgaggctgaccgtacttttagtagaaactctttactttttgtttttgcattcttaattttggatgatttagtttaatgaaatttaattattaatttaaaaaaaaaacagtatgaattaattagatattttaaattaattattttttaatattaaactatttaataacaaatataaagaaagaagaaaaaaattatctttataaaaaaagatgtttatttttgttataaattgtagttttttttattaataatagaatattatcattttaagatatatttatatcacaattatatttgtaaattattatttttatattaaattattaattgtgtatttaattctttcaatataatatatatgaattagattaagttaatcactttacttttacatgttaatattctattggtacatgtacaaattggattggattatagagaagggtcttgaggtgatagtaagaaactagttaaatatattgaatccctatcttagaaattaagttttagtatataactatgaatatcactaactttatttttggtactataaactattaagaattttttaaaatttttacaaagatgatattgtaattaaaatgaatatcattatgaaaaaaatttgaaaaaaaaaatattttggcatttgattttggacgtaaatgctgattaagaaattgtaatatttctacagcgagcccaacggtgggtcttttagctccgtccgtcgtcgaaactatggctatgctggttggattgtaattgcgctctcgtcttggatattataatattgaggtggagacagattgtcaaattattacaaaattcgtaaataaaagatatgtctatttcgctgattatgttttgattttacaagatatttatttagtttgtgatactattattttattaaaaaattttgtaataaaaggggatatttgcgacaaaacccccttagcatttacaattattacgcatatgatcctaatcacaaatagtaacgacaaaaatactttatcttatgattttattgcagtcgtactcttttttagccattaagtgccaactcagaaatacgtggtgacatattattagactacgtattaaataagctaaagaaatatatcgttatgtatttttgagctagcacttaacgagttaacgggtttaattgacacttaacaactaaaaaatagtacgactgcaaaaaaattataagacaaaatatttttactgctattttcttaataaattaatatgtgtaataattacaaatattaaaaaaaaaaattaactataaatattctaataaaaggttataattaataaggttgttcatcaagttgcttaaaccgctcaaacagcccgcactgcaaaaaaaatgcagttaaaattctttgcggtgcggtcgtagtttgaatgttttctaaatcgcgcagtgcggtatagtttacagttttgaattgctaatatatggttcatgtcgcaccgcatattataaaaatatcaatttttatatttatttaagtccaatatataaaagtccagcccaaagcccactaattattatattgttgaaacttaaattttttttttcgcatttattt

SEQ ID NO: 378812 - DNA, 1506 bp, Cannabis indica
aattataatgttatattttaatcaccgacttcccttagtcaatgacattcgtatgcctcctataatcaaattaatgtaaaaattgaatagagttggaataatatcattgttaagatatttggattgagcagcagactgctttttttttttaagaagttatgtagctctacccaaaatgtatatgacaatctatcaaatacatcatccttataagataaaacaactcagatcaacccttatgcaccaaaacgaatcattcactttataattgctcagaaaaaaaattgatttaggaaaagtatttttactgtaaaagaataaaggaaaaaagtgttgttgggaatgttctaaggcataccatggcattcactttataattaattaagaaaataattattcaaaatattcaaataaataaaatagaagtcgctatatagatagagggatccactttataattaattgaaaaggaatgaatgaataaggtgcggttctaatattgttatctgaatttattaattattgaatagaaatctcttaattgagtttgaataaaatcacataagctccttttagtacattgtattgtttttataatattatattaaattgtattattgatcacatttttatatagtataacactatatgattattaatctataagataattaatcacctaaagtattattttttgtaaattttttatattttcatctttaaagatttttttttatatatatttttacgacattttataaaaacaacaagaaaattatataaatataacaaaataacatataaaaaaaaaattataatgcaatacattattataatgttatttgactatattatacttgtttttatcatagaaagcaataatgaaatggtgggctgtcacttattcattaatgaaatctaatgtatagatctagtagtagtaccaaactataaatgtatattgcattatttaaaagaaaaacaagacaattgataatgacaccgaaaattatccacataaaaaaagttaaagcaagtgcatgttaaagtctacgtaacacaattcatatattttggtatttcttagtagaactcaaattatctttagaaaaatttgaccaatcaaacttcttcaacgaacataatcatataaggttgaaaataatagctgcaataaaataaaagaaaaaaatttatcgaattaaaatttaggttgagtcgcgaactaggttattttctttaagatgttcacagcattgtccagaattgtacaaacagattatcagtctcgccatttccagaataaaacaacctagtctaaaacattgtattggaactctattgtataataaagaaccattgaaataccacatccaataatcgtactattgctcgaaatacataattgtatatatcgtatatgattttgttgggaatgcaaccgaagtcccacattagctaggaattggaagaattatgggtatataaggatggacactactccat

SEQ ID NO: 378813 - DNA, 5169 bp, Cannabis indica
tgtattgatccaactcaactcaattatccaacgtggcaactcaaatatcctagtgaaaaaatcttagtttttttaaaaataaaatcataataataaaataaaaactatcgaactaaacaaaaaaaatcaaaacaaaattaattttttttaaatatagaacagattttgtttttgttttttattttattattatgatttttaaaataaaatttatttaccacttggataattaggctgagctgtatcaatacagataggaggatggtacggtgagacaatgtataccaatattagtttttttaaagagaacatcagttcattagacttaaccaaacaacataggattgacagggggcaatccttcccctaaacaacacaagtccattacattcccagttctagcacgaaacgctagatcatttactcccgtgatacaatcacgtttcgcgaaacagaaaaaacactgatcaaaagacttcaccaatttcagtatattcgagaacccagctgcaagtttccaatcaggtaaccgactgttgttgagtgcattcacagccaccaaacaatcagagaacaacgtgactgaattccatccctgtccagccacccactgcaaagccatagcaatggctttgagttcaacatccaacgcagaaatgccctccgaactcctgcaaacatagttccacgccgaggtattcctctctatcccaacagcagctaagcaacaacacccatctttgaacgatccatcagtgaccaaaatctttgaattgaagggggccctatgcaggaattgaatagcctgctgagggacttttgttgcaaccaaggaagtgatcccataaaactcctcaaacctttttctcacctccaccaggaggctcaaactgtcacgacacttaccaccaaacaatcttgaattcctgaatttccaaatagtgtcccaaattacataaccatacacgagtaatctcgaagcttcctcctccgacagattacaacacatgtcttggatccgagccagcacattccccccttgaagtccctcaattctgagtggtataggggcaccaaaccaaactgaacgagtaagactgcactcaaagaaaatgtgcaatgaactctcagctgcacaattacacaagaggcaccagttctcatccactctcccaagcttgtctctagttggcaatacatcactacacattctccaaaggaatagacccgctctcagatgaatcctactcgaccaaataagtttccacaccttttgcgcttcaccaaacctgtgctcaaggtccgcccaatatgcctccttggccgaaaaacaacccgacggggttcttttcacaccagtctatcttttccaagatctcccacaatctctattgaagtaatctgcatccccagactatccccaaaaagataacacacataccgctgattccacaccccttgagactgtaagaaaagatcagacacagtcctcagtgtaggagccttgacacggatttcttccatggtctttcggaactcctcgtatcctagccacgggatccatggctgccaccaaatgttcgtgtcattcccgttagcaatgatagtacaagttccctcaagaatgatttttctagtatctaagatactttgccaaatacttgggtcaccttgcttcttttccaccacccaaaaggtttcccaagaacaaaacttttgtcgaaaaatcttcacccaaagcttatccgcattactcgccatgtcccaggctaatttagccacaagggccttgtttatatcttcaaactttcaatatcccagccccccacgttgcttcggctgacatagggactcccatctagtagctgcaaaataatggttcttctgtaaccctcccgtccaccaaaaccttctcaccatggcgtcgatcttcctacagatctttttaggaatctgaaatgtcgacaaagagtagacaggcacagcaagggcgacagagtttatagcagccaatctgccagcatgcgagagagtctttaatctccacccttctagtttatttttttagcctttccacgataaaagagaaatcgttgcttctatttcttgaaagggccatgggattacccaagtagaaaccaccaaagttcgatctaggcatctgaaggacattctcaatatccctcttttttccactagagcacccaactgagaacaatatagaggatttgttcttactacaaagctgtcccgaccaagcatacttgtggatacactcttgcacacacaaagccgccttcatattagcgcggacacaaatcatattgtcatcggcgaacatgagatgagaaataggagtggagcccctagcaatagagatgcctttgatttcgcctttgtcctcgaccctcaaaagtaaccaagagagaacatcatgacacaaaaggaacaagaagggagataggggatctccttgtcgcagacccctcgagggacgacatttcttgagaggcttcccattgggaaggaccgcataagaagtgctggtaacacaaatcattagtctcttgacagtatcctccaaaaagccatgggcactcaaaatgacacggagaaactcccattcaatccgatcataggctttatgcatatccattttaatggccataagaacccctttgcttttatttctcctcacagtcccgatcacctcctgtcccaataaagttgaatcggcaatccaacgccccagaatgaaagtcgattggaaaggcgagataatcctctccagaatccctttaatcctttgagataggatgcgagaaatgatcttatagacaaagctgcataagctaattggtcggaataactccaccctttccgcattcagaaccttaggaattagacaaatgtagttaaaattgaggtcctcatccaaggctcctatccgaaagaactcctgaacacaatctgtcactttctttcccaccatgtcccaacagttcctaaagaaagtccctgacataccatccggtccaggggctttaaggggatgcatctggaacacttgagtcttgacttcatcagccgatggaatggcacacaagtagaagttttcttcagtggtaactgaaggagaaatccagccttccaaacccgcatggatgcaaggcctagaagattcgaacaaattgcagaaaaactcattgagaataaaacctttatctcgctcattttctcttcttttgttctccccatcataaagagctcagatatggtttcttttccttcgcaccatagtagaagcatggaaaaacttactattccggtccccatgcagaagccacaactctcttcatctctatttccaaaccaattcacttctcatcaattcctcggatataagatttcttatcttttgttcctcttcaaaatgagagtccatattatccatggattgaatcctagaaagcctatcttccagcatcttgagattggcctcattatctgtgaacgatttcttcctccacacttggagggcatttttagtgatcgtcagctgttgcagcaggcttataggacccctcctttgctctcccttcagccaagcatccttaattactttgaagcatgactgctccctgaaccaagcttcgtaaaaacagaacacacgggagcccttaccctttctcgtatccgtatccagaataacaggcccatggtcagaagccaaaataggaaaattctgggcacccccatgaggacacaccgtaagccagttagcgtgaacaataactctgtcaatacgttcacggatcaaactaccgttgaacctcttgtttttccatgtaaacttgcatcccttaaaacccaagtccacctctctagtataatcaagaaaagactgtaggatttctccatccctgtccaagaaacgtctcccaccaaccttatcttctttgttcaggatcacatttaagtcacctataaccgcccatggctcatcccaatttttcaaataattagtaaactcttcccagaaccaacctttctcactatcatagggaggcccatacaccgcaaaaagaccagaatcgttgacattgaggttcccacacccggcattcaaaggtcgacttgtgaacttttaggatactcatagagacatcacttctccataatatacagaaacctccaaccgtcgcatccgagggaatgtactctcccctatcaaaacccacatcccttctcaccaaatcaatttgatccctaccaatttttgtttccataagaaaaagataatcaacacgatacttacttgtccaagccttgatggcttgcactgcctcggcccgagctagacctcggcagttccaggaaaggacaatcattgggataggagggcatggtaagggccgcctcctcgcccatatgaaaatcttgttgaaactcattttcgaccaccaccttgccgctgtcacttccatcacattccttgccacgttccattgtaataccatcttcccctccgtgaataggattctcctggacagtctttcttggtctccctctcttctttgaggatgaagactgagtctttttattcttctttcctgtttggttactcgcatcacttttgccaattgaaaaaaccagagttcccacaggggggtgtcgttcccacattcgtattacacaagagggcatctggaattggttgacctgaagcatcgacagggatgaaatgaatcgaagctttcctttttttctgacccgacccaagcacggcatgggcttgtagtccgttttcatcacataaaaaggcccgttctttgacacatgtgctttctacttcactctcaagaacatgggccacattctcctccaggcccagcccaacgttccatttgattggcacaagttcaaggtaaaggtgtggggtcctggacttacaaacattttggtgtggttgatccatcatttgggcagaagtaggcccaacatttggcattaacgtaagaatgacctcctcatctcttggattcttttccaaattagccatagggtggtccccagtgatggtacgagaatgagtctccaacgtccctgtaatgacctctttagtaaattggattagaaaaggcaattagtactaatttctgttatttt

SEQ ID NO: 378814 - DNA, 1671 bp, Cannabis indica
aaaaaaaaaaaaactagattattcatcaaaaacgaagcccaaccaactcaaacctgaagaggataagtcagtcttgatccccacagcagaagacaacggagtaacaccaggaggctgagaatcaggaacatgaacagaaggaggcataacgtgttgtggaaccatcatagggaagggaccgccatgatacggctgcatattgatattcaacggtaacctaggaggagcacctcccatctgaggaggttgcaaccacagtccctgaggaggaggatgaggagccgccgccataggaggaggcatagactggtacgaggaatgacctaattggggatggaaatgtgaattgagcggaacagagcctgagcctggtggtggcatagtgttgggtctgatgactgtagaggaagaatctgagggagcaagaggcataccaggaggagccatggagaaaccttgacgaggaggcggcggcagcgcccattgcggtggcggtggcgcggagcccaaattaggcgccggagttgtcattgtgaaagtgaaacgatcaaatgaaatgaattcttacagtgacgaaacgaagaagcgtagatgtgttgatgtaatcgctcatttttggtccctatactattatggttatgaggttttagtccctaaatttgttttaacaattaaatcctaaaattcttttctcattctacttttctactttagaaaagagtattgttatgatattgttgggcactattagtaagacggccctaaagaatatagctaactaatcatgatgtgctacttatttgagtatttgtggtgttcaatagcaatgctctttctaaatgagaattgctaaaagtcactattggtatctagcaccccccttagtgtcataccgctattcgtataattaagtatcgggtctcatataacttaagaaaataacttttaaagaatataactaaccaatcgtgaggcaccacctatagaaggtgttgaacactactggtacccaatatcaatactcttttaaaatagttaatgatattacataataaataattaactttggagtctcttacttaattattattattattattcagagacaagaacttcatattttatccgatgtgcaagagtctgaaaattattattaacttgcgttttgtggatgatttcataatcttctgaaaagctcaacaaggctcgatgtagtgtgtcaatggtgtttttgaagagttttgtagcaatactagcctcggggtaaataaaaataaatctcacgtgtaagtttttcagtgggataataagcaactcttattatctaagattgatggaatggttcgtgatttctggtgggggtctgaaaagggtaaccgtggtttgtatctaaaagcttgggataagttttgccttcctaaatctttaggggggcttggtttccgtaaaactagagaaatgaacctcgccttcttggctaaatgggggtggaaccttttaaatggcaaccaatccctttgttgtcggatcctggaagcgaaataccttaaaggtaagccttttcttaattgtacatccaagaattctgattcgtagttttagaaaaatgtgattaaatccaactctatcttaaaaaaaaaaaggagcctgtaagttggtggtggacgggaa

SEQ ID NO: 378815 - DNA, 1626 bp, Cannabis indica
caaaaatcacattaacaggcctatgctagttagggtgttacaatagcagtgtaaaatctcttttggactcaggggttccattttccccatcttacatggcacgtcccaccgggatagtaacttgtaagatggaggaataagctaaaaggtgcaatcaaaacttttgtgcataattttgcaaagtatttttttagaggcaaatgtgcttactagatatatgggcccagctccaagcactggacccatccttgctctgtgtggcaaactcacttacaaccgatagccagttccacactaaactaggaattttacaaactcctccctcaacagacaagttttccatcatgttgtaactcctaaatttgttgatattctgatccatctctccgatatagtcgttgtgaaaaatgggagatgagggtgaggcctttgccttgcctttccctttgcttgatgccttggccttttgtgttttcacctttacaacggcattgaacaggattctcagggataggggccttagagggcacttctatgggtgcctcgacccctgcatcctccatgttcacaacctcaaggttgaactcctcattgaggtcaagcactaaaaaagaacagattagggaggacataggcaattaaatacccaatatgttaaggataatacgggtattaggagagggcctctcctgaaatatcttagagaggtccccaccaaacctataactcaaaaaacatcaatcctcgcgaaatgatgcctcaaagcggtagttcaggatcccacaacaaactcactggataatacaaaagctacagattgatcccatcagagctttaacagctccaaatgagtaggaaaagtaaaaatcaacctagaacttcctaagaatcactcttgccaagtttgaattttttacccttatttttccagaaaaatgcatatgcacacttatagcatgacatttttgaccttaatcagttcagtaccctacaacaccctaaatatcatttctaaagcaatcgcatgcaagataaatccaaagcaaaacttgaataaatgacttctatcctatcatagaatcaaaaattttaacatgttctggaaaacttacttgtgatgcgattggaagaagaggaacggttattggaagtgatttgtgaacctcatgcctagttgaggaatcactcaaaaccttcttgaacatttaactcttcgtttgactgggggtgggttgtgttagatcgagattcggtgtgtttagaaaatggggtgttgaaatatgtagaaggtagtttatgagagaatcgaaactttcattcattcaccggtaaaaatatggaataaacgttttggatttttcagtctagattctaggaaaaaagagctttggttgtagttttgatgtaacgccctaatctatagggacgccacgtgtgtgattttataaactagtttaatactcatagaataattaattattaaaaattgtgataatatttttatcttcactaaaataaaacactagaaatggacattataacagcataaaaagtgtgttccgggaatccctgttataaaaagttttgctaaagaaatatatacgacaaccatttaaacataaaatc

SEQ ID NO: 378816 - DNA, 2024 bp, Cannabis indica
attattctattggtaattcgttcagttattgtgtcttgccaatgttcagttattggcaatctatgagcacagaattgctgtgcaaggtttcgggtggggcatcaactcttttgatcaatggggagttgaactagggaaggttagtaactgagcattacctggaaactttttacggactataatcatcttgcaataatgaaattaacacatttctttatggaaaacttctggtgttatgttttctaccatgccttattaaaatagcatgccaactttaataattatgcaaaaaaaaaaggtttttggataaaattgtgtcacattatcagctccttttctctctcaaaccatatttcaagctctctttttctctactatgatagcattaccactaccttcctgtggcagtagagcacccttaacattgtccacaccattgatgctaccatctcctatcaccattggaacacctatggaagcaccaatctatttttctttctctaatgttttaatcaaaatcaaactcaaaacttaactccagtaatatttaacttaaaacactaatttaaaggtttctaatatatctatgtatgatttattagtttggctcgctccacatttagaactttgaaaatctgtagaattttgaacaaaatgatgctcactaactgtgcttttgtgatgctctcatttgtcataatttttaggtaagaaataatgtttttgcgatgtttctatttttaatgatttttgaagttaaacatgatgcatttgtaatgtttttgcgatatatttgcaatgttcctgttaaaacttgattttagactaaaaattaacttttaatgggagcattgcaaaggcattgttttacttcaaaaatttataataagtgagagcattacaaaagtatcgttagagagtatcgtaaaagtatccttaaaaaaaaaaaaaggagagtatcgcaaaaaaatatcgttgtgttcaagattttgttgatttctttgaagtttagatttgaaataaaaatgcgagcaaacccaataaatcatacataaatgtgtttttaaattagtgttgtaagtaaatattattcgagggtttgttttggatttcattttgttaattaaaacatagattggttcttctatggggtgtttcaatagtggatggaggtggcaacattaattgcgagggcgatgataatggtggtggtaaggttgaaatggtgttgttgggtggtggcgggtgccatggtggtagagcttgagagagaatgggaggggtaagggcctcgagtcttttcctcttttttttttttttttacgcaaactctttttctaccacattgtataacatactctattttcggtcccataatcaaatcatatcacatagctactcaagttagaaaacaactccatgcatctcgcaccaagagtgaacctgtcgagggctttgttgagggcttcaactttaggaccgcaacgttactaagaagatatcttgaggtgtgtcatgtgtgaaacatatatttcatttcagggaaggaaagagagatagataaatgaatcttgacttgaccaaaccaaactatatatattcgacattgcaggcaagttcaaatgatccttcgtattcttcaacccgtttgccctggatatagttgtataacttttgtgtgcctccttatttttgtattgcatatattttgacattccaacttgttttatataggggtgtgcataaattgatctaatctaatgacaatcgacctatccaattacaactggtcgacaaacattggatattcaattggatcggatcagatcggatgttacttttgaatatccaattggatcagatcggatgttggatggggtgtctaaaaattcaatacatctaacatccaattgaactaattagtattttcatttagtttggatgagtaattagattttatattgttgtacctaaaatatatatgtatatgtaaaaattaaattaaaatttcttttttttttttt

SEQ ID NO: 378817 - DNA, 4347 bp, Cannabis indica
aaggtaagatcaatcaacagtttagtaaaattccatactactatactcgtgttgtccaagaaaatttcaaattgaccatcattctgttagatttgaaaagactactgttaatgatttgcatggccaagttctgctttgccattttaatgtgttaactttgccagttttgttcttaattttcttgaatattgtatggcttctttatttttgtttatattttttttttttttaaatgaactagtatattttgacgataatgaaatgtagcaggaacaatctaaatcattattttggaattggatatcatgtcacctgttatggtgaatattttgcctacatttagaactttttgcaaaatgtccttgttattttatgaacttgttctaagcagttattgaacatgaaatttaaaatatgtgtgaatttgttctaagggagggtagcattatattcttggttatgtttagaacattttgcaaaaacttcaacttgttctagatagttactatctgtgaacttttggagcctgtatggatttgttctggggtagcattgtgaaacttaagagaaagtctgtgcttttatttgtgtatatggactctgttcagatcttcttttttcttttttcagagggttcatagttctcaaatgaattggatctcctcttaccgtctgggttttcttcccttttatatttttcctgcctaacttttaactattctgttgttttttttttttcaatagcaaatttccatgatttatttttaacatttaagatagggtgctgggagttttgggtatctactgttgtttgtgattgtattcattaatacttttattatatgctgtactttggtacttatatgtcttttgggcttgtgtttagagagctgcaaacacaggttggggcgataaggacaaagagtcaaggtggggccatgacaggtttgatggtccaaaaacggatgagagaagatccggcaacaatccatttagtcgcggtgcagagcatacagttcaagaaggcaataaaagctcaggctttagagaacaggccaaggaaaccatagaaagggattttaaacaaagcaataggagagagaagagactgggaagtcaatgtgatgatcatgatctaagaacaaaagaccgtgatagcagagaaagaagttcaagaaggcctaatggtaatgattatgaaccaaattcaagcgaagataatgataagcgagagaagaagagatcaggaaagcatgatgacgaagaagttttgctcaggtcaagaggccatgataggaaggaggaaagaaggccaagagggcatggtgatgatgtgccaaagacacgaaacaatttcgatagaagagaagaaaaaagatcaagaagggatagtgattacgattttgagccaagatcaagagaggagcaggatgttggggaggaaaggagaatgagaaggcacaatgctgatgatgttcaagtgaagatgagaagttatcaggataagagggaaggagaaagatccagaaggcatgattatgatgacatagaagcaacgggagataggcgggatgaaaagagattaagtaggccacataacaaggatcagttggagccaaggttacacaaagaaaatgaaagagatgacaatagaagatcaagaacgaacaggacataaaattacaatccttctttaaaggatataactgagataaaatgacattacctgatcctggtaagattgctttcgtcactgcaatcccctggcagctgataagctgattggtttattcgtcaagatgataattgtttatggtgggcttaagcgtgagaatcttaaatgcttgcattgctctatgcctaatggcaaactgttggttatcttgacaacaatcattaaatttttgtggttgaatattgaactgttggaatttgttgttcggactcgacttgtagagtgctggacaactaaattaaattatggcatgcttgcttttagtgtgtgtggttctcttttgcttccattcttgtgttttaaacatgaaattaaggaaaaagtaaggaatttgtagtgatatgttattaaaaataaaaagaaagaaaagtaaacacacttattatcttctttaattttgtacgattctttaaccacaccaagtgattttttgtgaccagcttgtctcgctgatcatttgtacgtattaataggtaataataataagtacatattttaaatgtctaaattgctaatatttgtatttttagccggatagattatgagtagatttagctccactgatcgtaggtgctcccttaaagatttcaaaacacaatgggtcgtgaacaagtcttttaaacttgaaggtgctcacatggtttgttccacaatatccattatataaccaatcatcttcattttcgtaatctctttctccaatttaaatcatgaagcgcttacacaaactatgcaatacaaaagcaaatgcaaatgtgaataagaaattactttattcccatttcactttgacaacaacaaacctgaccttagaataaaattagaatagattgaagttcaacaatagactaattaatagtagttgcttccaatgatactattgatcagttttccaatagcagtaaatgaagatccaccttcctcaacagattttctggccatttcactcatctctttgaccttcttccttacctcactatcaccctccataagatgttttactgcagtttcaatctcttccgccgagacaatatgatcatctccacgatccttgtaatccaatcttaaatcaacagctaagccgaactccctcaccatcctaaacgcgttcagttgttgctctgcataaataggccatgttgcaactggtaccccataccacaagctctccagtatggaattccagccacagtgagacagaaagccgcccacagcactgtgagccaagactttcacctgaggcgcccactcgttgcatatcatccccttacttccaatctgttccaagaatccttctggcaagatttcgtctatggttgttggttgttgaactcgtacagaccacaagaatctatggccactgcgtttgagtccagatgctatctctctcaattgggaagcaccaaatcttcccatactaccaaaacagagaaacactacagaagagtgaggttgctcatcaagccatttcaagattttatcattctgaacttgatccatacttgggtgaggctgaccgttgaggtcaagtactggtccaaccatgtagattggaggtgtttctgccccatcattcatcgagctaaaatataagactccaattcctcaaacgaatttactataatcccttttgtctccctaaacctttgagcaagcttaacataagcagaatagccaccatctttgcaaaatgcagccgtgggaagaacgcttgaaggaacaggattttgaaaaccctgcaatcttaacggagcatctgattcttccaactcagagctgatctggttatggcgagttgcaaggtagaacatgagactaagaaatcccaagttggaagtcatgaacatataagaagggaggccgagctcattggccacatccatcataggcatgcagaagaaatcaagaaccaatacaacatcaccttgagagtaattggagttagatgacacaatatctgtgagtgcttttctgacatgaggaacaagactctccatgtatagatagataaagttttctatggacttgagtagctccatgggaggtgagtcaaccagagggagatgaaggagtttgattcggtgtacaagagaaagtgaggccacaatagaatcaatgtatgcatcgagatgggacttaaagggaaacttcatgtagaggactgtgatgaaaagtcgatgatcatagtggatcaagcgcttggcgaattcaagagttgaaaccaggtgtcctattcctggagctgggatgaacaccaattctacccttgccattgctgtttcttgaatcttgatgatgagttgtgttcttcttctccttctgccgttcctaatatgaacttaaaattgacctaatattttattattcgtatatgcattgaacacactaaaaatagttggtgagcagagcacctcttattatccactcagatgtccttttttttcaacacatgataaatataatattaaaaactaaaacttcccactgttcccattttggtcagatatccaataactagggaataataccgcgctttgcgcggtcttatttaggcatattattttttgaataaaaaaacaaataaagtatatatgtaagataaaaataaaaaa

SEQ ID NO: 378818 - DNA, 2039 bp, Cannabis indica
ttgaactagcctcaagtagtttagaaaaaactcatacaaaacatactaaaataatatttatttcacataccaaacagcccctcaaaatgtgggtttaatctctgaaatccaaaaaaaagtgtgttaaaaagcagcgtttgggagtagaaaagattgttaccaaaattgtgtgagacgagtgagagtggctttagaattggaaggctgcgccaagagaaagttatggagaagaaagacgagacccaacaccatgaaccagaggtagagcaggtagtaaatccatggcaggtatcggcgaaagacggaggcaagatagattacgacaagctaatcgatcagttcggttgccagcgactagaccagtcactcatcgatcgtgtacaccgtctcacctctcgccctccccacgtttttctccgtcgtggtgtcttcttcgctcaccggtctcattctcttttcatttcccttcccattttccgtcattgaatttcaattaaaaaatttctgattttgatgatttggttagtgtgcagggacttcaatgatattcttgatgcgtacgagaaaggccagaaattttatctctacactggacgaggcccatcttctgaggctctgcatttggggcatctcattccctttatgttcaccaagtgggttttttttttttctttatctgtgtttgtttctcgagaaagattaatttttctgtttggtttggtcctcattaatgatgatgatttctgttgcagatacttgcaagatgcctttaaggtgccgctggtcatacaacttactgatgatgagaaatgtatgtggaaaaatctctctgtagaggagagtcagagacttgcccgtgagaacgcaaaagacataattgcttgtggctttgacatttcgagaaccttcatcttcagtgattttgattatgttggagggtaagtcgaaaaatctttacccaaaacgttaatggagaatttgattcacttttctttcatgtttttcaaagtgaaaatgttagtttggtcacttttgtaaacacaattacatttacatacatggtttgttagattcttcgtttgtcatttatttatttatatatatacatatttttgtgtagtgcattttacaaaaatatggtgagggtggctaaatgtgtcactttaaataaggtattataacaactctacttttccttacagtaattgttttctttgtcacccgttctttacttgagtatctgtattatgtaggttactggaatttttggtttttcgggagaggatcatattgggaaaattagttttccaccaatccaggtataataaagatgataacagtggtggttggtttgaataaatttaagtgatttgtcaaattctttcatctttgtttctgggatgtttaaaacacattaaatttgttatatttgctgggttcttttgttcgtgaagagttacaatttgccttttacttggttagtgcaggctgtgccatcgtttcccagttcatttccacatctattccagggtaaagataatccccgttgcttaattccttgtgcaattgaccaggtatttggccggaccatttcttggaataatatagatttcatttatattactttgttttattgatttatgtccacatggcaagcacggggaagtttaagattgcatcttttcatcattcttacatgcctctgttttttgcataggatccttatttcagaatgacaagggatgttgctcctcgcttaggatatcacaagcctgctctgattgaatcatctttctttccggcattgcaggtacacgtgtgataaaagcatggactattttctgtttatattttctcctttaaacacctatcactattatgaaacttactttgaggaactcgtgcaaacttgtggcaggggtttctttcatgtgttgaaaagaaaaatggctgaacattgtataaatattgtatctggatgttaattatttcattgacttttttcatttttttaacttactgtgctactctttgtttaa

SEQ ID NO: 378819 - DNA, 3022 bp, Cannabis indica
taagaactccaaaattaagcatgttagacttggagtaatcttaaaatgtgtgacctgtaaatactcgtgttggtttgtagggtcagtcgtcactccaaaaaacaaccaaaagtgacgtactcgtgtataagagtcatgagtctgtgagggtagcccaataaaagcttgaagcgggaacgttacaatacatctcatcctgtctgtttttagaaaattatgaataatttgttgaaaatacaattcaaattagtaagttacacttatatttaataaaaaaaaaaagtaaataaataaataaagcgttcaactgtttaaattttactgtaaattattctaaattttaaaaaaattgacagaatatgcttcgtatactacacgagtaaaaataatgtccctacctaacaattttcatatatataaatatatatatttatatcttaaaacttagacacatactaggcaaaatgtttgttgttgttcacatgagtcacctattcactcttctcttcataccattttctgttgtgttagctcaattcaatggtttagtgacattgaatgagactctcactgcaggggataaagatgccttttggctttcaccatccaaagactttgcctttggatttcacagactaatcaacaatgataatgttcttgattttgattttactgatgaacattacttgcttgccatatggtactacaaactcggtcctgatgtaaccatagtttggcatgcaaatgcaaccactgtgccaaaaggatccacccttgagctcaatatccacactggcttggtgcttattaccagctcatctcaatcaggtgatcaagtagtatggaaaaccgagctaaaagagggcgagggcgggggcggttttgtaagttatggcttgatgaaggacacaggtaactttgttttgcttgatgagaataggaaagtcatatgggagagtttcagacaccctactaatacattgcttcctactcagaccatgaagattggtgatgtgctttattctcaaaaaagcttaacagatttctcaccgggtgaattcaagtttagtttacatgaaaatggtaatgttttgctaaatttcacatctttgttcaattttgaaactcctgttacataccataaaataggctttaatattggtggtcatgattatcaaatcaactttgatgcaaaaggaaatttgtacttattgagtagtgatagaaaaatatgcattgcaaaatcagatgatgcaattgtctcaccttctaagcattatctcaaagttactctaaattttcatggtgttttatcactgagttattgtccaaagagtaatcataatactactgaaatgtcatggaaagtattgaaggctataccagatgatatttgtaatgatttaattgtgcctagatcaatggggactggaccatgcggttacaatagtatctgcaaagttagagttgatggaatcccaacttgtaagtgcccacttgggtattcttttctcaatccaaatagcaactatagtggctgcaaaccagattttcaacaactctgtgatcataatggaaataagatgatgagtatgaaagatcttccgaaaaccgattggcctcaatctgattatgagctgattgagccttctgattatgaagaatgcaaaaacaattgtttgttggattgcaattgttttgtagctattttcaactttgacaacaatcgatgcttcaagaatagactcccactatccaatgggagagagagtgagacactcaaacactcaatggcttctatcaaatacatgaatgcttcactaattaacactcttcacataccttcttctaatagaacatataagattataatgacacttatgttcatactcttgggtggttctttacttatcaatgctgttgttttgtcttcttctctactcaactgcagcaataagctcattagaagcaatggaaattcggttgtaatgagtttgcgccagtttacatgcaaagaactcacagaagccacaaacgggttcaaagaagagttgggaagaggatcttatggtatagtctataaagggcaaacagagtttggtactgacatagctgttaaattactaaaaagactatttagtgagaatgagaaagaattccaagctgaattgaacatcattggccaaacacatcagaagaatttagtcaagttagttggatattgtaatgagagaaagcacaggcttctggtgtatgagtacatgagcaatggaaccttagcaagttttctatttcggggtcctaaaccgagttggaaccaaaggactcgaatagccattgggatagctagaggactattttacttgcatgaagattgtagcacaacccaaatcattcattgtgatataaagccacaaaatgtgcttcttgatgattgtcacaatgctagaatatcagatttcggtatggcaaagattcttggactaagccaaacacataatagttcttcttctaataaaaccagcataagaggaacaaaagggtacattgcaccagaatggtttagatcatcatcatcaacaacaatcacaaccaaggttgatgtgtacagctatggagtaatgttgcttgagatagttagttgtagaaggaatgaaatcgatttggtagacttggtttatgaatgttacaacaatgagagacttgaggatcttgttgagaatgacatagaagccatggatgagattgagatggttgagaggtttgtgaaagttggtctttggtgccttaatgaagatccctctaaaagaccttccatgaagatggttttgttgatgcttgaagggatagttgtagtttcaagtccatcaacttctcctgcttactcttcttattcatcttcttctaacacatgaaatttaatccaccattatttttcatataaatcttattatgacaaagtcatagaggatcattgtatgcatattgtattaaataataaataatactatgtttggattaa

SEQ ID NO: 378820 - DNA, 4167 bp, Cannabis indica
tttttattttttatttttcttttaatggtctttttttcatgttaactattaaaggatgtattctatgcagctttgcttgaatttttatataatcagaacaacttgatagttgagttatcttttatgatttgtacaatgtcttatattaagttacaatcaaacaaaatgattttgcattttctacttgaagtcttgaataaactttgttttcaactttaagatgttcatctaattggggaaaaacttaaaaatataaaattgtcataaccaatcaccaatgaaaagtagcatagaagattgccatcaaaactataataaagtaacctatactacaccatcaaaagctgaaagatatttcaaagttaaagaaaagaaaaccatataccatttgaagaaaaaaagacaaaagacaacaaatcatgcattacctttaaaatataaggcaaaagacataccatttatgagctaaccagtttaacaatgaactaaatactcagtcgagaaaatttatagcccgaaattaaaaaaattaaagagggaaaaaaaattgatacaaaaactaatgaaatataaaacaaaaaaacatctggatcccacaagggctagtcttcaagcaagttttatggcacatgatcagccaaatcccggcaacaagatctatggcaattatggttgtttttctttcctcgaaaaagcacactgcggtgacaccttcctcgcggggaggggaaaaaagaaaatttacaactccataaaaattatctgttgttcttggcagctctctccaccttatcacataccgtaatacaactagctctcttcagaagggggcggcggtgaatggaaggaaaataaggcattgaataaagtgaaacaaaacgacgagaagttctcacgatgttacagcaagaaaagaaagaacaaaagtactcagttgcaaaaatattttatgaccttttctagagcagactccggcaggcctccacatcagatgcttgtgcttccaataagccttgaccggaaggactagcattaacaatcctcattgtgttgtcgaatatagagattcggaaacgatcgtcttcaactttcttaagaacctccaccagcactttgaagtttaaacttccacttaacattaactttcctatgatagcaccgaaattaggtggtgctattggtaaatcaataccgacatcatccaggagtgatgcatagagcaaacatccagtccctatgtctcttgtcgtgatgatcttttcagaagataagtggtctaggagcctcacagtttggtcgacacaaggcggacttttttctagagcaagagatatggcctctttcacaacctcggagtggtaacctggagacttgagttcctccacacattgttttgcctcatctaatatcaggatactgaaatattcttccaaaagagaaactgtctttttattaagttctgcaggacttaaccctagaactggagcctgtggtttctctacaactggaggcaaagatgcaggaggaggagcacgtttagcaacttcagcgacagtttccgcagcaaaagatggccgagacggaggggcaccactgccttgtaacagggcactagtcttgccacttatgattccaccactaccctgtggtaacagccttgtattcatcgaagttgatttcccaactaacggagccggccctcgtccagcagcatggaccccagaagcatccccccttggcatggaacgttgttgcctaagcactacttcccagttgtcattatccattccaatcacaggcatcccaggcattttcctattggcacctggcatcccaggcatcataccccctgcaccaggccttccaccaatagggaagcctccgggacttgtgctcccttgattactagaaacaagaccacggttatttctgatgcttgctgtggcacctggtcgtaacccaagattcttttcggcctccgtatgaatttcagtaatggttttggcttttacctaaaagagcataaaaatatataagaattacaagaccagataatatatcattacttgattgcaccagcatctataccaaaaaagaaaatctacctcttcacgccttggtacccagttgctagagcgcaaatcaagaacgtcacgaaccatgaacctcaaccttggagccaactgaggatttgttgtaagttccttcagtctgccaaagtacatatcatttattcgccttgattttgggctctcatcaagctgcttaccaattgtgataaagaactgacaaattgcctcaacattttcctcggcagggcaagctttaacatcagttcctaaaagttcctgtcataagaaagagttataataattaaaatcaaacagttgactttgaaactaactctgaatgactagtgtgactgggtgaggaataaagtacctgaacaatgtgatggacaatcttttcaggcaccatcttctgcttcagaagctctccaatcaaccgaatgtttccaagtgtacgaagcttgaccattctatctttgtccctgcgctccaattcttgttcaggagcagtcatttgtcttatttcttcccttattttatcagcaccttcaaaagcctcctggcagttatttaggagcacacgcttgaacgtgatttctttgccaccaggttcatcagatgggaacatagggagattctcactaagatcaaaacacaggcgagcatacatggggcaaaatgtgggctcaagcacagccttgtcaaatatcagagatataacatcctgcagttccaaataagaaaaatcttagcaagaatattccaaaaataaaaagttgacagtcatgcaaggattgaagatggatagattacctttaatatgtcagctgatgtaattccagaatcaattagttgacctttaaggacatcaaatttctctggcgtcagcttattcagaattctgttcagaagagatgaaaacaaacaaacaaaaagttccacgttcagcatacagaatatagataccaacataaatataaatatatatagtcagcgtgaaacataagaagttaaacccttaacgcagcctggtaacatattgtatgaaccatgagaaaaataaaaactaactgcaaccatcaaatattttcagtacttatcaagtgcatattattctctcacagaaagaagaagtagaagcaacagtgataaacttcataatagcttttttaatattttcagcaataattcatatgttatatcagcacatttgcaggttcaccatttactctatcaagatgtgaccgtagcttatgtaagtaattattaagaagtaagcaataatccatcaaaaagcatacatacaaaagctaaaatcatactagtttaaggatatctaccctttaatagttttcagaacacgatccttatcagagataaagttcctctcctagccgaccatggcacctcggccctgacaagagcaggggtaggtcctccctggaatagaaaaatcgaaacaataaatgagaaccaagtgacggcagttatgcataacaaacaaagaatttgaacataaaagcaagctaactgaaatgaacccaaaacagaaaattgcattctttcaaagccataaaacaaacttgtcaataactaatacactagttgtgtcgagcatcagaaatgtttagagaaaaaaatcaaaaggccaataagagaacatttaaaatatgcagcagataacaaaatacatactaaagtcaaaagcttttgcaaagcaattgcaagtatctagatgtacaaaaatacaaataatagcaaagatgccaactatttaatatttaccccttcattagacctagcgaactgggagttcgattgatcttgacgattgaactgattggcatcctgctgtctggaatcagatcggttaccgacctccctattctctttaagggcatcccaagacctctcgtccccagggggaggagctggtgccgtgcggccacgccaatcacgattgtctggctcagaatagcgaccctgagggggatttggtggctgaaaaaggccaaaataaaaggacacgcataagatttgcaatgaaaaccaaaaactaaaaaatagaataaagaaaagaaaaaactcacagtagttt

SEQ ID NO: 378821 - DNA, 3687 bp, Cannabis indica
ccatcaggtttgacttgcctttttttactattattattaattttattcctttaaagcaggggtactcaaaactccaattaaaaaggaaaatgaatattggattattacatctatgtaatttaattgaattggtttttattcttgcacatttatcaaattactaaaattttatgtaattgctaagtttaatttaaacacaacaaatcgagatgtgttctttcaaaaaaaaaaaaaaaatcgagatgtgtgaccgaatacataagtttctttatctataaaattattattgtaattataggaaattattccatatattatttttttacttttttttaaaaaaatttacggttaggatttttaaagtggttgcagcgctagttgcaataaaaatttctatacgattttttgttgcaatttaagttgtaacgctagttgcaataagggtttttatatagaatttcgtaaaaatgtaaaaaaaaaattgttttgaaagtgtaaaaataaaaaagaccctaatttatatcatattttatgtacatcttgtaaccaataaattttgaaatttcaatattaaattacaatgttccattaagtgatgttgaacaagtagtttgtagcgttagaaaatgttattataattttggtgtgattaaatttatataaaaaaaatcaaatatttaaaaaagtatttttagttaaaaaaatatatattattttaaaaaatgaaaccaaaaattatagctttaattttttttttcaaaagttatataaataaagctatgtctcctttatgcatttttagaaaatgagttataaatacataattttatgctgcattaggataatgggtatgttttcttcatttgacttttcatctcgttatttatattgttttatgaacttgagattttttagtagggtttttttaacctggttggagctaaagtattaggcgatttttaggatctttataattttggattttatttctagtttaaaaaagaaaaatgaatctgtttgatccatatcctgaaaatcctgaatttttttatcacaaaattcgcttttctttcacgttaccctttaaccaaactccaaaatccctaaaacaaaactcaaagataatgatgtgaaaattcttgaacatattgagagattaaatagactatatgtttctgctcgatttagacgattcataaatgaaataaccaagggtaaacattcttatatgtgaaaagttgtctggcttaagcctattcatcttactaaaaaccctttgaccaaacatttgtttttaccttttgttaacattacttttttcaccaggtactttaaattttcaaatcatggcccctcccgaaattcgcaaacctaaactgcctcaagatcccacagtacaattcaaggtcgaatttttcgaatcgaaattaacctctatagctccgtacgtcaggccttttttataaccatgtggcattaaaaaaggtgacgactttgtatgtcgatcggttgaaaaagaagagaagagtggctttccacctggttgccttacaaatgactcggagtgtagtatgagtgcttttgtaaaaattggggcttggagtgctgaacacatacatgttggggctattcttcctctgaaaaaagctacttcaaagacttttgtgactatgttagaatttctgcactctaactaattcgtaatggatataggggtttggcttctcttagaaccttatatcgcatggtgggatgggatggttccgggccttagcagatcacttgtatgtataccctcaaggcgacccccgcgaggaaaaattattttggaggctttttcaacctcgaaatttacacgagtgatcgcaaaattatcattgacctccataataataaggaatttatggaccaattcttctagacaataatacttcatccttgttcatatataactttttaaaaacctcgtaagattcataattcactttctttatctgtcatgtgctgatttccttgcatttgtatcaatctcacccccttttttcttttaacaacgatgatgctaaaagctaccccattcaaaatggtgtcgtgacgtcaccaaattttagtgaatttatcattcggaataagggcattaagctttctcctctgtgaaccaaacttagtagcttgtggactgcttggaaagaatcaatcgacaatggttgtcaaagaacaaaaaaaaatttcctggtcattggtaagggtccccctaaggaagaagatcaatttcgtgttgcacgagctgcatttatcaaagccaacatttctcgagaagctgcccaaactcttgaaggggctccccgaggtacaataaattatttttatggatggtccctaactgttctcaaggctgaacaaaattttctgatagccaatacaacttttttatttgaaaattgtgttgatatcatcgtccataggtttgatagttggtactccaaataccatatccaagttactgtcaataactcgtattatggtatcccggaccattataactcaaatgcgtactgggtaaaaacttagaattttagcccaattaacacattagatatttgtgaaattacttactttagggagtatattaatactcgagctggcccactctcaactaactttttagatagtagcctaggtgagactttttcgatttttcttttgtgtggtttacttattttatttccaactttactcattttttatttattgattttgtagaaatggtgaacttcgcaaaacttctccagagcctaactaaccttcttgtgaagagaagaaagaaacaaaacaagaaagatggagatgaaatctcagattcaagtgagttctcaaaaaacaaaagtctaatcctccttctgaaaccattcccaaggatcgaaaccctttgcttgctaaaaaccttcctgattccagctcgtaacaaatttttaatgtggaagcggctctcaaaaaacttgaaaaaggaaaggaaatccttaatgctaaaaaaatcattattttttatgcttcgaagcccgaagttcatctccttgactcaactcttcacttggatccttcagctggcattgcaggagcaaaacttatttctgagcatcttaccagacaagctcgtttcttccatagtttggagaaaggtgattggggatcgctcagtcataggaacatctccgagcttatggatagaagtgagagcttaatgtagatggtaaggttcttctttttccattttttttgacaaaatgatgtaatatccattctgttttttattcgtaggaagttttaatccttgtctttttccttaaaattcaggcttctctaatggttcgcaagagcttttctttgcatactcaacattcttctcgtattaaccatcttttgcaatagtataaggatcagaagtacacttttgttatcaagcgaaattctacttttgagaggatctctctctttgaaaaggaaaatctcaacttgaagactctcaaatctaaagcaacccttgtgataactcttgggtaaagagttatttgatatcactttaagcattttttttatgtaattgtgtgtcatttaagttatgtttgtctcttaatttgtgaaagtttcagtgttttatgtttgtgtgtgtaatttgaagttgttagt

SEQ ID NO: 378822 - DNA, 3311 bp, Cannabis indica
ggtagtacaaactcactgacgtttttcaagtctgcaattaagaagaagaagaaaaaaaaatgaataataaacctaaatctttttaacacaaaacactaggctgccacaactatgaaataaatggacagcactacaaaattagaatgcccgaaaatgtatcagtgaaattcaccaaaccctccaacctataaaacacccactttcaaccctcacaaatttcactagaatagacatagtcagcagagcaggcatccagaactttcagcaatctaaacttgaatttttatacgtcaccgtgagcaacctcaggcagcagcaacagcttgcatcggtccatctgatctgaagccccctctaccaccaccaccaccacttccacgccctcttgccctacctcgcccacggcctcgtcctgcaagatttatgttaacttgagaataagataatgactttttaaaaacaaagcagaacttctggatcaaaatgaggcccctttgataattcgaggtcagtaaaaattgagaacttcacagaaaacagtaatccgttcatcatgcttcaggtcagagttatgattttgtaaatttttaaataaaaaagctgatgagcttgattagaaaaataagttgatgtgttataatttgttataattccaatgtaataacctcctatgcataatcagctcatattgcccaatcaacttcagcaaaacaaaaggcactatttcacatcatacaatatgccatttccaatactagaaagttaacagagagagacatgcataacaagtcagtgggtagatggaaataagggaacttttgagtaactttttcttctcaaagtaggtgtgtcacctaaaaaaatgtcctgataaatgttacttagttttggcttccagtaaaaaaagatgatatcaaatatataaaacctcacctcgggtttgcataggtgcacctcctccgtaatcattgtaaccaccacctgactctagtggctgcatatttccaccaccataacctcctcttccacgaccccggaagccacggcctcttccacgacctcggcctctgccaccataaccacgaccaccttcaaagccaccataaccgccacgtcctccttcaaaaccaccaccatagccaccgcgtccaccttcaaaaccaccaccatagccaccacgcccaccatcataaccaccaccatatccgccacggtgtccaccgtcaaaaccaccatcgccattctcaataactccattgttaaagttacctgaaaaaagctctatcagatttgccgcttcaaacaacctcaaaacaaatgtaacggtgaaaaccattgaatattgagtacttgcaaaagaacaaatacgatgcaggcaccttctgtacacagttatcatacttcaaaattacacattacacattactgctcaacaagaaagttaacaaattggactgacagatctgtgtaagacactgaagtatcaaaaacaataaatcaatcaattgagtgctcatagacagtctgggaaactagtagccaccttgacaaatcttttccacataaaactataccaaagtactcttatgatagttaattatcaaaagaaaattaattaagcagtaacaagagatcaaacacaagatttccaaaaaattcataatgaaagcccaaaaagtccaaaataatgtgagcactggcattactgcaatgctatcatatatacctcttcctctgccccttcctcgaccaccaggtcctctgcctcgcctgttaggtgagccctctacacccaaaagaatacatacaatcattattaatacaattaaagacacatataagatggtaagtgaaatgatttttttaattacctccttcatattcgtattcagtccagggtttcacttgatcagccggaataggcagctggtatctacagcataggaaaagtaaacagtcaagttacattatctacatcaaagaaacatctacaataagaaaacaggacagaagtaatggcagcatttacagcataaagtactctgcttttttttagtgaaagaaatttagaggtctaacattaaaactatgctttcctgaacaaaaatgatcttaacataccctgtggaagaagtgtctaactcctctttcgacaaagtaattgttatcaccgaaacatggcgggtagtttcaaggctgcagcatcattaaaaggtataaataaataaacaatcactaaagtaaagtaagatgaatgcacacactaataactccaattgataaatgcatcttacggaaggaggccctcttctaatggctcccacatatcggttatatcggtggaacctatagaagtgttctgatgaagaccggcaatcctcctctacaagagagaaaaacagggaaaacattaagtaaaagaatttgtaaataagcataagaaatttaatgttaccataattaataggaagagacttaaaccttaatcaattcagcaatcatcacggtcttgttgatggctcttcccatggctttaagagcaatttctttagagcctttctcctggttgtaattaatagtcagtgaaacatttcaacgttagagaaataagtgcaacaatcaagaagaaacacatttatgaactcttcaagcaaaatattaattatattgaaaatatatacaacatgctttgcattttcccaacacatctaaccttaaacgccataaaaaaaaaaaatcctaaaaaaaatgtctgcaactctattttaaccattatcattacaaaaagaaaaatacaaaaatatatatatatacatgattatcagaagcacaatcagtacctcccctgacctacatatataaaaaaaaaattatcgaaaaagaagaagtagaagaaaataacctggagaagagtggtggcataggtaatgtagttcctcatcctaccctgagtagtaatgcggatctcattctcgttaatggtggtttcaggcctcggcttctcaaccctctggtaccgatccatctaagaaaggagaaaaagaaaaatgagaggaaagcaacaatggcgagaatggaattattattagataagcatagatattggtatagatctaaagagaaggaaattagggttagggtttggggagtacctttggcgaagaagaagaagaagagattatatgatattgtgtatgaatgaatacccgctcaaataaagagaggcagagctaataagagctaaccctagccttgcttcgcctctcatctcatcattttttttatttttttttatattaataataataata

SEQ ID NO: 378823 - DNA, 2484 bp, Cannabis indica
aaccaaggccctccgaatctctccccttccctcataatctcagtccaaaaggacttttttgcatggaagtacggggggccatacacacaggaaagaagccaaggatttgagggaggatctgagtacactaagccagaaatatggtgacgagaacatgatatacttgcaaaatcaaatccggatttccaggctaaaataatacccccagcagtaccaatagcaggcatagaaatatgaaaatagaaatgaagtttgttcaaaatacgtactagtggctttgcatccacttttagctcggacaagaagataaaatcaggagcgtacgaccgagccagggacttcaattcgcgaaccgtagaggtctgtcccaaccctctacagttccaagccactgccactgctctcatggctcctgtggaggagaaacatcctcctccacaggggtacaagagtgaaccgacacctcatcatcttggttcggcccaaacaaatcccaaagaaagacacgcaccacatcaagaagatggaacaacacatccaaaagactagagcaaactgtcgccaagccctcaacaagcatccttttcatgaaaggagaattgctttcatatagcccaatgaccgacagggcaccaaaatccccgccaattttacgaatttcaatatggtcaagctcatcaaattttccaagtatttgaataaatatcttttgagcttggaaataaatggcgaaagctctcccctccatatcaaggcaattaacaaacattacccaaaaatgagccattaattgagccaacaacgtggcccaaccgaataggcccattgatcagacacacggccataggcgttgtaccactacaaccaaataaataacatttaagaaccaaccctatgggcataccacaattggaaataaactcacccaatggcccaaaaatatgaacaaaccacatcaactaaggcagcccacacacgccaaaactattcaagcctccaagccctaaagctagcccaatacaacccacaaacaaaggcccacaaagcaaagaagaaacctccacctcaggcaccgcaccacataagccacacaacttacaaaaaatcaaacggtcaacatgtaaacaaggtacgtgaacgacaccctttacatgcacaccaacaagataacacaaactattaacaaaaatgacaatcccacctacacgcatagcttctgaaaagctgggaaacaaaaaggtggacaatcccacctaatctctacaaattttaaccaatacataaaactctaacacaaaccaaatatatatgttttataaaaaaaaaaactaaatatatattatatactttaaaatttaaaaacaactaaaatatgagagagacaaaaattgaacctagcaccctcacattaatataaatcctttcttactaattgtcctaaagatattttgatgaaaattattgaactaatatgtatatatattatatttttatttttatacatacaattttaattttaatttgtagagctctttaaaattgtggggcgtaaaacccttgactgccccactctcctaaacaatcatctttgtcccataaagtcaaatcatctatataaatataaataacaggtgacaggtgtccataagaaaagggttttcctcgttttagtttatacatgcatggcaagtgtatcagtaaaaatgacccgtgaagtgataagtagactattataaaagtattgctactataaatcaataatgttcatcactataccacactataaagtggtgtgttgtgaataatcaacaatactacaaaagccgataccattggcaccaccaaaaaacaaccttatgaaacaaatatatattaaattaaaatatataaaacttaattaattataccaatattaatgtgacaagaattaataatgctaaatataaggtaggaaataggaatcatagtatcatagggtgagagcaaactattatcattgatagatatagatagatataatataaataagtgagggaccgcatgacagggatctaatctgatgaatcataaacaaatactgtacatcacaaatctacttgtcgtgtcctccactaaccactactactactacccttcggcgcctctattatttaatccattcctaccacgtcaccgtaactgaatttacttaaatgccctcactctgttcacacatggcgttctctcattggacgcagctgaaggccgatactttcgggcttacctccaatggcagcatcaccacctcctcctttccgtcttactcactcgccagcacctgatgataaatatcattgtcgagactgaatctggagcaaccctatcaaaacatataacacaaaccgactcgccgagttttccctactgagttcgagtcgccgccgatttctccttcattttaccattgaacgacatggatcgttctcgagctttcgtcaaagacgt

SEQ ID NO: 378824 - DNA, 3895 bp, Cannabis indica
taaattaaagatcaatgatggagaagagtgttcaattgtggtgacaggcatggcagttgccagggatcttctgggaaagaagaacagtgttgtttctgtgattggagatggggccatgactgcaggaatggcatatgaagccatgaataatgccggctacttggacgccaacttgattgttgtattaaacgacaataaacaagtttctttaccaactgctactcttgatggtcctgcaaccccagtgggagctctaagtggtgctttgactaagcttcaagcaagcaccaagttcagaaaacttcgcgaagctgcgaaagtaaaccttaaagccaacttatatgactttctattttgagtttttcttttattttattttacatctcgtgtcaagaactgatttacgaattttgatctttcatagaccatcacaaaacaaattggagggccagcacatgaagttgcagctaaagtagatgagtatgccagaggaatgataagtgcttctgggtcaacactctttgaggagcttgggttgtattatattggtccggtggatggacataatgttggagatttagtcaccatttttgagaaagtgaaatcaatgccagcgccaggaccagtcttgatccacatcgtcacagagaaagggaaaggctatcctccagctgaagtagcacccgataagatgcatggtgagacaatagatatttagtctatacactttttttctttttgagttcttgtcaattagcagagtaataatccttcaatgatctcaggagttgtaaagtttgacccgacaacaggaaagcaatttaagtccaaatcgtcgacactttcatatactcagtactttgctgaatctctaataaaagaagctgaagaagatgacaagattgttgccatacacgcagcaatgggtggtggcactggtctcaattatttccagaagaaatttcctgatcgttgctttgatgtggggattgctgagcaacatgctgtcacgtttgcagctggattagctgcagagggtctcaaaccattttgtgccatatactcatcattccttcaacgaggatatgatcaggtaagaaatgacaataacattgtttatcaacttcaacactcattgttttttttttttttttttgcctactcatatattcaccatctttgaaattatttgataaacacaagtggccatttaggactagtttcaacctgttttgtgtgtactatgtatgaaatttcctagtgtataaaagaactgaaggtattctcattcaggttgcacatgatgtagaccttcaaaaattacctgtccgttttgcattggatagagctggcatggttggcgcagatgggccgacccactgcggtgcatttgatatcacttacatggcctgcttgcccaacatggttgtcatggctccatcagatgaggctgaacttatgcacatggtggccacagcaacagctatagatgacagacccagctgcttcaggtttccaaggggtaatggaattggagcaaatcttccagttaataataaaggaactatacttgaggtaagcatagatcattatagaagtcttaagaaaatatttctacttaaatattgagattcatctctataacttttattcctgaacagattggaaaaggtagaatattaatggaaggcagcagagtagctattttgggttatggttctattgttcaacaatgtgtggaagctgcaagcatattaaagaaacaagacatttcagtgacagtagctgatgcaagattttgcaaaccattggatacaaatctcatacgacggttagccaaagagcatgaaatcctaatcactgccgaagaaggttctattggaggctttgggtctcatgtgtcacactttctaagcttaagtggacttctagatgggtctctaaaggtagtcttcttataaaagagaaaattcatcatagttgtaacaatattcttagtttctgtacttgtcttttcttcttgttttgcctttaaatctttggagctttctttgcagttgagagcaatggttcttcctgatagatacattgaccatggatcaccccaagatcagactgaaacagccgggctctcctcgaggcatatatctgcaacagtcttatctctcttggggaagcccaaggaagcacttcagttcatgtaaacacataaatggaatttctaacatctaaaactgcaataccatctacacacttagcttcctgatcagagcaagttgttgaaatctagcttagaaaagctttagttgcttgtgtcatctgggatttaagacttgttaaatcaatgacaccatatcttcagaaaagagttggaactatttcttagagagagagagagaaaacaaattaattaaagaatagttacatgtactatacattactaattatattatagtgatcataataaaggaagaaattttgtagcaaaatatttcaattttaaaccgaagaaaacacagaagatgaaacatatagtagtctttaattcttttaagaagattaggccaaaagcaaattgaagaagctcctataggcagacctgtaactctgtaacattgttataataattacatggtcctggcttcttaattcatatcaccacacagtagatgttttcttggaatatggttgtgttatcaaatattatcatacaacacttcattattgcctcaatcaatagagaaaaaacttgatcaaggcataactcagctataaatattcacctttagatatatgtatgagccgagatttgtgaatttgcatcatattgagtgcatcttttaatgattgaattgaaaagtcactaaaaatatggccaggagaacaccaagtcatagagaattggatttttttttattacttacatagcttagtgtatagatgaatgctcaaatgctatcaaatatttcttttaactcaaagtgttgcttagctgaactagcttgttgatgggacattaagctataaaaacaattgtgtggaatcaatctacatcaaagactaacaagtactaggaaactcaatcacaaaaacatcttaatatggattcaccttgactaataatctccacaggaacataagccctccttaaaatgataaagtcttctgtcatttcgagcattgatttctcttccaatagctttggaggcaaactttatccatgaatgataattcccgcaaactctaaggttcctaaaagtttgataatagtagcttcatttttagtcttccacggtgcaaatgctatggctagtttctcactgtgataatataaagatattgcaaaagaaggaaaagcttcagagaaaaaagaaaaaagtattattactttatgaaattgattgaattaaaatggttgtgctaattaagcactaatttatacataagtaaagagaaagattctaaataactaaggctaaaatggatttctataaccggttcagtatgatctgtaggaatcgaaattctagttcatccccaggcagatctcatagaaccgattttccggttggaaaccggtccatcgattggggtattttagggtaccctagattttcctatttttatgatatttagagtattgtcatattatctatcaataggaaaactattagttttggttttaagtccccaaaaagtgatttagcgtgtcactcatcagtgttacgaatattttgatttaggagcctgtaaatcgtcgagctgttattccactcaggttgaccgacacacctgaattaaaaaatgaggtaagattagtataatgatatgcatatgtatttacatgtttagcgtacatgtttgttaagccagttagattacattgatagcggta

SEQ ID NO: 378825 - DNA, 2266 bp, Cannabis indica
tctttttaagtttatttttttgcccgccctcacttaccaaaatatgatcacttccccgcaagagatgtggctatgataccatgttgagaatcatgatgttctatctgaataccaattggcaatgagtagaatagtccatgttcttatatacggctcacttttctaccatttattccatgtggaacaacgtccacaatattctttctactaaatttttcttgaaaaataattcatcatattaccttggcaatgtttttataaactaaaaaacctttcaaggttataaattgtacattaaaaagaagaagatcaagaagaagaaaaatgtaaaatagaagaaaatcaacttgatacgtacatcaatttgtgctccttctctcccatatggctttagaaggttgcaattaacaacaaataccacatataaggcaaggtgactttgattgagaaaattcctaataaaataaaaatagccagctaaaagaggaagatgaagaaaaagaatgattttgacgaactaaaggttttggatatttccatgtgctaatactagcttgattaatacaataaaaaatataaataaaaccattgtgaaagaggctattaatataacaaaagagctgtactgcattgtagtactaggtgtgactgtacgtacccaaataatagtttaaagtgtactaaccctgcttgcttttgaaggagggggtgatgtagactttgatttggagtggtaattcagtttatgtttgtgttgtgttgaggtataagtattataagtaaatcttaaattcaaatttgatctatttattattaattgggtcaaaaatgaaaagttaaacacgagctgattataaacggattgacataattcaatccgtttatataaagaatcatgtttaattttgattaacttattaactcattaatatgtatataacaaatttagcatgtttacagtataatttacatatgtaacacatttataaagaatttaacatgtttatgtcctattaaattaaaaaatataatttacatataataaatttaagaatgtgtattcttacaggagtcagtatcatattattttgggttaggtatgtcaatccaaaaaatgacgtgttaataaataagtgagttgtgtcaacctgaaaatgacttaaactcatttaaggcaaacttaaacttgattatttcttgcaaatttcaagtcgtgttataaattgccaccccttcctttgatctacacttctcttaccttttttttttttgaatggacacttctcttacttaattccaactataagtgacattatatttaggaaaaaatagtggcaaaattcactaaattcagtttgtaacactttaactccctatataaaatatttagtggcaaaattccgtatctttaaaaatttgttgcaattcacttaatattaattcaagtgttaaatttaaacacatgtcaaatatcataatggtaaaaaacaacttttaacatatagttataacaaaaattaaatcaaaatatatgtaaaaaatactatactaaacaaaaaaaaaaatcatataattcctaaatatacataatttctaattttttaaaggagtatactatacttaaaattaaaattaagtaaaaactaatttcttttttagtatttaatttaatattttttactttttttttcttgatttctagattgaaaattataatttatttttgtttaaattttagatttattatttaatttttaaaaatctaatatttaaaaaaaataattgatttttgtgataagtattgaatgaaaattgtttataggctaatatgatggtgacatgtgtcatttgacttaacaacaatgagtgtattgccacaagagaaatgctaaagggcatcagtggtgcgtaataccatattatatgttaatatcgctattagtccaactaagtatcgggtcccatataatttaatataatagcttttagggagtatcgctagtcaatcgcaacgcgacatgtcgagaaggtactagacaccactggtgcctaacagcaatgctcttgctacaaattcccaaacgtagtaaattttgccaccaaatatcttacatattacaaaatgaactaattgggacttttgtcactactatccctcatattttatcaccaaagaataaaatagggttaccctaatattgaaaaaataattttttattatttttctcttacttttttttttttttttttttattttactttataa

SEQ ID NO: 378826 - DNA, 1250 bp, Cannabis indica
tatagcaaagtcaatggttgcttccagacccgagtcttctatctgcttttaactaaccttggtcagttatattcttttacttgcatatgcgtctaaattttttcgtgttttttggttttataaaaaatcctaagactcttcaaatggggttgttggaatcaatcattgaaaaatttgacgataacatcaccaagatcagggccaaggtcgcggcccaaatgcttgctggaatgggtaaaggcaaaagtaaagttgttgggtcatccaaaccaaagacccaaattctggcccttctggccaccaccccagctcccctagaaaaacgaaagagtttgttctgtttgaaaagggttctacttccaggggtgctttgaacattcagccacttcaacaagtcccgcttccatctggatctactcttgttgagtgcgccactggtgtgtagaggcacccatcctgatagacgaggaatgagaagggtttgtcttctcgaggaaggttatccaagcactaaaaaagtttgatcccccttcaaactcagaaaaggaggctaagaaggcaagacaggaggacaccctcggttctgagcaagcttaggatcccaaccatgaagactctcgatggaggaaatagtctgaggatgagaggaaggcgaggaaagaagttgaaaggtagcattcttccaaaagtaatagggacttagggcatccagagaatcaatcttaggatttgcaaatgattttaaaatctcaaccatccagagctcaaaaatagtagcttccaactacacttcaggatcccacctgttgattttgcttgacccatttgtcccgcagtagttccagctgagggtgggaaaaatattgaagaagccaatgcgtgtatttataaaatgttgagactgggagaagttcgtttcctagaagaaggcttcccatcttgctactaggtagaaggctggaattgtagacaaggataaagtgagagctctggtctggtcgtagatcgtacgaccttacacacagggttagaagtgacactgcacccttcattgtaaagaagattgacctggccgctaacaatatttaaagctgactctagagaagtgggtcatggcatccaacaatgatctcatcattttggcgcacgctactaagcaataggctgtcagagtaaggttttctttgcattattgataaatatcttttccctataacctcattttttcctaacactttctttcctttttt

SEQ ID NO: 378827 - DNA, 1751 bp, Cannabis indica
tcagcaaggtgcatcatgaaaataaacctcagtaaggcatatgatactgtagattggcagttgtggaggagttgcttaggttactctatgttccttctcggtttaataagtggataatgacttttctaaagggaactcactaccattttcttctgaatggtagaattcaaggtaatttcaaaggaaaaaaaggtctccgctaaggagatccatgtcccctcttctttatgtctagataatggagtatctaactaggctgcttggttattactctgggaaatagggctttggttttcatcctttgtgcaagcaccttcgcttaactaacttgtgttttgtagatgacttagttatctttagtaaaggtaaccttaactcggtgagcctaatccaagaagcctttatgaagttctgcaaagcaactggattgtctgctaacacttcaaagtctcagatatattttgggggagttaatgaagaggttaaagctaagattcttgaattagttcaaatagaagaaggttcttttcccctcaaatacttgggggtcaaccttcgccctactaaatggaaagcgtcagactgtggtgtgatcctggataagctaaataggaatcttaactgctggtctagtaggaacttatcctttgctgcccgagcgcaactgattcactcgattttgcttggaattaggaatttttggatgagtatattcattattcccttcaaggtaacaactgccatagacaagagttatcgagacttcttatgaggttctaaagggaatagaagcaagttgcacctagctccttgggaaaaggtctgcctctcaaaaaaacaaggtggagttggttttcgtgaaggcaaaaaatggaataaggctctaatggctaaacttctatgggtgttagctagtaagcaagatttcttgtgggttaaatggatcaacttaatatatttgagagatcatgacatttggagctgcctcaagaaacaggatgtcaactggtatttcaagaaactactgaatcttagagaaataacagatgagatcaatttaagctctgttgtgataggtaacaaattttgagcaaaaagattatacaacttgctggtggatgaaaacactcctgtatatgctggtgctgtttaggacaaacttattgttccaaaacacaggttcctttactagcaaatatcaaactcccaactcctaactcgtgaccatttgagttgatttatgcctttgcagaacattcattgttctgtttgtgaagctgaaacagaaacacacgatcatgttttctttaactgtattttcttaaaataggtgtttgcagacattaactcttggcttgggagatttcaatggccttgttcagttgctaggttgctggacagaagcagaacaatgccccatgacttccaaaactgtatctccaatgtggttcttgcagctactttgtacctgttgtggaaaaatagaaataggtgcatctttgatcttgcttgtgcatctgctagaagtctaagtttggaagttaggagaattctccaacttagaattttgagtaagcgtccttttaaagcttttcaaaaaaacttgtatttactcaatgctataatagttggtagtggtggttgtttatggttgctagttgttgcagctgcagccgtgtctttgttgtggcatttagcttcagttgtaatgtatttgtcttgtttttgaataaagtttcctcttgttcaaa

SEQ ID NO: 378828 - DNA, 3157 bp, Cannabis indica
tggcttagctctattggtatccaattccaaggtttggctccttttaaaaaagttagaaatacaattaacaatgataatgattacgatcatagccataggataggattctcaagtctcaacctttgacagaacctaaataagaattaaagactttttctttcaatagtgataatactattacaagacatagaaattttataattgtcagcgcaattgtcatccatacctaacacaataatagagtaaaaatacatgtagaaaaaatactaataaatgaggtttggaactaaaaagcacccagctttgactgcaaccactctctggaaattcttcattgtaattttctactgagaaaaaagttcaaaagccaggctttttagacaagagtggagattggttacaagggttgatgtgcttttctttgttttgtgtccttattttcttctgcgaagaattctctcatactgagaaaaaggttaaaaaatcctaaccttttcagacaagagtggagattggtcacaagggttcatgtgattttctcttctgaagaattctctcataatttttaactgagaaaaggattcaacttcaaaaaaaaaaaaaaacaagacctttttagaaggggggttataaaaatgggaggagctggatgcagtgtagatgggaacttgaatgaccagaatttcagcacacctatgccatggattggattatacatagcagcagcagcagcagcatgccttgttgccatggctttagacataatcaacggtttgcgctataaaaaactctggttcccctgcagattcttctccataaatgctacttcactcaccttaatagcagcagcagtgaagctttctgtggatctaaacacttccatgccgagccgaggtgaccagcttgccaagctcagtagcactgtctttgtctgcactataatgggtaactctatgccttcacttggaaccatgggaaatgaagaaatattcatgaacatcgtggctttaggaatactagtaattacccttatagtcaatatttgcatacagttagctactggggcaatctttgttttttggaaagaacatgcttgtgttatgtttatcatgcttgttttgctactgctattgagtttttctgctataacagttcccaccactaagcattatcttgaatataagtatagtaagaagtatgaattagtacttaaagaagattcaagtgagaacaacatttcattagtttgtaaactgagggagaatttgagcaagtattggatgatgtcatatagctctagtccacaatttgtgatgggaaggtcagtgacttgcactgcttcaggggcattttgtttattgagtgctgcaattttgggagaagccatggttagatctttctttatgccttggatgttcaagttttgtgatggtcaatctgattataaatggtcaactactctagttcttgtaacacagactattgctgttggagttggtacaattggcccggcttgcagatggttattcgccattcgattcaggtgtccatataggggaaataaaggcaccaaaagggaattcatagtagaaaaatactggattcagagactagaagagatgaaaggatgtcccttaacttctaaaatatttaagcttcaaaacagacatagcaggagagttgttcatgatgctaaaaaccgaatcttggacttgtgtatagcaatgcagaagggaattgttttggtgagtaagtggattcgattcgtttcgattttctctgcaagttacatcttattgtgctgtgacttatgtaaaagtgtgtcaagaagtgttgattcagaacaagattctcaaagggaaagaagattgaacctaagccgctttgttttgcacctagaaggcgaggaagcacttgttgatcttatgatctcacacaattgtgatgctactaagtactggtttaagctagggagaaaacaacaacctcagtatctgaaaaaactgttggagaaatcttcacaaggctttaaagcattggcttatttcgacagtgaaaaagttcctagcttgggatatgaaaggcctcctaatagttgggctatgcctgtggtgacactaacaagtattgccttagcacttccaaatattgatcccaactcaatcagaaacttgagatgtggagtgaatgaaggccttaactatgtgacaaatgtggagaaatacttagacacaaaagctgataagaccaacatcaagaaagctgcagcagctacttggacagaagttgagctctaccacaaatggcttggagttgatcttataaaaatgtcacttaatcaagagctaaccccaaatgaagtgcttgaacaactatcccaaattgctaggaccaagttttctgagtatgagaagctaaatgaggctcattcttgcttaaaggacaatccattgaaatggccttccaagttattagctgcaaattcaatgtacagaataaccaaatctcttcagctaagctaccaaagaagtgaccaaacatcatcagagagattatttgaagctatcacagttatgatctctgatatacttggtgcttgtatgactaacttacaagaagttataacagtcaagtgtttgagcactgccatagaaaagagagaagatagtgtaaggcaagcagtttttgctcttggaaaagttgaagagatcttaaagattatagaacacagacaagttccaaacatggtggaaactcatcagaagagttgcatagataagtggcgtttatcatactctgaaaaggggttatgggaatcacagaatgacaacctgaaatctgcttcaaatgatgtctacataaccatggaattggaagactagaccaagaccattaaaagggttgttttttagtatgtacatgtacatatatatatatatatgttgagtaaactgctagcaaaataaaagaggaacgatattaccgaatgaagaattctgggttgagtcgcggactaagtcgctctctttaagacgttcgcggcactgcccaggagtgtgcaagcagtcggaaattgccggtcgtccccaggataaaacagcccagtcgttgtactgtatcggaaccccactgcactgtagagcaccgtcgaatacac

SEQ ID NO: 378829 - DNA, 4400 bp, Cannabis indica
tttttttgaaatggaaagggtactttctattgtggacattaaagggaattggagttcagaaaactgttcaatcttttcttttgtccctggaaaatgagaattgagaataatggtcaagtatcagcttaaaccatacaattttgtagtcactttgattttgagccttcttgatgtaagaacaaggctgtgtagatttttctttcaggtttagatttcagggaatgattctttgcatattattggaaagtattgttagtgatttccaaattgttgaacacattatgttgcttttaagtgtgctattctatcatcaacaacctaaatctttttcctcttttgctggaaactatcaatgatgtagtacaattttaggttagagtttgaagtattaataggttggtatatatgtaaatataattatatggatatattgtgctgtctgatgttaggtgggtaattaggagccatttaaacactatataaacacttggacaagtgcctaaacctagatgttttttgcttttacatatgcaaatgaccaattaattttgttgggccccaacttattgtagaagcaatgggtcaaactggttatcaggtcaatgtatattgtttctatgtaaatgaattgcattgtaattcaacataattttattgctattatagtattggttcatggtatgggttgaagagtcaaatattgctctatgacatggtcttctcttattgaataagacattgtttgaaagaattggtgccaagctagctcctttactttgatcatagatacatttaaggcttttctgttactcgttcccaacatctgattctgaatctctttaattatgtaactatggtaggttctgcttcactgggcttcctagcgatgttgttgttgaagttagtgatatgtcattccatcttcacaaggtatttttgttttagtttccttttcatgttaatatctttacttttttcacaatgtagtgtgttggttgcattgtagtgtatttctcttgatttctacacttaagtttgggctcttttgatctgattcagctcaaattcattttggaattcttcattcgaaatcacataagtaatatcagtctcatctttgtctcaaactgcaagatatcactcaattttaagttgaagaaagttatattctagatctattttccttgccttggttggtgtattcatgttaaataccctaggaaaacaatgtttcatgacaattgtggatttatgcataactaacttgcccgaatttcggttggattttgctgtgaacatctttatataaattgttcagaatttcgaattttggaattctgtatttgaattaggatttattttttaattgctgcaacttcagatgtcattgtgtaaaatatctaaaaaaattctcacagtgtcatttgctgcaacttcattacccaattggagtttgttgttggatatctcagtgtgtcatatggagtaaatcatctctgctttgaagaagaaaatttctctttctccacttttctttttaattattcatctttgttttttgctgatattatgaggcataatatctgatatatttattttccccttttattagctaattagtacttacatgttcccactatattgagttgtgcttatataaagcggttatagttgctcacaacttgtttttgccgtttgatatagttccctttgctctcgaggagtggggtgttagaaaaattgattgcagaagcatctgaagaaggagatgaaggatgtgttgtaaagcttccagagattcctggtggggctaaaacttttgaattggttgctaagttctgttatggtgtgaaacttgaacttaccgcatcgaatgttgtgtatcttcgatgtgctgcaaagtgccttgaaatgactgaggagtatggagaggacaatttaagtacacagactgaactttttatcagccaagtagtccttcgtagttggaaagatgccttaaaggcgctccaaacctgtgatgacattctctctcatgctgaagaactcaatatcacgaaaaggtgcattgagtcactagccgctaaagcatcaactgatcctaatctatttgggtggccgatgagggagcatggggggcctatgcagagccctggtgggagtctattgtggaatggtataagtactggggctagacctaaaaattctagcttagattggtggtacgaggatgcatcgacattaagcttgtctttgtataagagattgatttctgccatggaaactcgtgggatcaaacaggaaattattgcaggatccatcactttctatgcaaagaagtaccttcctgggttgaatcgacgccagggaaccagtgagtctagtagtcgtcttggacctgtgtctatggggacaccaccatcagaagaagatcaaaagcttttaattgaagagttagatagattacttcctttgcagaagggtctagttgcaactaaatttctgtttggtctacttcgaactgcaatgattctccgttcaaatcctacttgcatatcaaatttggagaaaaggattggcatgcagcttgatcaagccactttagaagatctattaatggccaattactccaataccatggaaacactttacaatgtagattgcgtgcaacggattttggggcattttcttgccatggaccagataaccggtggggcgtctccatgttcaattgatgatggccaattgatgggatcaccttcaatgacaccaattacaatggttgccaagctcattgatgggtaccttgcagaggttgcccctgatgttaatgtaaaacccaacaaattccaagagctggctgctgctgttcccgagtatgctagacctttggatgatggtctctatcgtgctattgatatctatcttaaggtaaaatcgatttcattgtctttgaaacaaaatgcaaatccgttttcttctcatgctttcttgttagaattttcctttctatcagtgtaaatgttctaacaatgttacaattatcagtaaattaacattttataacattgcatggaagcttgcttctcctttgtaatcatgacaatttaagccaattagtatgaaacacagggtactaagggttgttttgagtttggatatctgaaaaacgtaatcggttgcaacctgattactagtctgcatttcctcttagtgctttttctcttgtgctcttcgaagcacggttcattttgggtgcaattatcttaaatctcattgttttttcttttcttccagtcacacccatggttggcggagtcggacagggaacaaatttgcaggttgatggattgtcagaagctctctgtagaagcatgcacccacgctgcccagaacgagaggttaccccttaggatagtagtccaagttctcttctttgagcagcttcagctgaggacttccattgccggctgttttcttgtctcagacaatcttgatggatcgagacaattaagaagcgggtttgctggatccaacgagggaggtggttgggccacagcagtgagggagaatcaggttttgaaggtcggtatggataacatgcgaatgcgggtgaatgagctcgagaaggaatgctcaaacatgaggcaagagatcgagaagttggggcgtgtaaagggtacttcttcctctagtgcatggggaaatgtatctaagaaatttgggttcaaattaaagtctcagatgtgtagtgctcaagagggttctgttagtaatcaaaatcaggggcttgggaaagttgagaaattaaaagagagacatggaaagtccaagagaacctcttctaaagatgagaaaaactccaccaaggatgactaagaatttgatttaatttgatttttttttttcaagttgatgattttagatcagtcattttttcttttcttatttgaaaaactatttggttctctgtgttgtatccctgaattaatggcttctgtattaagatggtgtctagttgtgtagtagttgatatggaaatgatactctcatgatgtaatttgctataattcatgtaattgtaacaaagttaggtatgtcgttttaacctcttgatgaggctacaaaaatattgtttctagtgcttccaatccaacctctattcattttccaaacgactcaattaattaaacaattttgaaggtaataaacataaaagttagatacaaatccaataagtttaggggtggtcataaaatagtcgatctaatccaatctggacgatcctattcaattcacaaagtgaatgttgattgacatgtaaaaataattgatccaatccaatctacacatatttataaaaaaaattataaataccaataatattttaatgtaaagaa

SEQ ID NO: 378830 - DNA, 5274 bp, Cannabis indica
gtatgttgttctatctcagagatgcagtagttggcataaaatttaggacccttatgatctgaaaagagtttaggttaatttataatctgtcatcacataggaggaagaagaatgattaattagtgttaataatttggtaatcaaagcaattgaaatcatatctctaatttcacatccattgttaaaccttttatttgtttgttttatttaattttgcttagtttattttgttcaaagtttatttattcgattgccaaatagaaacaagaatttaattaattggtacttaactgcagtcctcgtgggaacgatctcacttacctgagtattacttgttgaaaacgatacgtatacttgcgtgttggatttatcacaacaatatcccacaaatattacatgttatgtgtttagggaaaaaatattaagtatttgtaagcataaaaagtcaaatttccctaattttattaggatttcaaatgatgagtaaaacttagggatgcacacgggtaaagaattgacagggagtggtcccctgtccccatccccgccctatcacggcttattccacattagggatggggtggagaattttctaatggggcgaggacggagcaagaaattccctaatataaaaataaaatttattttacaaattaaaatgtaccaaaatattaaattacataaaaattaaaatatgacacattattattgttcaatatactacttcttatacaaagcacaactttaaaaataataaaaatgacataatataacaaaaaaaaatacaaatacatattataaaatattaataaaaagataactaatatattaagtgggtccccatcgggacgtacgaggaatgtaatccctgttcctgccccgtttactattcgggaacaataaataattctcaccctgccccatgcattcccgatttagacgggtaatccctaccccattaggggcgggtcccgtgaggccatcctcataaagaaaatatgcattcctaaaaaaccccaattgacatataaaaattacaattattctttattaatttggtaatttgcacagaaataatttttttcctcattatattgtagtcataaatattatatttgtgttataacgaaaggcttttgcatacatatttgaaggcaaattgaaaacctatgcagacatattattatttttaaaaatgataattaacctgtaaaaaatttaacaatgggaatgaaagatttcaattcatcatcacacataacatatacaaatggaaacataattatgcattgcataattattgatttattcaatagataagttaattaaacacactaatccaaataaaaaaatatataaaattaagcacacatcaataaacaagaaaataataacttagtttattttcctacaattgatacgaatttcaccttcatgtccaaccaaaggtttgatatttcccattttaatcatcgaaacaccaaaatcatacaaaaaatcttccaaatttcggttataatgtttgaccaactcatcagtagatccgccattgaagagttcttgatcagagtgaagaagtcctttgtatttaatcaatttgtcaaagtactttccgtcgaatttagctggagttgggtccaaaggggcgagcttcgtgtccctaccaaccctagggcataacattttgatctttttagtaaaaattggattaatatttgtgtcattgtatatgcgatctctgaaggtggagcattgagcaaaccctagagtgtgagcagccgaaagcaagacgaggtctttctcatcaaggccgtggtccttgaagttttggatgagttgtgttaggttaaggaatgaaggtggaatgttgagattggcatcgtctttacttgcagtggttgagtctcttcttcctagttgaacctcccatgaggggcctcctaactatttatatttatatataaaaagaaaatatttattacttaatctcaccatgtttagaaagtaaaaactaaattggatcaaaatgtattaagataataatatataattataaaagagagttgattattttgccaaactaaattgtttattagaaaaaaaaaagtcaaattaattcttttatcataaaacatatttgtaattgatttctttagtttgtgatttgttaaaatatatggttttggtaacacttttttaatctattttttgtttttaaaattaaaaaattgaatatttttcaaatcatgttctataaaattgtgtttacttttcaattttttaattaagaatctaaattgtaaaaacaaaaaaaaaatcactttcaaattttttttaagcaatagtttagactccaaccctaacttagaacttgaaaatcaaacttggacccagccccagacttggaatcgcccctggtctcgacctcagacccaacttcgaatccaacttaaataaaatcaataaataaaaataaaaataaaatttacagaccccatttttgttttttatttttaaaattgaaaaataaaatggttatagaacacatttttgtttttcaaaaacaaaattttaataacaaaaattttacttttaattttatgattaaaaaatttaaaaacaaaagtattaccaaacgccaccatattatattaaatttatatttttataaacacatggtactaattaaatggtttttttttaccttgatttgtaaaaatgatatatatgcatgcattaagagtatttagtctcatgagaagttgattcgctagtatttgttgaacattaattattattgttttaaatttttaattgcagtctatatctatactatgatgttaatttcttttaaagttgattataaacatggtacgcctatacggtgttttatttcagaaattttgtatttgctctttgaacaaattgtgaatatatatactcaccgcaacagcagaatcacgagcagcaacagctaagatatcagcgcatgagacaactgggcgaccgcaacagtgatccacctccgccttgatgttgtctatgacctcaaatccccgaactgagttcacatttggaagcgctagcttttcgctatcgatcatctccgatgagtcaagaagtagggaaccatcacaaccctagttataaataatttttgacaacattaattaccaaaaaaagaaaagttttaattgtctaattagcttaatataattcatatacatgcatatatatagttatagaaaagggagaaacgacatgtcgttttgcttacatttacaaaacaatcatgaaagtgtaaacgaagtaaagaggctcccattcggcgttccttctcaacggccgcctccacaacccgtttgatcaccggtaaggcggcggggcacgagtggtcgtagaagtttggagaaagttcttcggctaaggatttagtacttgtaatttcaagagctaataagatcaacactagtagagctaccatattattcaacaatattggcctctttgaacccatttcttagaattaaatgagatttttctttaatcaatatatacctaataatttgatcgatattacatgacattttttattgtatttataggtagagatcaagggagagaaattctacaagacccaattagcttattcctttgataaattacattatattatattggattataattaataacttatcacagactcaatagccatgtttacaagaaatcatatatataaattagaactagtcaagttattgaaataaaatactagtcaaaatagtgatctcaccacttatgaattaatattatatatacaacaaaattaaattaactttatgatgataatccctagaaattaatccaagacgattttatattattttttttttcacttaatttaaggatcatatatataatattgaatgacaacacatcacatttttcatagaattatatattacttgaaattaataataagaagaatatattgttatcatttttaacaacttttgatagttatttcatatgtatgttatgttactaaattgtttaataacagagatatatagcttgaatatcaaggaattagattgaagagtactacaattgttatagtacttaattttcctgattaatttggttagtttttttaattaatatttaataatgtagaaatgataatataaaaaaaaaatgttttgactctggccaagtaaatggttttttttaattaattaactaaatgtgaccggtaggagttcatcttcataatcacttatattgaataagtatattaataataaaaaagaaaattaatcaacagattaacaaatagtggaatatattcaatatgacagacggccgttgtagttaattattcatatagttttccgtttacatttttgtttttatagaataattagatttttgtctaaaaatttcctcattgagatttagaactttttgttatattttatgaacaaaaggtaaatgaaaattcaagtgacatgatttgatacatgttaaagtttagtgaacacaattttatagatatcaaagtttcaaagggcatgatttagtgcatgaacaaacgtcacactagtaaaattaaatggaattggacaaaaatcttaaatctaacaatatcaatagtttagagagaatttttcaaccgtctgaaaaaattcgacgaagacatgatttgattcttatcaaaattcaaaaaacgtgatttgatacatattaatcacactttttttttaaaaaaaaaattacgaaaattgtgttttactaaaacttttttgttacaaactaaacaacaccttcattggcctgattggtgtatatgcaaactcaatttcaaaagatatgttaccgaaacaaaagtagtttaaactactctttaatttccagtttgtcaaatcttcttaacaatgcgtattctatatttaataatcatgttgctcaccttgttgagtgtttttcaattttgaggaaatacaagatgaggctcaatccgaataaatgctcattaggggtgtcatcgggaaagttcttgagatttatagttaatatatgggaaatagaggccgatcctgaaaaaataaaagcactcgaaatgccctctctaaaaaagccaaaagaagtccaaatcatgtaaaatgtgtcgtgatcggtggtaattttcaagtcccgactgatagcagcattcagtccccttacataattttgtttccaggtgaaatctgttggtaccagatcaccaac

SEQ ID NO: 378831 - DNA, 6251 bp, Cannabis indica
ttttcgaaattagagactaatctgatcaaccttaagtttttaaatatttttaccgcaattatccctttttctttttaagaataaaagtttcgagctcttcattaaattgatgttctctaagagcaaaaattccacgccattttttagagcaaaacaccaaaataatacacctatggagattgccccactaattatttccttccctgaaagaaaatacgaaatagaatgctcatcacctttccgattgcctactatgatttaagcctgtcctcatcgttgtaaaacatttgccttttcctatttgttattttaaatcttctgctcaagtctcgtccccaaaaataattgccgacaaaaagatgagacaaaaattcttataacgaaaaggagaaaaacaacaaaaaggctacatcattttatcttttaccaaaatattattacaacagacaaaaatttcaactactgtaaatactaaacctcctttttctaaactgaaatccatcatattccactcagctgtaggagcacaaacataatccatcataggaagtcttgcctatacacaataacacaacagtaagaaattgataaaatgacaagaacatttcaaacaattaagattatgtatgtctataatgaattgacaaagtaattgtgcagttgcaaagagaagaattaggctgaattttgggaaacaaaaaatacaaggaagaacaggttgaaattcgtcggctatatttaattatttatatttacctcttaaggagaagagaatactttacaccgccaaaagaaagcttcagaactttgcacttcacctctcatcttatgtgtgtaatgctccaatgtatgtgcatactcgtccatgatatcatttgtcacagtatcttcagctaaactcactgctgccaattgtgacagttgaaagttttcaccagcacgttgcagctttcttgcgatttccacctctccaagcatcgcaaggcagagcaacaacgatttcaactcacgctttgcaccaactgttggacacatgcccttcaaatgctccaccaaagccatctcctccccagcactacaatttcaaagtagaaacagattatcacaaacaaccatgatgaaggcaaaaaaacaaaaacccaaataataattatacaaataaaatacctgccaggacgaatttttcctctctttctctgacgcctggtgtctcttgccttgctagttgcacttgagctgacagaagtgacacggctactccttgacctgcacagcagatgggtaaggcaaaacatgagttgatagaaatttaacccaccctaactaaaaaagttcgtgagagaactctcctttcaattcacacaaacgaataatcattatcattgatcacatctgtctagcatagacagaaggaattgataaggcatgatctccaacaattcaaagagttgaaagggaaaggggaaaaaaacacaataacaaaaatgtaggatgaattaacaagaacttgaaggtgggtaaacaatcttaacaatcagaaaacaaaactgaacaaaagcaatgaaacgaaaaatcatggggaagtaatgtcactcaaaatgcagaagacataccctgtagtgtaagcactcattccactgaagttactgctagcttctgaagctgtatcgtcatcaagatcagtcattgcctgttcctctgactggatcttcgcagcaagaagtaatctcctttgtcgaacagctaaatatcgagccaagtactttcctactttctccagaccttcctcatattcaccaataagcacacttgcacaatccaatgatgcacttttaacttctgagatcaattcctgtctattgtgcattacagcaacccttaatgcctcttcccattctctagcactaattaacaaattaattccactgctaacatctccacagtattcaagtgcaatttgggcagcttccccaggtttaccaagagcttgaagttcttcacaaagctcgtgagccaactgaagtatctcttcccttccaagtttaaggagtccagcaattgtaagcaccccactccagttaccacaagcacgataggacttcaaagccttctcaaaacttgaacaacatagatacgttgcagcagcatcctcattgtgtttctcatcactaaggtgatcaccccaagcctcaaggatctgtttcttcttgacagggtcagatatcagcttaagtcccaatggaaaaagttgaggatttagcttcataaggttcatacaatctgcataataagcatcccctgcagagataatgtgcttgagagccttatcaaacctacacagcttaaggtcaatattataacacattaggtcaagtggcaaacgctccagttcttgaagaaaaggaagaaattctttagggtcccgctgggagtttaatgcaacaatagcagcaagattcaaatcataaaggcctaaagcagcttcaaaaacaggctcagaatcagacagccataacagatgcttcaaggcctcttcagcagagggataagaagttctccgtgggtcttcagaacctaataattccatttcacggataaattttattctctccaaagcttcttcaagggcaggaggatcactacgagctagggttgttaaaatgcaaagttctctagcaggactctcaggtaagctatcctccagagccacccttatggccctcaagatggaggaaaccttactcgtagaatcagaacctattggatatctggcttgcacatctctatcttctttgaagaaaggctgacaattaaattttttatataatgtttccattatattttcattctttaaggcacacacaaactcagttatgtaactcaaattgttaacctgcttgacaaactctgaagctgattgcagaaataattgccaactacaataatcaacaatgacattaaaatcaattctgtgccgcctcagcatgagcagtgcatctttaaagcgctggttgactaatgcattgcaaattgataacaggaccaattttcttgggtaaatacattccaagtttcccctggttgtttgtaatatgacagttgcttcatcaccatgcagaacgccagcaattttggcacctctctcccatatatttataaagtttacattatcctcctctctccttttatttacatggataaaattcgtgtacttctcctctaggtctccatgcaagatgtcatatagtcaacaataaaaacaaagtcctgcttggtcgaaagaatcaaatgtgtcattacttggtcagccaaatttgagtaaaatgagaaactactacagttgttgcataatatctttccactgatatgcagcctaccaacttcatcaagtccaaatatcaaaggtccagtgtttccaactggaaccacactcatccaaggacaagatgatgagaaacttcgatcatcatatttcatagccccaggaaagatacccaactttggtacatgttcatatatctttccaccgtaaaattgaataaaagctgaagactttgttgaataattgggagcaataccaacaaccacctcttctagagatagttgattggacacatttgcatgccatcctgagcacgtcactgaacctggtacattatcctcagagcagacaagctcaatttccagcaaacaatggccaagaagccggtcctcattcagtgatccatgggaaacgttactgtgactaaatccataatgagaaacggcaaggactctatgcgaatccaaccatgttaagtgtataaatgacccaagtggcatatcagatatggaagattcaatgttgaattccttgccttctagctcttcccaagtaccatttgaaggaaactcaacaacacacaagcaaccatttgacagagaagcagccaagcaatgtttagaattcctggaataaaaagccaagtctcgaacagcagagggaaacttaaggctgaataaatacataggaggtggcatgagagataaagaaagtggggttacaagtattttggagccgtcaataaatagtgcagttgagtcctccataatagctgtactccagttgaaattatacagtgtgacttggccgccaagagtccaacaaatcaactgtagttgcttcactggatcccacatgaagcacactttatcctcccttgagtacctaatctcatgttttaaataccaatgattgttactgaaaaaccagaccttgatacagtcataattttcacatctgactaaagcagcaagaagatctgagttacaattccacttaagcatttctatttttgaatttacttcctcattaatgctaaacaagcttctttctaacccattcttctcataaaacacaattgaaggacattcattttctgcttttctgtcatagacagatgcaatttttgctccactgggcatccaatccaaaacaggtcccatgaatagctttggttctgaagcagcatgcactacccctgaatctcgctcccaaactttcagcctcttaagcaaagaagttgaatccgactcattagtaagtgtgccaaagtacttcccatcaccccgccaagagatgaggctgctaaactcatttctagaagaaacgtttggctcaacatctgagacaatagtagtccacagtaattagcaaattgcagaatttattcaatacatgtaaaagttcttagtaaaaaaaagaagaaaaatgggaacaggggtcaaattacaaaagccaaatattggaagtcgaacatgcttttaacatgctttaaagtggcttcaaaatccaattttcacaacaaataaattggtcatatagtaatatactgtaaaaggtaaaaaaagttatcacaacaataataataataaaagcactcttgatttcttgagaagtaatggcattagaaaaatgacaccaccaattattatatggtgggtatgtccaatgagaatagcacatagaaaggaaacaaaaacacaacctattataggcttttgtataattttatttgccactctaaatatgatatattgtgaagaaaaaaaaaatgatgcataacctatccatgtccaaatctaacagtgttcacaaactccagtcatgtacaggtatcatgtatcttaaattacgtaataaaatcaaaagtggtgtttaattttccttatatgcagatcagagcactggcctaaccaatcattttaaaagtgaattgtaagtgtaaacaaaaaaaaacgaggaataaaggaaataagtccttacgtatgtcaacaccatccggaagatctctaagtgaagtctcatacaacaaatcccagtcatgagtcatcactagcatctgctcaaacccagtaactatgcagagcaaatctccatctggactgggtgaaatgcattttacaccaccctcaacttgaccaacaacttctgtgaatttaccatcgacattatgcaacagcattagcccactctgagttcccaatagcaaagcctctttctccatgacataatcaaaggaagtgatgcagtcaccatcctccaattcaatttgatcaacttccaccggcaacatggttttcctccatgctccctcattctacacacacaaaaattccactaaccattatacaagtattgtttatgctaatcagaagtagcgattaataccaatatttttatagaaatagatagagagtgtcaaatttaagaaaaaagtagaacctggaaggaagaaagatgagtggcataaatggaattagtagaagaagcgaagaacaatcgattgcgctcaacatcgaatgcagagaaggttatgatctctccttcgttggagtgcaactccaggcacagtgagacctcggagtaaagcttgagattattcatggaagtaaaccctaagcaaagttggaagtgagggtttaaaagcggtgttcaagttaaaacctaaggttgctaagcgacccaagccaaggggtagcctgtttcaaacagccgcaattttcttttcttttctcttttccttttgggaaatttaaattgccaatagttaaaaatatataataaattgccaaaagttatatctctccattactatgaataatttcaaacattacaacaattcaaaagacacaaccatccaattcataaaataaatgtaaatataaaagctaacaacatctcataatttacactccctcatttagaattt

SEQ ID NO: 378832 - DNA, 6449 bp, Cannabis indica
ctgattaaaaaagtgtttccaaaagccacctatacgtataagaaaatagtaatgtttaatactgtaaattcttgaaaaaaatttaaaatttatcggcgactctaaataagtataacgtaaacaatcataaaaaaatattaaagagcaatttgcggcataaatacttaagtttgactccgagttttaaataaatacctaaagtttaatttttaggcggaaataatactaagttatatttttagaactctataggtacctgaccattaaatgttaagtcattatccactgttatttattattagtatatttaaattaattttttttttaaaaaaaaaatttaatagatttagaccaatcaagaattgccacgtgacaattacttaacacttagacaactagtattataacttagtattattaccgcaaaaaattaaacttaaatatttattcgcaaataaaagttaaatttaagtatttataccgcaaattaaaattaccaatattaaattaagaaactccttctaaatgcggaccagatattaggtgtagactttcccaatgtttttcactgcaacaaagcaattagcaaacaacagttaaagacaacaacatgcctttggcatttgctatctttgttaattatcctctaaagtatctctctctctatttctctccacaacttctccaatacccataatagtgacctttatgatcttttgattctctctattctgctccaactttggagcttaaaccaaacccagctaatctctgcttacttaactcagttgatttggtgacccaaacaacaaacaactgcagttggtcaccatcttcattctcaagctctctttttctacaccatgaacaactagtatccaaccatgcggagaacaagttctgtttcagaaaaaaatgagcttcaataccattaagggactccatttttggtggagggtcacttcatcatttttccttcttcatcatcttcttcaccattcttcttctactactacagctctcaattcagatggaattttcttactttctttcaagtatttaatcttaaacgaccctctttcagccttggaaacctggaattactacgaccaaacaccttgtttatggaaaggaatcacttgctcagaaatcggtccacctgggacactggacatgttcagagtcaccagcttggtcctccctaataaccaacttctgggttcgatctcacctgacttgggacgaattgaacaccttcgtcatcttgatctttccaacaatttctttaatgggtcattaccttccaccattttcaacgcctccgagcttcaagtgctttctctctctagcaatgtgatatctggtcaacttactgactctgtttctggtcttaaaagtcttcagttcttgaatctctctgacaacgcttttgccggaaagcttccccaaaacctcacttctttgcagaatctaaccgttatttccctgaaaagtaattacttttctggtaaagttcccggtgggttcagtaaggttcaagtattagatctgtcgtcgaatttgcttaatgggtctcttccttcggattttggtggagagagtttgagatttttgaacgtttcttataacaagatttcagggaatataccattggagtttgccaaactaattccggttaatgctactgttgatctttcgtttaacaatcttaccggagcaataccagaatcaagttctctgctttctcagaaaaaagagtttttctcaggaaactctaatctttgcggaaagccattaaaaaatctctgtacaattccttcgagtctgtctaaagaacctaatgtcactacttcttctccggccattgcagcaatacccaaaacaatcgactcaactccggtgacagctacaaacggagctccgccacaacaacagcagcagcagacagggctaaaaccaggtacaatagtcggaatagtcgtcggagacttagctggaatagctctcttagcaatggtgattctctacgtctaccaaagccggaaaaggaaacatcttgattcattaacgaaatctacttccgaccatggaaacaaaacgggttattatagcggaaaacaggacgaccctgacgccattaaagcctctacatggtcttgcttgacgattaaaggtgaagagacatcggaagagactagctcagacagtgacggagacgagagaaacagagaaccagtaagcggtactgggcctagtcggaatggggggttgctggttacagttgacgatgaccagtcgccggggctggagctggagactctgcttaaagcttcggcgtatactttgggggcaaacggagaaagcattgtgtacaaagctttaatggaggatgggactgcggtggtggtgagaagaatcgggaaaagtcagggggagaggatgagagatttcgagagccaagtgaggtccatatcgaaggtccgacacccgaacttggttcggattcgtgggttttactggggcgatgagaagcttgttatctatgagtatgtctccaatggcagcctcgctaacaccggcagccgtaagtctcttactactttactctgttttttgaagcgtatgttagaaaaattacttaagttttgctaagatacgcggccttttgtcttgcatgtttgatagtttgcttcttttgactagtatgcgccgtttttttgtgttccctgttctttcttggattgaaaagattgtttttaagattgttaaaagaaaaaaaggcaataatttaaaacttattaagattgtttttttttaaaactaaagtttaaggtatgtgtgtaaatttctgttatgatgaactatagatggtttagaaatgaaaatgaaaatagaaatgcatattaccagcggctaagatatcattttagtttatatcataggattcttttggcaattacttaaatgatttattagtatgcataagtagataaattggatatgtatataccattagtatatatatatataaactataaagtgattctcaatctacgtacctagctactttaaaaaatattggcaaatagtcattacagcacgtgatcatgccatataaataagttgttggagccaataagaaatatagaaaattatagcatttcactacgatcggataccatatgtgaataaagtaacatttctgttttccttaaattgctattatttatggtaaaaatttgtacatattgtacacccacccaaatcacaggccaccctgatcacatgggaaacttgccaaaaaataattgcaatctatttctctaaggcggtgctttacccaaaagtaatttttgtttttatctctttattcactagtggcaaacaaaaagtatcaaattatttgaaaaacttatatataaagatataaatacattcattatttcaaagaacttttctagtaaattctatacataaatttattatatatagttgatctaatgaacatttatgattcatgcaggaagagcggggtcgtcaccatgtaatcaaccgcttgaaattcggcttaagatagcaagaggcattgcgagagggctaagctacatccacgagaagaaacatgtgcatgccaatattaaaccaagtaatatacttttaaacaatgaaatggagcccataattagtgattttggcctagatcgccttattctcccacccggaactagtactcacaagagtggttcggctaggtattttggaagcctaaaatcggcttccactgccacccgcgacagccaatatgatgtcacctttggtggtagcccgggatcatcatctttggctgccgcgggtgtgtctccttatcaagcacctgagtctatgaagaatttgaagcctaatcccaagtgggatgtgttttcttttggtgttgttttacttgagcttctaaccgggcgggttttttcggaccgggaattagggcaatggaccggatccggttcgatggttgaggataagagccgggttttgagattggttgatgttgggctgagaggtgaggtagagtacaaggaggaggccttgctggcatgcttgaaattagggtttcaatgtgcttcttttgtcccacaaaagagaccaaccatgaaagaagccctccaagtgttggacaagttcactttcatttctttggagcactaatgatgtattaatttgtgccacaacaaaagtttttcttaggctaaaagctttatttcatttttttaatttctttctctgtaatttgttttttcttcatctttttgttgacttggacattgcataaaaagaaggaaatgtgttgataaaaattatttgtgagaaagcggtgataagtttgactgattataaccaaatgtcattgatctttatttatttatatatacaaggcacttgattacaagtatgaccatagagagcattgattgcaattttacttaagcaagaagctctttgtaaaaagcccacgtaagagaaaatcagcaaggcccgtgtaatgtaagcccattaaaaattggtaaaataagaagaaatgacagtcatgagaaaaacgaagttgggctcaatcagaggcagactgaaaatgcaattcaagtatgttaaaccaaaaatagaatagagtaaattgcactctatactctttttatgttgtcttctttgatttttactctcttttctaaagtctattactttatttttttaaatattgtactaattttgtccctatcactttaagatactctttatgtgactttcttataacatatgaggcaaattcacaccctgggtggccgagctgagtgtgtgtaggttgaagtaagattaagtctttttaaccggaacaggatgagaacatacccagtccaaaaggagaagcaattactagattcgagtcaagataagtctctgatgattttttgagccctcccatgaaagaattcaatccagccactaatctatatgagactgatccttttggaattccaccttctcattccttgtttttttaacagacaaacagtataattgaattcccttaacactgaagaacttaaaagcttttagattcaattcaacaaattggtccagataataattatatagataagctcacctttcattacctaactttaaaaatgattggttcacaaaatagcaatataaaacacattacttgcaattattccaagtgtgaaatttatgtgtaattcttatcattactaaatggcatatcaagctaattttcaggaggtattaaagaaatcatcagagccagcaactgaaccaacacaagtcccactaaatataatgcttccaacttccaaggtaaatgtgtactaattccccaagtgatctcaaaggatacctaatagtctaatcttgtattaaaaggttaacccaatacagtaaggagagaaatacaaggtagcccttcaaaagaaaaaagagaactaatatgtaatggtactgtcaaagatgcatttaaagttccaacgaattttctgacctttactggttcaaaatacagtatcaaaccagttacaaaaagtaacttggaagtggtttaggatagacttagtattccaaagtatagaattgtgttatggctagtcttgttgcagagaattcgaacaaaagacaattactgaaagatgaacatattagtggatcaagattgttttctttgtggggctgctgcacttattttttaactgcctgtatagtagagcatgcctcaaagaaatcaaaagttggttggaatggaaatgttactccttggaacttaaagagttgatccgttgggttagtaaagcaaaaaagttaagtaaagtcccgaaaaacataatgtatgcggttcttgcagcaactcttgtgcattaaaaatgatgtactttggtttcaaaagctttgtcttgtaatgccatgaaggcctccaagaaggatagagattggttttctaatacttggtagggaacacagtacgatattgtttggaccaaactttggtttaaacttggtgaaaaacaacatctttcttaacttcaccgacatttcacatgaaactaaatcctaatcctatttcatcacatgaccctgaaagatcgcatgacgacaacaatgttaggtggactcaaatacacatcaactgacccaactacttatcaaatcacttaaatgttcattttaagcaaatcataattaacctcacactttcataatactaaattgagaaatattaaagggtaacacattaataatggcgtttactatgttaatatccttattaatccaactaaatattaaatctaatataataatatttaaaaaaatgaaatttttacattaaaaatacaaaatattaattttattaccaaaaaatcactacacggttacccaaacatttatac

SEQ ID NO: 378833 - DNA, 2073 bp, Cannabis indica
ggtagtgctgggacaaacattttagaggagcagcaggagtgttctggatatgtacatacatcaactttgccttgcagcttggtaaataaagaatcaaatttgggtgttctggaaccaatccaagaggatcaaattatggcacacaactacattgagaccttacctttgcctgataactttcatgattcattatcaatcaagaaagcagatgttgacgaagctgttggatctaagaatggagtgtgtcggagtctcacatttgacggagaggaagataaaataggtaatggtttgccattagagggtggcttttctaatgctcattcttgcagaagtttgatacatcacatagaagatgttgcagaaaacatagcaggaactagtggtaacaaaggtgtcattgatcatcatgaggaaaaaggagatacagaaaaaactgttcgttttaaggagttaaaaaatctggtgagtatttcggcaatggacaaagagcgaacacatagattggaaactcacaccaacattagagtatctgggaattcttccagtcagaagcaacctgtgaaatcatatattaagttgaagcgcatgagcaagaatttgcctccacaacaaggagtgcttttggggccatcaaaatatagtagacttataatatcccgtaaaagtgatcagaagcgtcattctggggagcataactcaaagaacagtaataacggaaaagaaaatgcagtaaatccaacgtctatgtcattaaaggtgagtttgagaaccattgattgtctttctataatctctttagttaataagaaagagctcacaagaactcttttggtttttttgcagaacaatttggagaaaaaggaattccctcagttcgacaattttctcatagaggatgaagaaggttcaggtattaagatcatatatttttttgattctgttgctgataatctaaagaatatgatatttgtgtgtaattttctggacttttgctcaaaactatccaggtggttatggcattgtttacagagcccgaagaattagtgatgggaaaatgtgtgctattaaatgtaagttttattttcttagatattatactttggacttaacgtcaggtcttgagactaggattggaaccattgttttgttcgcttcaataaatggttgactggagtacctggtaatgataggaatcataggataattcatgactggttttgctttcaggccctcatggtaaagctcaaaaacatcatgtcactaacgaacttaaaatgcttgagcgcttcgggtaatcattcggacaataactttgttaagcgctcacaattttgaatatgatctatgcaaaactttacaaattctcttgtatactatttatttcagtggtaaaaacttcataattaagtatgaaggttcactcaaaagtggtgatgcagagtgctttatattggaacatgttgatcatgaccgacctgaggtacttattcaatacatcactgtttcagttttcttaatatagtaaagcctttaattatgcaataaatgaagcttgattgataaggtaagagactcggagttccaacttacaaatgtatttactttgttgtattgaagaaatggcatatttgtgtagtagcatctatcacaaccattctttctcttgttaaacattcacatagattataaactatccaaaacatacattaaacatcattgttcataatcattaaatccaatatcaatactttatttagagcatcataaatgtaaaaacacatacctcccatattagcattttccattgttgctaagacaccaaagtcttcaatgtgaatgtgtctccaagatggtagaagaggagcctatgaaagcaaaccccttttctttttcaccacacacccacactcttctcatactaaacacatattaacccttttatatctaacacctaaccctaaggggttatattatgcttattgggctaatgagtataattagtggtggactataatttaatgggccaattatagttttagggtgctcccatgtgcctctaatacatttatt

SEQ ID NO: 378834 - DNA, 4861 bp, Cannabis indica
ctggcccattaaaatccgaacccaccctacagaactcggtgcacctgacccgaaacatgtatgaacccaaaaattgagaaaccaggtttggttaggcattttaaacacccgacacccgaaaacccgaacccagccacccgaaaacctaaaaatccgacccatgtgcagccttaaccacaagaggagccaaatccttaattgaaacaaaactgtgtaaacgcccatttacatagcttatgagcaagcaagttacgagagcgaggaatccaaactaaatccacgtcagatagagaatcaagcacctccatggacctccaaaacaagcctgtcatgaaccaatcaggggccttccgagcttgaacaccaagcaccaatgcttgatagtccgaagcaatcaacacctgaatccagccacgagaacgacaaagattcaccgcatggaatagggcacaagtctctgcttccaacgactgactcgaatcaaaactcacagccaacacctcaatcacaatactttccaacttagtcaccgcgatctcaacagaggcacacaaatccttacaagctgcatccactaaaataaccattcttccagcataaagctccacgttatcgacatgcaacaaggaagtgctattcagggactcccacacatcagcaaggcaagaagcaactgttttgactcttgcaaggactccactacatgtggggctaatttggttataaaaagcacgattccttgcagactacaactcgtcacacagacatataccaaatcgattaaactcaccaagatcatccacaatagctcatctcgagaactctgggactaagagccattcaattatatccctaagagtgttgaaaattagagactcacttctaatcgaccaacgactagtaaaccacacagccttgcccagagcacaattgtagaacatataatgtaaattatcgagaacactatttttttttgtcaaatttcaaacaattgtgcaacgtaatatatacagggacaataaacaaacatttttgttaatttaaacatatatatatattttttttattaaaatgtaattaaattaacaactctaaacatttatattctttaaaaaaatatagtttcatagtatgaataaccataaaaaattcaatttaaatcagctcatctcaaaaataaaagatttaataagcacaactcatgtccaaatcaaatcaaacaacaaagacattacaaaatattaaatcaacacacatacatatcgttcacaaaattttatctggggaaaaaaatacaaaggaagaacaaaaaatcctttgatgaaccacctcaacaacccattcatcaaacctaaagccccagacaacctttcaagttcacaatcctttgatgaacccacatgcatttgaaagtgttaaatccaaaagtctttcacgacgaagccatacacttttgaagtgatgaacccaagaagaatcctgctattcatcctgagtatctcgaccaccccgatccatgtggcaaatacgaattggttgacaggtctgcatttagacttgctgaccaaccgcaccccccacgtggatggggtagtcaggatactcgagatgaacaactttattgacccaaaacatcactaatgaacgtacataaaccttctacttgcatcttcacatatttggacaacaatgagtaattttaacagtttacatcattcaagggaaagaaatatttttgtcataatatttaataaagtcgtacgttataaaaagaaatttattgagttttgaaattaatttaatttattcatatcgtggagacaaaattaattaatttccatgtatgtatatttcgcgcgattatttgttaccattacagttacaaacctacttaactaattttcaaattaacgtacataactaaaattcaaaattcaaaattcaaattttaaatttttttaacgctgaagaaacacgcatctaaaatagcaatatttactcctaaaacataattaaattaaattttagttctcaatggtattaaaagataatagattagctctgtaaattgttctatccatcattatatatattttaattttaatttatatgatctaatctaaggtttttttttaattaaatcttaccctacctttactacttttctcccctattgtttagattattaccaattttatctagtaataatatttaacaaattaatataataacataggaaaatctcaacatactttcgatctatttatttttaacatgatcaaaatatacattacaatttaaataatattaaaaaataattaatttgacctgatatatatgaccatatttatatattactaaaccttttaacaggtgaaattaattttaattttttctaaataaataaataaaaaattatgaaaagagtgttaggtgaataccaatactaatctctaataaaatgtaaggatcttagttataggtaataatcaaagattaaaagaccttaattttgggtttatataaatatataatagcaataagagtgagagatatttacattacaacaccattttttttttgccttttttcttacccattttcatgctcccgcttttccgattcggtctcagggtttcaggcagaactactgtgctcatcatcagatccgcccatctctggtaaattatctatcttttccctcaaatttcattgcatcacttcatgtttaacttttacagcttcagctacatggtggttttactcagtaacggtcctttgtttctcccttattccccaagataccttgataatgattctagaatttgtattggttttgtttaaatgttttcagaaaagggtattgttttgctttgcttataagccgattactcacatgtgggtctctttgtaatttatcgttttgtgtcaatcggtgttgtgttgtgcttgctcgtatctgagttcataattcacataattttgttgcgaattttcagctgatatttttcttgtttaatattagcattgtacttttttttttttgtgggttgaggcgtttgaattgccggggttttatagaaaagtgtactgtaacatcattagttttcaaagtttgattttttttggctgatattgcaaactaagcttatatatcaaagacattaataagctctggtgattttgatgtattattttgtaagaagatttattttaataggtatacctatggcctgcctattatgaatcattacttcactgttcaaattgagtttatagattttcttatgatttatggttaatccattcaatgtcccccatacagtacttggatcataatttgcttgctctaatatatttcttttttcattcttcatatgatacagaacatgagtagtttggttgagaggcttcgtgttagatcagagagacggcctatatataatcttgatgattcagatgatgagattgatgttgtgcgtgggaaaggtgggacagctcaagagaagtttgaaaagataattaggagtgacgcggtttgtttctactcttagttttattatgttcttattctttggcctgaaaaatagtggatattgttttatgcataagggaaaacactctttttcatttagttcaaattcatttttgttggaatatttgtgtacctcttattaattctataaagttgtgctttaacttttgtaaaatatttggtattcagttttgtgtatatgtttatatgcttatgtatcacctctgccctgcaaatagaaagaggattcatgccaagcttgtggagaaaatgggactctactgggatgtgaaacatgtaattatgcgtatcattcaaagtgcttgcttccgccacttaaaactcccgctcctggaaactggagatgccctgaatgtgtacagtttcttatctgaatcactttttccttcctttcaaatgatttttgcaagtggcatgctttggtgataatagagattttaaataattatgtttgcaggttagccctcttaatgatattgataagatattggattgtgaaatgcgccctactgttgcggatgatagtgatgcttcgaagcttgggtcaaagcaaatttttgtgaagcaatatcttgttaagtggaagggattatcttatttacattgcacatggtaattttaccatcgatgttctgcaattgttttatagacaattctagttttcttgggtatcaaagtcagtggaagcataaggacttgtattaaatactcttaacactgtaaatattttcagaaactataattatttatttttgtgaactctttttaaaatgtctaaatcttattttgttattattagatattatttattgttatcacttctttatgtctgaaacttgtaatttacatatggataacaatcttttgtacagggtgccggagaaagagttcctcaaagcttttaagacacatcctcgtctaagaactaaagtaagccatttccatcgtcaaatgactttgaataacaactctgaggatgaatttgttgcaataagacctgagtggacgactgttgatcgggttatcgcttgcaggtttatattttggaaaattttctttgttgttttattatcatttacccccactcttgacatctttaatttatacaagctgtgctgctttcaaatttaaggatatttagtctagcgatatgtgaagtcaaagttagttttctgtcaaatggaaatgactagaaagtgatctataatactagttggctcaaaatgtacacacatacatttggagcgtggattggtctaatgaaataaacagtttcttttttttttttgggttgggggggggggg

SEQ ID NO: 378835 - DNA, 3243 bp, Cannabis indica
acacgttttttgctgagagtttctaaagcctagaccaaaacattacaatgaaaattgcatcacaattgagttatggatgcttggttgaatgtaaaacatagcagcaataattgattcatataataaaactctttaagtttatattttgcatatgttaaaacaaaaacataaaatgacatcataatgaacaatatgacgaaaaggtcacatgtgaaacaagtacaaaaaaacaaatcaaaatatcttatgtacaaagaaatactaacaaaaagagccagaagttgtattttcggatttttactgccaagacgtttcttgagtgtcttcaaggcatctttcgcttgcctgccaatcaatttgagtaaactttggtgataaattggaagtaaatttaggatcaacagaagtacaaaaggaaatatatatatatatatatatatatatgcacaagcgttccaaccaaaaaagataaatagaaagtacccagggtccatgttaataatatcacataattcaatgtttattgcccagtctggaccaatcagcatatcactagttgccctctcggcacaggctgcagcattaccagccatgtctcttcccttcagtcaaatcttttgccctcgaattttccttaaaacaaaatcgacccacaaatttaatccttgaattagtccaaaacataagacgcaaacataaacctatgaatgatcatcacaagtattttccaaccattgtcgaattgtacatactaagtccatcataagacaatataatccatatttggatatggaaatcaaacatttgcgatttctgatagaaaacaattaaattaaataaactactcgcctgacaattaaatgaataatatcaaagattcaaaatcacgaaaaggaaacaaaaactagataacgcccatcaacaaagaggactctatactcatcaatccactaatcaagaaatgaaaaaaataaattgaatccaaataaaaagacctaagaattatggtcagctctagagttgagaagcgcaatggattagtctatacaggaagttgcaggtttttatcgtaaaaacatgagagaaccccaattgaaggcgagaaaaagcaactacgtaattggaaggaagagaggtgatctagaagggcttaccagtcaaaacccagaagagaggattaggatcacagagagagagagagaaaacaattaagatcgctgagtggcgttgcgtacctgcgaggatcgaatgacttactatgcagaagttaagtaagaaaaagaagaattgagtttctttagttttacttttattttctattattatattttatttttttttattttccttaaaatatattgcaaaattgtggtgcatcgagtgcacagatgcacccaatctgttccggggatgcatcacttcaccattcatggtaggattgacaattatatccacgggtttgggtatttgccccactgcctcgatacgatatatggatatatttaagttttaaaaatataactattacaatttaaataattttatagtttaggctttttattgggtatactcttttttttactatctacactattccacttaagtttattgttttactaagtttttatgatttatttttttttttaattctctttgagacatcatttttttttcaaaaatatatatctaatgggtacccgatgagaatccttcccccgtcgggtaattctcgctccgcccccgctttaatttaaacgagtattggagcgggtatggaggtgaatttaacaagcgggtatgggggtgggagagcaatccccgcacctgccccgccccgccccgtttacatccctagtaggatccttgaaaaaagctttacccatacaacaattttttagcaaataaaacattgccaagtgagtggtttttaagacccgagaaacactagattatatctttttaaattactttaaaaaaattatttatttgaagaaacctgtgtatccattgatgaataaaataacagtccaggatacaaacaagagaataatggtgttcaaaggacctgatagcttcgattatctaggcctaaagcatactttgctagggagtgagtggctgaattggaacccaagtatcatcatatatagagatgtctgcaccattacctaccttcttcttgagccctgacaaagaagctccttaccccaagagatgttattccaaaccagcgaaggccggcgaccctttccagcatcagggaaagtggtatgggggaaatagcgagctttaagcaaagaagccaccaacgtttgggggaattgaatgatgcgccagccctgtttgaccaacatagcttgattaaaagctttcatataccgaaaaccaagaccaccacgaaatttggaatggcaaagagtgtgccaagccacccaatgagttttcctagtttgagcgttgccaccccaccaaaagttagccataagagaatccaagtttttgtggaaacgaaaaggaagcttgaaacaacccatggcataggacggaatggcttgaaccacagatttcagcaagatttcttttttgcctttttaaaagaaagtcgaattccatttattattcccaaaattcgattggtacttcaaaaggcgacacgtgtcaatctcagagaatatgaaccagcaaatataatggcaattatattaatagaatgtacgaactattgattcacgtattaatgagaaaccatttcgcatcagagaacataatcgcaaggatgacatcgataatacatagcgaggcatctacctcacaatatgtagagaggtgttgacaaggcgaattggctaataaaatacgtagcgtctaatatacattatctaactaattgtaatagcttgaggacatagataacgaatagcgagacatccatctcactataggaaggcatactcctggtaaactccagctctctaccagggttattgttgttattgagaaccctcaggatatgattgtccagtctgcgagaccatatggacaaagagcagttcttaaatttgctcagtacactggtactcatgccattgctggaagacttatgaataaatcaagttgttcacgtatcaggtgagacgcctcaacgagacacgttttacagcgtatcttaatccacgtcagcgttgaccctttaagagcggttgaaattacacttgtgtaattttcaaataataactgcattta

SEQ ID NO: 378836 - DNA, 1271 bp, Cannabis indica
ttttttttgtgtgttttttttcagagcagcgcaatagcgcaagaatcgggcgctatagcacacagcacaatttctgttctacacttgattattattttggtcataacttcttcaatacaactcgtaattggatgattcaagatgttttggaaagctaagaacaagatataaaactttcatgttgagctccaagtccagttctacttctaagatttccaaaatttgtaattaagttctgtcttataaaactgagctcacccgcttctactatttttcaccaaaatatgttaacatccccccaaatgactccaaatgcatgattactcttcaaaatagcctaataaattataaatacactaatcaataatttaaagaatcaatttaagaatattaatacataaataagctatatttataaagcaaaatatcaacttatcaacaaccccattgcctgaaataagaaagaagtgcgagaaaggactttatttcacctgtaatgaaaagtatagtatcaaacatcgatgcaagaatcgaatcataattttgagtggcacagaggaggaggacaattcttataccttgcccttggaggattaggatagtggtgaattggatgattccccactggatgaggtaagccttaatactttatctaattcgctgaatccatgattttttcactaaagcgctaagcatggcacgaaatcattagaagttcttatcatactggtagtaataataatttcatccaagaaacattagctaatcatttgggattgaaatgaagagaccaggtgcttcaaagtttacatgggccatggtaactccttaatgtgctcaaaaatatgttatggagttgaagtgtggttatagggacatcaatttgttatggatttgtatatgctacctacttggggtcttgaatgcaatggttccaaactcttgcgccttgcttgcacgatcataaggcccttaccatggaatttaattggcaaggcaaggctgtcaagttagagagttaaaagattcatgttactttttatgtgtgattgggattacataatattcttatacagagttgagggtttcttgtttcagtttcttgtcaggcctcttactgggatagagctactcatactgaggtatgaaagccatcttatgagtaagttggaactttataattgagagttatgatgaggatgcactaccatagaaaagggctacctttagtatggtgtgatatcatccagttgtgggatccatttgaaaaa

SEQ ID NO: 378837 - DNA, 1841 bp, Cannabis indica
tgtcttaatgctatcaaaagacataagaagggccaaacaagatttttgatgtacaaagcagatggggctaaggcttatggccgggttgattaggcttttcttcagggtatgatggagaagttgggattttatttagggtggatttgtttgattatgaggtgtgtttcaactgtgatctatgaaattaacatgaatggtgatgtgattgggaattttgtcccttttagggggtttaggcaaggagatcctctatctcccttcatattcattatgtgcattgaggggttgacttccattatcaaacaagaaattgagtttcataatattttaggattgcctcgtgggcgacgtggccctacaatctctcacttactatttgctgatgatagtttcttctttttgaaagccaatttggaaagttgctctcattttaagctcattctctagtattatgaagcatcatcgggaaaactagtgaatcttaataagtttgcggttttcttctctcctcgcatgcctggtgatctttgtgcatctttcttcattacatattttttttactctaatgagaattgatgtatattaagtaatcaatattgtattataattctattacacaatttttaaaataaaccaaacgagaattttgattctactacaaaactcattacaataaaccatacacgagcttaagtagactttgaaaaattggaatcatatcttttattattaatacatttttattttgtgtccttgctctatgtatttatttgtttcttttttggatttttttagttcaagtaaagtaaatttctttatgcaccaaatattctatcgtttttactaaaatctaattggttttatgatatgctcaagatttcaaaatgtcacttttgggatttggtagggaaattaatatatatgataatttatttttaatagattagttacatatttataaggcttattttttgtcttcttctattgtcacaaacaatttataatttaaatacaaaccacaccaaaatgccatcaaccataaaattattgtccaccgactctttttaaatgaaaaatgaagatagagatcaaagtagctttctaaagtactcatttaataattttcgtacgagaagaaaatgctcacaattaatataaaatgtatgaaattttagcagattcttatattagtccatggcttattaaaaaaattaaccaaaaaaaaaaaaaaaaaaaataagacaatattaagtaattcatgtcaaactccaattgatacccttagaaacagatacaatttcaaccactctctagattaaatcaactttttatttatttatttttaacttaaagtgctactatttaaattgtagtaaaatttgactaataccatgtatgtgactatgtatttttttaaggaaaacatatctataatgctttgaaaaatacttataaaatattgtttatatatacataaaaaaaaaaaatagtgtaaatataactaatataatgacattgattttttgtcttaaaaatagaacataggtagacaagttccttttaaatggttgtcccaagtgacattgcttatctagataaattgacaacctacaaaataatgaaatattattgctccacaatttttgtagattgttaagctatcacttgtaatatcaaataaagcacatgattcatgaaacttataattgaaatgaagaaggaaaacaaaagcaaatatagctatcaatatcatgtattagagcacttatattttattaattaaataaaaaaaaaagataaaaataaaaataaaaaaataattagaagaacgagagagaaag

SEQ ID NO: 378838 - DNA, 2629 bp, Cannabis indica
ggtttttttttatgataaggttgaaatgggtatttgtcatttctggtaatcatctaagggtttgtagttattattaacttggtaagattaaatttgaatgtatttatggacttgattaacaatgtgccgttcaagcttgtggggttggttattggtaaatgtgaaagtaatgatgtggtattttcactgtttttcttaaacaatggaaatgctgttatctgaaaaagataacatgttgaaatctttctagtaaaactgttatattggaaagctagagaaaggaagccacaggggagggctcctcccctgcattggaaaagtttgtggaaggggtttaatttgctacatattgctatttaatttaagaatcctttgctcttttccatttcagaggttggccttccggttgttgagcaatggatctatttcctcaaagattaatgagggtatgcaagcaaagattgcaaaatgctcagagtctatgtggaagttaacatactatgccactgtcgaagcatgcattctcaaaatttcctataatgaaccatggtttcgagatacaaatgagttctttaaaggctggccagatcaggagttaaagtaagtaatttgtgttctgggacttactattattatgttgggtgtattcgtgcctgaactctaattttaatattagcatgctaaacacttgcttaaatattctttccttgttttagtttttcattcaactaagtgatgacataggacaagagctcatcttgtctgctattacatgtaagaaaatggatcaaattcatgctcctgcttatgtagatggatcctacactttgaaattaagtttgtttagtttaattacaggagtaatatgccatactgaattatttattataaaatgtattttttgatcatttagctggcgatatggcctatgactcagttttgattattttaacttttagtataatttctcttaacgtttaagtctgctaattttcttgtttcaattttgagattatttacacttttagcttgttttctttcttccaatattctattataaatctcttaacgtttaagtctggaatgcatttttgtttcatcgtattaacatcaagttgtcttgaaaatggcatatcaagaatttttctttttggtgctgagtctatttgattagagaattctcacattcttaaagggtttaatttggcacttatagcaataaaaaactctaacgttgaccccttttcctttccttttcaggcttccattaaagctattctatatgtgtcaatgtggattctacatgtacagcatagctgcccttcttgcgtgggagactcgaaggaaggatttttcagtaatgatgtctcatcatgtaataaccgttatcctgatcgggttctcatactttacaaggtactaaaagatcatttattatgctagttccactagttgaaagatatggcatagcatattcaattctaattttgatatttatttgtcttccatttttttactgcatttgcttctacctttttcctgaacttttatgttgcacaaatctaacatgtacttccaaagttaaaaaatgaactagggacatgttttgagatgcatacttgcttattatttattcattcctaaaagaacttgcaaattacattgaacattagcggaaaagctttacactgtcttatcttgcccttattagttctgatattcattacttagcatactctgattttatctttttttcttaaattaaaaatgacgtggttattgaagtagagaatgaaattttactttgggtcctttctctataaatattaaatgctttcagttctcttagaaactattaacggctggcaatactttgaatatactaagcaaaaaagctggtgtttgtatatgttatcttaacatatatcatttttacgagttagcaactattaacagtttcgagctcccgttgatacaaagcaaaagcctgtattcatgttctatcttcagccctgcttggctatttgcttatagtagcacctgagctgatttttgcaatgatgtgttactatattagttttatggatatatgggagggaggcataaaacttattaactatcattgaacatttattgggatatatgcgttaatatgctgttatagggattgagatatatgtttttggtggcaagatgtgcaaaattctgtcatttttgaaacctagcactggctgtctctatactagttgctatattttgtatgaaatcaattgttagtttcaatgattttaatggaattgtagattgactattactgagattgggtaaaataaaaccaatgattgagaatatatgtacatgtaaagctggtcattcagttctacaattaatattatattgctgatgtgcgtgtagattgtaatttatatttaactgatttaagctttccaagattaaactacagtcaccatactaagcctgtttattcagaaaagaggtaatgaattatccaatcacaggttttttcggataggatcaattatcctagctctgcatgatgcaagtgacgtgtttatggaagccgcaaaggttttcaagtattcagaaaaggagctgggagcaagtgtgt

SEQ ID NO: 378839 - DNA, 5514 bp, Cannabis indica
tgggttacctattagttcgtttggatctgattctttagctttgattttagcttttgctagaagatcttcattctgtaatgaatttggctttattttagatgatattgttagtttactattcaattttcctgagacatctctaattcatgttcgtcgctcagccaatatggttgtacatgagttagcagttcatgtactcaaggtggataataaattagtttggatggatgattttcctctatttctctatgatatacgaaactctgattatattcaataaaagttcattgtagaaaaaaaaaatctctagaattaacttattgtagatttagagaaaagatgacaagcccattgaatgagatcaacttcttttaggcccaaacaaattttagaaaagtagaagtaagaaaaaaggaatggggtatgcgtgagaaatgggttcgttttaagttgaattgtcataatttgcaggtggcattcttgactttgacaaaatatgtttattccactaattcccaaagactcccaatttttcccaatacatattttcgttccttcaaaatgaaaacaaaataacacatatttcaactccctgtaaagtgtaatttccaaaattctataaagaagtttctataaccattaaagaagaaactatttgatttacaaaaaaaaaaaaaaaaaaaaaaaaagaagaagaagaagaaactatttaaagcaattacatcaacaaaagaatagtaataatactaatgtaaatatttaatactaatgtaaatatttagaccatctccaataatatgtataatttaagctgaatttaaacctaaaaattatatcatgttatatttgatttaaattttataatattattttaacatattaatagtaaaatatgtaaaattttatcaacaaaagtattaagtttttattgaaagtgtataaaaattcaatatataaatatataaataaaaggtaaataattattaattacattaataagtcgtaaaaaaataaataaaaaagtgatatttattgtgatgtaaaatgtagtctatattttgtactaaatttagcataatttttaatatgtgctaaatttaaactactttatatactactattaaaatttatttctataaaaatgagctaaattatatatatacacaagcaaacttaggatttaagttgagggggcgacacttttttttgtatgttaggggggcatttttttttttacattgtataatatgttaaaaatttgtgtaaatttgtattttagtattaaatgtagtataaagtaaaaaaaaagtaacaataaaaatattagattcaataattaagacactaaatataagtcttattggtagagatttaaaaagtaaaatgcaaatactaaagcaaacatgcttttattaaaattaaaactatgagctccattatatatatacatgaaataattttatcattgtaccaaaacttattttatattcataaatatcacttttatttataaatatatgttgtaaccagttaaaatgtttaaatgtatatacatttattttctcgattttttttcagaagccgaccccacctcgtctctatatgggtccgcccctgcttgcaagtaattttaagttccaagaaaatagcacgaatgcccaacttagagcgatggcccataattagcataacaaataggagtttttacactacatactaaaatttttaatttttttttaatgtaaagcataattttttaaaaaaatattgtgtaagttttagactgtatacgattgttttttagttgtgccactattattttaattattttgttttattattttataaaaagagggtattttttaaaaaatttcatatgatagtaaaattataaatttttgcttaaaattcaacattattttttttgtaaaaatttcaaacaaatattgcatggttgaaagttcacaatccaattccattggtgtcctatttatttgaagacagaaaattcgaaacacggtttgagggaagggatagtttagtaaaatgcattctcacgcgtcattgatgacgtgtggtaaattatttgttttaattttatctgatttattcattcttcatttcaaaagttggaaattggaaattggaaattcgagaacagtcgtctaatttgaagccctaaattcccaaatgaaagagacggagatgtcgaaaaccgacgaaccagtcgtcggagttccatactatgcacatcagaatccctatcaagctggaatgatcccgccaaacgccgtctttggggaccctaagggtgttccgattcagcagaccatttaccgggacactcccgcccctttcaactgcctctactgtggtaattctggtctcacaaccgtcaggtactttcttcttgatttatctccttccaatcgtttcatttttagttagaattatcaaattagtaccttgttttattggtggaaattgaaattggttattggaattcgaccatcttatcttagggttctatgtctaagatttttcatgatgctcgatgaacttatgctgtattgaatgctactttttttaatttcgcgtgattttagttttcttggattaaacaagacaagctgttcctataatttaacaagaatataacataagttacttgtagtgttactgggcatagaacacagaattgctaacacaatccaagtgattccatagaagaattaagaataatgtaatgtacttgtcactggtggattgcttagtagataatccaatggaagagtggaagtctcttgaaaccttaatgctaggccaagaattataaactcattgaagtaggctgtttcataaatagaactaccaattagttttatttccagtgtgattatgctatgcgttgttaaatctctcatgccatactgagattaaactgtttatcttgtccagatcaaagttaagtctggcagctattattggctgtatgatgccaatgatgcttggaatttgctttctttgcccgtcaatggattgtctatggcacaaatatcatttttgcccgagctgcaaagagaaggtacctgggttttctgtctcttgctgtcctgtttctattattggtttattttaggggactatctctggaaaagatttttttattatccgaacattaacaatgtggctatctgctgtttgatccttgcgtaggttgccgactacgagaaattggacgtctgtgctgtgatggatcctcctcaatggacgcaggaaagctttgctctgcctgcagtttaactttgctctgcacaattcgcacttttactttgctatgctttcacatctgatctgcacacacttttactcaacccattgttagaacaacttacacaagaatgctcgtacatatatatattctcaaactgttattgtataatacaatatttctggaacatctattcttcttgatttgcaaaatatgatactcattgttgatgcaataaacatgttcgtgaattttgtcctaaagacaagtctacggttgagctgtttgtattgtttcgttaatcttagttaatgccattgttgctgcatatgcatagacttccatctctgattctttggccacatcgagtttgattttatacaaggtggggtatgtcttgttaggccagccatgctggatgaattaagtctatagagatagctagaaaagctaggtcagtcattattttcctaattgagacgtgaatgccctacaactttgggttcattaaaaaagaataaacctctgtaattaatattgttttatcctttgctgcaaaaaaatattgttttatccttggatctttgttgatatatgaaaattgctaaaggagagtattgtctaaaatggttaattaattgtaaagtggatgtactggtattgggcctttataacaatgcatatagactcaaatatatctaagctatataatatacataacgaaacttataaaacacaagctacttttgtcttcattgttggatgcacaaattactaatttatattgtcagaatacttggcatatactgcgttttgcgctctgctggggcaaaatcgacttcagtattattggagccatggccgatcgaggaagacctcgcaagctagatctaaagtcaagaagaaggtgaaggagaaaggaactgatggtggtgttgggcgcaaactaggacttgtttcgcgtaaggtgaaaatgatggaggagattctaggagttgaaacagctgaattttctgatgaggattctagggaggaaactgagatagaggaattggaaatgcagccccatctattatgtcgttcattgatggaaagacaggccatttgtgaagattttttaaattttatctacgcttcgaagcgtaaagaagaacttctcaattcaggcatcaaggtggttcctccaatacttgtttgaagggtgaagatttttcaaattttatctatgcttctaagtgttgggatgggattttatgtcataaataaaattcaatgtcaatgtaatcttatttactattaataaagatcagaaatcatatcttgatcttgtcatatgctttgttcatatgtttatttcatgattatatgtttgaatatataggtttcatcaaatcttgaacatatagttattcataattatagtgatctcatcacagtaaaaaataattgtgattatatgcttcaaactatttagtcccgagatttatcagtgcactatatttacactacatgataaccaataatgtggtttacttacacttcgataaggaatgtattttttcagggcattggcgaagtaaatttgtattgaatataatggttatacatcggtttggatcaattgacagtggaaaagatatcataaacttaccattatatcttttctaagtcaatattacttagttgatcatagatcaattgatctcaatcctgagaaggctcgagttctttgacttgttcattgtaagcttactcgttggattagtccatacttacatcttgagaactcggtagtataattgagtgagagtggtaatcatagatatagacatttatagctgtaatatttaattagaagtacatcgcttattctttgagtgttcttttgctgcccagtgtctccaagaagtcaaggatcggctgctgtggagagcaaaggctactgatctggcccaacttattagatggataggcataggaaaaatgacctggtttaggaagcaagtgtaaagcccgcttagtgtaatttggaaattagcagttaattatgattaattatgaaaattatttatagctatttaaataatttatttatactgttatttattgaattcagtgatgcattttatgtcattcagtagttctcatattttgcatttccggtgcccggtattttagaacccggcgtttggctcagtagaattcacaacttagtatgttagtagtttgggacggtttattag

SEQ ID NO: 378840 - DNA, 8876 bp, Cannabis indica
agctttagtgttagtcctcagtttataaaagagctccctagagttggtaccatggtcttgtatggtttagttgctgtttgggcagtgaagcaattgtttagttttggggatgataaagaggtgaaactcacagaatttgaaaaggaaatgatgaggaggaagataaaagcaagaaaggagaaggaggtgttgaacataggtggtgtggaagttattcaacctttaaaggaaccaccaatgtttcccattgacaagccaaagcttgataagcaagaactaatgaaaagtattgcaaaagcgaaatcacagagtgaaaatttgactgtacttgattcgaaatctgttacctcagctgctgctaaatctatggagtttgataacaaaattcaggaaatcagaaaaatggccaaacatgcccgggaaactgaagataaagagagacagttgattaaaaaggatagagtggaaactagggtgaagagtacagaaagttacaatggaaccaaggagggtgaagaatataaagagaaggagattagtttacttaaccaacatctgaatgaagatactcaacaaagttgtgatgatgacactaagctggtacttgatgaagcttttaccagggacaggaatgttgcatcgagtgcagaaagttcagatgtcaggaaaatgacaagcgagaatctaaaagacaatgagactcttgataatgctacctttgatgaaccacctggttctagagaaagttctgctctagtgaaaccacgaatcataagatcagtgaaagaagccagggagtatctttctgaaaaaggtaacaagcaagagtcaaaacaagagtcagaggttaaggctgttcaagaaagtgctgctcttccaaagcatgataagcagttggaatgtaatggagtggaggattttggcacagaaaaattatttactacagtcatttcagatgtaaaatcagattcttctgctatgacaagtgcctctgaagattctggtgtagggaataataaggaatttggtgaaattaagcaaggagaaaataatttttcagagcatcgaatttccttggatcatgaaggtgatgacaggaaatcagaaagagaacaatctgcaaatgtggaaaactggaatgagaagaattttaatgaacatattgcaaagaagattggtgttagctttagagataattacatggttgcaagggaaaagaaggaccagccatcaagtttgaatccttcctcagtgcttggttctattggagatgaaagtgaacttgaatggatggaagatgaaagtcttgcagaaattgtttttcgagttcgagacaatgagttatcagggaaagatccattttacaagatggacgcaaaagacaaggatgcatttttcaagggtcttgaaaagaaattcgacagagagaacgaaaagctgttgaaactgcatgaatatctccacgcaaacattgaaaatcttgattacggagcaggtagttggttgttttgtttctgtgatttctttctagtgatctaatcttttctcaatttcaacatataaattgtataaacatttaattatttattcccaatacacatatatttagtcagttcatctaattgaagctctaggatgggatataaaagtattagattaagccactttccaaccccttgtgattgttgaaacatcccaagcaattaccgtactatataactccatatttttgcacctaggagtttagttggacttatcctttgtggggatggttaatagagttgtgaagcaaaatgttaggaagaaacaggtttatctagtaaagatagcatttttaaagtaggtgtacttacaggtttcattgttttcctctcagatggtattagcatatatgatccaccagaaaaagtaataccacgttggaaaggtcctcctttggaaataagtcatgatttctccaataacttatctgaactaagggaagcaattcttgctgaaaatactggactttcattcaatgtgaagaaggacgagcagaactcgcttcagaaatcaagtgaatttccaccagttgcgaaaagtgccactccttcagcatttaatgatccaaaaaagagattaaataaggatcaagaaaggtccaagacaattatagaaggcagcgatggttccttaaaagctgggaagaaatcagggaaggagttttggcaacacaccaagaaatggtctcgtgggtttctggaatcctataatgcagaggcagatccagaagttaaatccattatgagagacgtggggaaggatctggatcgatggatcactgagaaagaaattcaggaagctggtgatcttatggagaaattgcctgagaagaataaggaattcatggaaaagaaactcaccaagcttaaaagagagatggaattgtttggaccacaagctgttgtgagcaaatatagtgaatatgcagacgacaaagaagaagattacttgtggtggttagatcttccatatgtactggtaagtaagaactatgtttatcctttgctttgacttatctgctattgagctgaaccttgcaattttcctgcttacatattttggcaattaacatgaagttcaatactgttgttctctttaccactttaaggtttcctggccatatcttgtattagattttgatttcaagttttattttaagaatgtttcacagagaatgatcagtcaataaattgccatctttcctgtttatcttttcagtgcattgagttgtacacagttgaagatggtgaacaaaggatagggttttattcactggagatggctactgatcttgaattggaaccaaaaccacatcatgtgatttcctttgaagatgctaatgattgcaaaaatctctgttacataattcaagctcaaatggaaatactaggaaatgggaatgcctttgttgttgcccgaccacccaaggtgaaaacttttaatctgtttccagtttccaccatgaaattacttactggtttttgggattctttatctttaaccctctttctttcttccacaggacacttttcgagaagccaaagagaacggttttaacgttactgtcataaggaaaggagagcttcaacttaatgtggatcaaccacttgaagaggtagaggaacaaattgtagagattggaagcaaaatgtaccatgatatgattatgaaagagcgctctgtagatataagctcattgatgaagggtgtatttggtttcaagaccaaacccactaagaggtatttcttagtcccggtagagaaaattgacttgtttatttttataatactgttttcattgggaagttaggtttaaagaagatttttatgccttgatttcttctctttttcaggaaaagatcaaaaagaaagctaaagaaacgtgggaagaaatgaagatgatacattatgcattactactttaagcattcattagccgtgtaggacaattttgatgcttgtggattaagctgacaatatggaggcttcctcaaaataacttgtgggaatcttcaacagttcaactctccccttatttgtagattctgtgaggtatagccgttcttgtgtatcttagatggtatgttggaattatttgaaaatgtaaggaaataaagtgaaaatttcctatgcaatattatttccatccagatgtttccagatccgggtattgtaaaatgcaagttaaaatcttgctaatatggcattaaaaaggaaaactgagcatatagtaataaccaacttttatcagtggagcactggtcatcatataattcctgcagcaggaatgcttgttaatatcacatactatatctctctcaatacacttggtttatctacagtaaactgaaccctacataatgatgaaaaggaaagccatatatttatatctgtcatacatacaaactgggaaatactttcagtcatgaaccaaagacctaacagttaactcaatcaaagacattgtagtaatggccaaggaaagaattacgaagggaagggaaggaaataaaagaaatgaaaaaatcctttacgaaattgtatggacaaaatatcctgttgtcaaactgccatacacaaacatgtacaattaccctaaacatgaatttttttatttatttttttaatgaattgccactatcaagaagttgacttaacaatttcatgaaggcggccatccatgatttgagacacagcctcaaggaatgcagcttcacttgttccagggagcacagaatcctttgcttcttggacaatctcctccataatggattctgtattcaaggtttttctgcacattatgcttccaatttcaaagggagtgagacctttctgaactcccttcttcaagagcatagtggagatgcaaagagtacgagcacattcaggggacaactcccatccatggaacttcagaattgcgatatcctcgtctgcgtccagcgaattaatgtaatcaactacctcatcagagtacggtacacgagcttgtggccaataaagccagtcaaatgtacactcttcaaactgcaggaaaaaaaaaatcaacattagaatcctgaattatcaaatctcataaacgtgaataattaggaattccaacgcttgaattgagcaaaacattcagatcacaaaagacaaaaaaattgaagtttctcaacaattatccaaccaaacctgaagtttgaaacccaatagttttttgaagtcttgtcaagattataattcagtatggcataagtttgatactcaaaagtatacaagcaaaatgacaagaatattaaattttaattttttgttaaaaaaggacaactaaccatgaaaaataattgaatgattgatagaggaacacaaaataagacagaagcataatataaacaaaatttcagctcaatcagggatcagcaatgaattaaaggagttggttacttacactttcaggcaagcagtacccatgatcaattggaatcagcacagtcttgccatcttctcctttgcttagcaatatatttccagaatgtctgtcagcattggccaacctaatatctaacacagagattttctgtacttccttaacagggaaagatccagggcccatatcctcacaacttccattattgtccatgaatttctgaagtgatccaagcttggcagtcatatcaccagaatggttgaactctttgtgaaagcacttgacgagaaatgtgggcgggacaccagcaaagccctctttatcaccaatgaacgagcggtggccgttcattggatgatccaaaaggtatgctgcaacttctctcaatgctccctctccaactcttgttcctttctttaacccttctccgtctaacgacaatggaagtcccctaggattatttacagccatgggctcttcatccattggtttgaacacagaaatatactttttccctgatgaatccagcataaaatatgctcctcctgtaccctctaaagacctgactggatgattcccgctacttaatccattaagtgaagcattaatcatgtcctttatggctgagggcaatttaatcttgtggttcacaataaaaggctccaacataggttccttgtaagaaggcttcctaggcaaaagcactttcccaacatcatgttgcatcttattgactttcccatcaactccattgcttcccacatcagtcaaatcagatgccacaatagacagttcaaaattcttctcgactggtctagtacgaacttttgcagatttcctaaccaacaaatgaataacagcatcattatgtttgctgatatcatcgataagtctctgatcctcaagttgctccccgttgcaaacaacttcttgctcctcaagatcaacaaattccttccctttcttagcaatcttttgtttaacatacctaacatctctaccacgttccacatgaaaagtatactctttacctgaagtagttcgaactttgatgacctgaagatccgaaagcttaagaaccaaatgcaatacatttccatctccaacaccatactcccggagcagcgaattgctacgagccagctcccggcctccacaaaccagcttctggttcttgaccacaaaccctttataggattgaatcctgagcttcactgactcaatagaatcagactccaaaacactcattgggataatagatcccgaaactgagagatatattaaaatggactcgctggagaccaaatcagccagagctcggaaaatgttattagaaattaaaggctcattgcaaagtggactaagcgcagctataccggccgaagacattttcctttcagctcaagaagagtcgagatttttcacagctttcgaaaaacccaactcacaacctccaaaacccacaaatattacaagaatacatacatttttaaatcctaaagagaccacctgatcaataaaaccagatgatcgaagaaacccccagacccaatttagcgaagaatcgaaaccccaagcccaccaaaggagaaatctctacaaaagcaatctcacaccctagacaacaaccatggccaataagcaaaacccaataccccaatttttttttttttaattttctaaatgagaaaaagtaaaaacgaaaagggttacgaagccttggcacaaaatgatcagactccaagaaaattgaaattcttaccaaaataatgagacttgagagatggagcttaatcaaagctcaataatcaatcttggcaaaagcttcaacaactgcaaattttctttctttctttctttctttttcttgttagtttttttgggtgaaattacagaaaaattgtcgagagagaaaagaagatttgaacaaaggaagatattgttaacgcgtaggaggagcttgacttttacgaggaagtttcgttttgatgatgaatgtttgtatttcaatgtctcttttggtaatttagaacagctatgactgttgtgcatttttgacacgttacactcttggtttgttctccaagttgtaaattaattaaaatgttatgactcatcattgcgtaccttgtccaaccacatgctgacacgtggagtaaaaaccaagttattaagaggatatgtactatgtatgatgtggacaatttggtatttttgtaaaaaggtttctgtaatatgacttttcttggtaggtggacagctcagggctcactaatcacttataaaaatatgataacatattggaaaagatgttaaaagaaaaaaaattggaaaaaattattaaagtaacggaattattctatggctaaattttatattgtttaattaagatttttgtctcgtgaatttcgacatttgacatgtactaaatcatgtctctgaatttataaggtcgttaaaaatgttcctgaattattgagattgttgaatttaaggacttttgttcaattttaataaaaaaaaagtctaatatagatgaaaattcaaggtacatgatttagtacatatcaaagttcaaggggcctaatttggtagatattaaattttgaaaagtataatttagtacataaacaatcactgaaatagtaaaattgaatgaaattagacaaaagtctttaacaaaacttttaagatcgttaaaaatatccatgaactattgagattgttgaatttaagaacttttgtccaattttaataaaaaaaatctaacatagatgaaagttcaaggtacttagtacatatcaaagtttaaggggcatgatttagtaaatattaaagtttagaaaacataatttaatacataaacaatcacaaaaataataaaattaaataaaactctttaacaaacttactaaaacaaaataaatcacattattctatgatttatatgtttgtcggttcaatttgtatttttactatgataaaataactttggccgaaagatattaaaaaagtgaaatttgttttaatgatataaccatgtactaataataaattatgattgtcaattttagtgtctgtccctttcaaataaaaaattagtgtccgttacatgtggcttatatgaaatggaggttcagtcaaagattgttttgaggtaatttaatcaatttttgtagtaagagagtgttcaatatatgtgtattttttaaaaagagcatctatctagatattattttcctttgcttgtttttttagtacaaaaacaaaatgaatgatgattactataaattaaacttaaccattaaaaaaatggaggctctacacaaggtccacaacgtggctccatgcctccatagctgccccccactcacactatgaaaatgaattatatgtaattaattacaataaaaataataaaattagcgattgtgatatatggtttacatagatattttttttctctacttttaatacttaattattatttattttattcttttttttaatattcaatttttttaacatgtaattatcagcttccttttgttcataataataataataataataataataatcataataataataataatatgtttattgttcaaagtaaattaataataataaatcatcagcttccactaccttgatggtgattttctgattttattctgctccacttacgtctatactaaattttcatttgttttgagttcaccatctcttattacactaggaggcgtttggttgggaggaataaaaatataagaataggaataggaatgggaatgggaatgggaataggaatagaaatggtatggaataaaatttaaaatggtataaaaaaattagataaaaaaataattaaatttttttacttattactattggaatggtcattccttcctttttaaaa

SEQ ID NO: 378841 - DNA, 1742 bp, Cannabis indica
atgagcctaatccactcttgttgtgggaaagccttagttgcaaaccaaactagtattggagcaatggctcccccaagaaaaaaccaattcacagcctcatatgtccccaaattaccaaaaattctacgtggaccgatcaatccccagatgacagatgcatcgtagaacacggtgtctgatggacatgtccaaagagatgatgtgtcttgacatatgtcagggatggtctcaagcaaccaccaggctgtgcccaagtagacgaaagccgctatgagtgttccaactacctaaaaacacacgaaaacatatcaagatttcgaattcgaagcaatgaaagaagaaagaaagaaatcaagaaaaatgacctgagccatgaacattgttcttggagggattttcatgtagtgaccaagcttgaaatcttgtagaaaactaatggcttgtgtcatacttatgtatccataaaccttgaaacacatgttagcaacagggtaacccgaatagatatacccaattatgtactccgttatgatgttcaatcctggagcctaaaattgaaaaaaaaataaatattattcatatcataattagaatacgaaaattactttcaagcttctcaaactctaaaaacccttttaacagaagtcaaatttagtaactttcttaggaagaatttcttaaaaagctaaaagcataaataatcagaaactcagccaaacaggaccataataaaattaagtcgctagatttcaactttttcttacctgattcgtgatggcggtaataataccgatgggaagtgtgaagaaaaatgcaatagcacaagctaatagaacaccccaccaaggcaattgaagttggtcattgtagtattcacaagcaaaaacagtggctgcaatgtttactaaaagaataactataaaccaccactcaggcacttgtttatactttgccatgagtttagtgtgtatgtccatttctttatctgcaaaacttgatttgctttgcttccatatatccctacatttacacatttaaatttcagttttaggaaaagtagatgttgagtgaatgagtgtgtttagaaggttatttgttatgaaatattaaaatgagaatattgtgtgcaaaatgtctataaaagaaaagaagacaaatttatcaaacaccttatataatagtcttcttttacactataacatcaatctaatcttttttttcttttaaataaataataaaaaataaaattctagacactttttaataacttgttgaaaattctcaaattgaatttttaaaaaccctgtttgaattatcaacaacctgttctgaaaagttattttacaaaatataacataaaatatattgttgttataaaagagttgatttttaaccttaactctttaaatatttacttatgttgtcaatcgttaagttaagtatggcactctatcaatgatattttaatttttactaattgaaaactattggatcaaccctactataaatttagaaaaatttacaaaaatattgtaatttgggttaatttttacaaaaatactgtcacacggaaaagttttcaaaaatactgtgtttttataaaacaccagtaaaacacaaagcaatacaactcaaaacaatagtagaacaactacaaaacaccagtagaacaccagcgaaaacttaacacagtatactgcagtatgaaacttataaaaaatacagtaaaaaagtaaaaaata

SEQ ID NO: 378842 - DNA, 3038 bp, Cannabis indica
tttttaatggataacataaaaaattagttcacagactcattacaaaatatatatgtaatgcatataaaaatatacaccaatgaactactacttcaaagaaaacaacaaaaataataacctaaatctaacaaaattttaaatcggtaaaacctatcaacattaaaagataaaacaaacaaaaaaaaaataaatggaaccctacaaataaatcaaataaaaaacactaaaataacatagaaaaattctaaaattagagtgaaacgagaaagaaaatataaagaaaccataggcattttagtaccttactttttccctttcttaacaactggaatcgtactcgtatcaacttcatcactctaatttctcttggatttcttcttcataggaagtcttttctgttttgttgacaattcaacaaaattttcattaaaatcatcatcatccaccataagttgtttcactcccattattggagatgtagaactttgagcaatgagtttcttaacagtaggtttttcaacaacatgagaggaagaacatatggaatgggtaatagccattatatagaaatatatataataagaaaatttgctaaaattgtgaggatacatttgagatgatggaaaagtggaggttctgttcgccataagagaaattgtgggaagaagaaaaaatttttttgggaggaaactaatttttgattgtggtttcataatgaaaatttggaaaatgtaataataaaataagaaaaagtatggagaagagaagaaaaattgatgagtgtgatagtttaacaatgacatcatcaatacataattgatgcatgaagagaatgtattttggtaataaaaaaataataaaaattatgaaagtaaacataaggtgtataaatgtttgaaatgcattgtaaaggtatttcggtaaataaacttggttttgtattttttttttgatcaagaagaaaaggaccttcattaatcacacaaacaccttacaacacacccaccgcaaaaaaaccaccagcaactagcagcagaccaaaaaaaaaaaaaaaacaaacctgctctagttacataaaaaatgttgtatatacatctttccattccttatcaacttcctatttttaacaacctgaattctactctgcacattacattttatctcctcaacaatcttaagaacagaattggaaaaaccctccataaacacctattcctattctgccaaatgctgtagcaagttgcagccaaacaaatcacattaatcttgtgcacaatacctggtttaggctcacacatccaattgacccaaccattgaaatggttcggccaagccctccagcccatccaatggaaaacttgatcaatcacttttgagacagcaaacaagagaaaaaaatgtgatcatgggactcattatctataccacaaacagaacagtccactgaatccatgggcacatgaaacttaagcaagttatctctagttagtagctgagagttcacaacttgccaaagtaagaatctgtgtttaggcatattcaaggtactccaaactgctttataataatccacttttgactgaattaaagtgttgttatagagttttgaagagctaaacttaccattcactacagcagccaaaatatcctgcttgtcaaacctttgtctcattctacaaagtttgcgccaataccaactcgtatcatgtttaagattgtaatcccaaaaagtatattccttgagatagatggatttgatccatttcacccaaagaagatcctttttcttagagatagcccaaatgaactttgccaaaattgcttgattccatttgacaccattgttgaaccctaaaccaccataagatttccgcaagcaaaccttgtcccaggatgcaacatgtagtttgcttcaattccccttagttccccaaagaacgcctctacaaagtcgttcaacttcccttgtgacacaatgagggagaatgaaaatgctcatccagtagttcagaagcccaaataaaactgaatggatcaattggactctcctttcataagaaagatgtctactggaccaagtgtgtaggcgcttctgaatttttttaataattactccacaatcttcagcttttcacttagtaggtctaagaggaactcccaagtagtggaaagggaaagaaccttcatagagctttaaatcccccaaaaatcactgcgttttcatcgttttggacgcccccctccccctccaaagaagatttgggattttccttcactaatgtgcagccctgttgtgtttccaaattcctccaaaacatctttaaggacaagcatggattgtcttgtacctttgctgaacagaataagatcatctgcaaaataaaggttaattattccaagccgtttacaaagaggatagaaattgtactcagtacccgtggctgccattttcagtcttcttgtgaggtattccatgattaggacaaaaaggagaggagataaaggatctccttgtcttaagcctttctctcctttgaatgaaccttggattctcccattcatgcttatgaaatagttagaagatttgacacattccataatcctgtgaatgaaccggctcggcaagttaaaagctccaagaagatcttcaaggaagtcccaactcacagtgtcataggccttgcttatgtcaatcttaatagcacaccttggggaaatcaatttcctcttatagtttttcaaaagatcttgtaaaatcatgacgttatgagctatcgatctccctttaacaacgacccctgtgttttgattaaccaaagaaggcagcacattcgaaagcctagaacacatgagcttagatatgcatttataaactgtagtacaacaggcaatcggcctaaaatcaataactgtattagggtggtaattcttaggaattaaagaaagtgcagcatcaaggaattcacgaggcatattacccgatatgaaataaccagaaatagcgtcgcaaatttctgctccaatgtctttccaagcag

SEQ ID NO: 378843 - DNA, 10800 bp, Cannabis indica
aaaaataaaattattatcaaatactacaattatttgtaaaaagattgtacctcgaactttggaaataataaattcaaattacttgtaaatttgcccattttattgtattatttgctcatttttgtaaatagtttcttgacattaatttatttaatttactgtaatttgaaagcccatgcaaaaaataattgcttaggcaacgaaattttttgaatatttataattttataatttgtatatttgaatgttagactattatacttagttcaagctaattttaactagctgaatgaataagtcatcgtgctgtaattttatacttaatttgtggccacatcaataaattgtctcaaaaataaactaaatgctaatgaaaaataaatttacagttatttttaatattcgagactgatcaagagacatttttgttaggattaaactcacttaatctgtcaaaatcaatatgtctatctattcactcatcagatgaatctgaagaaagctgctggttagtttttttttttttaaagaacattgattgttcattaaagcaagttgttgggaatcacataagggaacccctccctttgacaccaaccagtcatcataccattaattcttgcatccttagctaacctatccgcataatagttttcttcacgctttatgtaaataatttggcaatccataaatccctccataagcttccaaagttccatcgccagcggtctcagcttccagtagggaggaaattgcctcttctccaaagcccgcacgatcagcaacgcgtcagacaaaatggttaccgtcgccagtttagagtccactcccattcgaagagcccacttgattgctgttgttagttataacaattagatttaataccaacttaaagggaacccaccaataactataaatagtagtgcctttactcttttaagagaaacctatctccaatctctaaagctcatactttagattcagattaaagtttacaaagagagaatccaagatcataatgagtgtgtgtggagaaaaatgtaatgagagtatcactcttgaagtgatttctctcaatgtgagttatttctttgtagttattcattgtgttaaattttattcttggacatatttaattgtgtattactaactattcaaacaataaaaatctacgatttatttattctcaagctaaatttttcttatctaatttcaattaaatttttcattttgtgattgattttagttttatttatacattttcaaatattattactactataacaatcagttttgagggtgattattcactacaattgttttgcaaaagtataattaaaagagcaaaatcattgaagtgtcaaaattggaagggaaaattcctatttattacatttgaaaaggttcctccctagtcattatttatataataatataatgagtagtttatatgtaaacccacggattataattataaatagtttgtttagataaatgtgattatattattcatatataatttcttctttccaatggtgggcaagttaaggagatgggtcaagggtcaaatcaaactaacaaataaacatataatattatatgtgtaataaactataacctcagtgaagtggacaaaactcctcaattaatatcttcttcttctttgttcttttgaacaattgagtttttagccaaaacaaaaactgaatgaaaatgggtaataccaaaaccattatactccatgatgtaattgtattcctactacttcttctttgcatggaaatgggttccatccaatattccacagctcaacctggaaatggaatacttcttcttcccacttctgaaggtacttcttcttcttcttattgataatatgaaatatagctttgatgatgaaaacccagatgagactctttctatctctctttacattcagtaaaagattcaaacttttagctttttagtacaaatggtttattgggtttgagtctttctctctatttcaaatggttctttctacttttttacttatgacattgatgtctgcacatttaaaaattgggatgaaattacataaactgcttctaatagcttataggcaattgggttttaatttgtgtttgatattaatgaaaaatgacacaatttttttgataaagtttttgtctatttttgtgttacttttttgcagtgaaagccattagagaaatagcagcacagttgaataagaaagactggaatttcagtgatccatgtagtaacaaaacaaccattgaaaggcctcatactgatcagtacttcaacactatcatctgtaattgttccatctctgcaaatgtatgccacctccaatccatgtaaatattttccctctcttttcttcttgactttagcttttaattaagaaaatccatgttgaattatgatgataatgacttgggcttgttttgattgattaatgcagcacatttgtaggacaggatcttgatggggtgcttccaccatctgtggcaaagctacaatatcttaagcaactgtatgtactttctttttttcctaattaggattttttttcccgaccttttctcactgttaaaaattatacccaaattattaagattggtagattcaaagacttccattcatttgatgattgtccatataccaaatcgtgccccttggagtttgacttgtttcaaatcgtgcctcctaaactttcacatgtaccaaatcgcgtccccagaacttgtgtacatgtcaagcgccagtttgtaaaatctaatggaattggatgaaagtccttgaagttcgatggaatttttaacagcttgagatgttcgggagaaatcctaattagccctttttttcttacctgaaactcctaatactcagttttattatatactaattccattcataatgtttcttgtttatatatagtaatttggggcagaactacctcagtggtacaatacctagtgaatgggcttctacaaagttggaaacactgtaaatttcagtataattcttcatatagtcaacttttaagcatatatatatatatatatgtatgtatgcactcatgttaaggaatcatattgcagggttctcagtgtcaacaatttaacaggaccaataccaagctttttgggaagaataactactctcaaagctttgtatgtttaacatttttctctttttaagtgcctttattagtacttgttaagagactattaacattaaaagaactgtgatttttaggggtctggagagcaactctttttctggaacaattccccctgagtttggaaatttggttaacatggagattatgtcagtttttaatcctttttcttctcttgtattagattctttaaacatctttaatttgctatattgttaatggttgtatttttttgtggctaattgcagctttcttagtgctaataatctcaccggaacatggcctgcaactttcgctaacatgactaatttaaaaactctgtaagtcttcaaatattgtagaattaagcgagaaactcggtttaataatggtgtttacttgatacatttgcagtaggattagcagcaataactttactggaagactaccggatattttcaggagttggaaacaacttcagaatttgtaagaacttaattttcattccataatatgattttccaagtgaaaaaaaattataaggaatgaactttcatgtgaccctttcttgtttgaaatgtatttgtactagtgagttacaaggaagtggttttgaagggccaattccatctagtatttcggtcttgaataatttgttgacactgtgagttatccattacaagtagttaatcatcattttattttgacataacaagaacatttctttcttctcggtatgaagatttgatcataatgtgaactcactgcagaaggattagtgacttgaaaggcgagagctcggaatttccagacttaagaagcatgaacaacatgcagaaattgtgagtcaatattcatgttttattattgtatttctttctaattatataattaatcatttgatgagaaattttttcttgaaattgcagaatgttgagaagctgcaatataagaggaagaattcctgactatatatctacattgacaaatctggtgactttgtaatgcttctttccactcattttaccacattcttcaaaatattcataagatgttaacaactgaagttttactttatttgcagagaccttagctttaacagattggaagggactattccgaattttgcaaatataatgggattgagcacaatgtaagtatttgtaaactatattcattaacatgatcaactaattaaataatgtattatgttgtagtataattatatttccaattaagcagatttctgacaagtaaccagctgacggggctcatcccggactggatcagtagtagagataatcgatagtatgttttttccatctcttatctttctttttacttaaatcatatcaaatcaaatgttcattgtagaggaaatgttattggtatttgattgaacataacattattggaaatgttggacatactcaattgtgattaggaaaattatgttatggcgaaattgcttacacttggctaattaagtatctcatctttatttgcagtgcaatagatctttcttacaataattttactaaaatttccggtccaccagcttgccgagaaaccttgtaagagttgctcattcttctttctttgttactttcccttttaccatttttcgtaaacgttttataaaaacgaaattcactggtgtgttgtttcatcagcaatctgtttagagctttttcgcagcaaagcaacaagtaagctcaatcttaactaacacgagcttataaacatcaattgataatcaattttacacaatctaattgtacttccttatactatactttaatgcagattactcgccccgtgcttgaatccatgttcaaaaggtaatcaaacttgttatttcccccattaaagcgccatgattcttatgtcttcccattcatgtagaccgatattcggtgcatataaactgtggtggcaaagaagtttccattggaaacatcaagtatcaagccgatgaagatgtaggaggtagtgcaaagttcttccagagtccagctgattggggatttagcagcactggtgacttttgggatatttggagtagcacaaaagaccacatagcaaacaatgcatctgttctccgaatgaagaattcagagttgtatacaactgctcgcctctctcctctctcgttgacatactatgctcggtgtctagcaaatggaccttatactgtcaaacttcactttgcagagataatattaagggacaacagatcatattacagtgatggtagccgaatgtttgatgtttatgtccaggtaacttcattggcatattctgcgtagttcttctgaatttcgattatctaataattcacttcatgatttccaataggatctccatgcatgattagcccatactgcgtttgaaagaaattaaaagttgaaaaaaaaaggatttacgcttgattactctttttcttaatgttgttatgagcatacatgacatagtgttttgtgtaaagattggtgattgaaaggggactaatttgtagggaaaactaaagttgaaggactttgatatcgaaaaagaggcaaagggagttgataaagaagtgattaggaactttactgcaatggtgactgataagacattggatattcgttttcaatgggcggggagagggacaacaaatgttccgaggcgagggatgtatggttctcttatttcagctatatctatggagtctagtaagtacttatgtagggattttcttgctattcctacactaacttcatttacaagcaaacttgctaacacaagaacttgcttaaccgaaaaataaaccatctcgtaaaagaagtatttgataatgattttccgcctaatctatggttctttcagtcaagaacacaacatagttaaagattttggactctgatttggaatttttgtcactcgacctacttgaaatagtttgatacaccctcgaaaacttgttcctcacatttacatacaatatcttctagtaacatacacactcaattacagctctctctttcaatggtgtcataatacatatttttctctgatcacatactccaattgaatgttatccttttcacaatatgtatgtatagtgctcatagacatacgaggaaaactaatttgagtaacaaattttagttgacagtatgtatttccaagtgtcatctatctacttatatttggctctaaattttcagatttcaaacctccggatgaacacaggagcacgaaaattattgttgctggggttgtttctgcattgctccttattctcatgatcttagttattctttggtggaaaggctatttcgaaggcaagccatcaagggaacaaagtaagaactttttcttagtgtttattatttgatctcaaagagactcgaaaatcttaatgaacttgttctttttgttgacagttttgaaaggattagacttgcaaactggtttcttttcatttagacaaattaaagcggccactaataactttcatcccgaaaataagatcggtgaaggtggctttggatccgtattcaaggtagtgtgttttactgtgttgtacttaagattaactctttaagtaaactcgatatgaatgttgattttcattgcagggtgtgctgttagatggtactctcattgcagttaaacaactatcttcgaaatcaaagcaaggaaatcgagaatttgttaatgaaataggcatgatttcggctttacaacacccgaatcttgtcaaattgcatggatgttgtatcgaaggaaaacaactattgttggtgtatgagtacatggaaaacaatagccttgctcattctttattcggtaagcttaacaatcgatctccattagcatatttttcaaataccatcttgataaatgtcattgatctagttacttttttttcgataaaaggtggacatgaaggtgcggcgaaattagactggcaaatgaggcagaagatctgtattgggattgcgaaaggtttggctttcctgcacgaggaatcgccactgaaaattgttcatagggacattaaagcaaacaatatactacttgataaggaccttaatcctaaaatttcggattttggtcttgctaaactagatgaagaagagaacactcacattaccaccagagttgctggaaccatgtaaacaccattacttctatcgatttaattcttatttctgaacataccatttagtttgacatgattgattgctttgcagaggatacatggcaccagagtatgcattatggggttatttaacattcaaagcagatgtttacagcttcggaatagttgcacttgaactcgtggctggaataaacaatatgaaatttcgcccaaatgaagattatgtttgtcttctagattgggtaagactaaaaggaaaaactcttttcttatgttcgaatcccagatcgataatatgtgaaaacttaatattataggttactcagactactcttcttattatcaattggttttaatgatagtgttatgtatcattattcaggttcttgtttcgcaacaaaaaggaaacttaatgggagtggtggatcccaagttggaatccgagttcaaccacgaagaagtatttcgaatgattaaagtagctttgttatgtactaatccctcaccagcgcttcggccaaccatgtcagcagtagtgagcatgctcgaaggccgcacacttgttcacgaactgattatggatccaagtgtttatggcgatcaatcgagattcaaggccttaacagaatacattgatcacctcagaagtccgagttcgaaagaacctgctcagcagagcttctttttttcatctgaagcttcgaggttaggccgttcctcttcgacagccccgtctacatcaaatagcaaccaaacataaactcaacagaatccatcagagtgctaaactacattcattaattcgttcaattgtacataacaaactaaattgaagatgtagctttggattttgtccgttttggagacaaatccggttatgtagtttaggttcggttttatgtggaattggattggattggttgataattgtccgaaacgaaataaagttttttctatatctatatcttatgtgtttaaatataagaagagcaacatgaaacttttgcacctatatattatataccacttgtaggaaagtacttatgtatgacatacaacacccaaacatattctgatgttaaaaagacaacctagtacatcaaagagggtggaggagtgtagactcattccttcataacctttagttggtgtttgattggaagaaatagaatagaaaggaaataatttttatttcattcttttgtttagttacacattgaagtattgaaatgtcattctaataaaattagtctttcaactattttgatggaataactattccattttaaaatgaaaaaaaaaaatcattccattgcatgatgaattttttttatgtatttttatttctcccaactaaacaccaccctaccctagtaacgttttataatagatcaataataatattacaagtaaatactaatttgactcaataatatgtaactaatattattgtgaaaattaaagtattgacaaatttggataactactctattgtttatttaatctcacatttgattgaaaatcttcaaactatgaatatgaaaccaatgagtctatgcattatgcactcatcttcttgtaaattgttccatgcatcttactctcatccaactatacaattctacaattctaacatgaattagattagagaaaaagttcaagaataatctccattcaatgaaaaaaaaaaataataatccctctatactaagaataagaagaaaagaagaacattaaattacaccaaacacaagaataacattattaactgtttctgttattattggccttctccttccaatttgttcacataagctttcaacaacattatcaaatcccttgccggagcttgaatcgttcccaccacactcgacgccggtccctgaatagaccccaaaagcttcgaataaatctcacccctagacggcattgtctccagctccttaaactctccaggtccgtagaatttcccctcgaaaacggcgccggtgaaatcgttcttctcgtcaagcttcctctccttctgaaactctctgtagggtttaatggcggcaggtatttcttcagtgtgaacgaaaagccaagcgttcataccagtcatacagggtttaagcgcctcccatttggttccctcgattgctttgtagaccagcgtgttcttggctacgattagcttcgtgttctccggtagagatcggcggaggtcttggaattgtttgacggtgaaacctttgtagctgattccggctaggaggtaacagttttcgagattttctttgactgtgtcgacggtttcttctttcttggtccgggaaatggcggatcggattgtgggaaggcggcggccatggtttacgtagggggtgagtttgtggggaagtcggttgaggagtgggttggtggtaggtcgatttagggttagggtttgggatggagaagaagaggggaaacagagtagggcttccattagagaagagaaggataagagagaaagaagtcttctttgcttactcttatcactgttatcttatccgaaactagagagacaccatatcagtgtaagaataataataataataataataataataataataataataataatttgtatcataaatacttaagttaaattttttaccgaaatttatatttttagaatttcttagttgacggttcagatatctacagaaattttaaaaatataatatataatttatgtattattacagttaaaaattaaatttatgtatttatctacaatcaagaattaaacttaagtatttacatcgtaaattactctattaatattattattatcaaaataataattaagatttttgtcatgtacaaagtgattttaactattttttattttttttagaactgttgagattgttgaatttaattttttttgttaatttttactaacggaagtctaagtaagtagatgagagttttagaggtacgatttgatacatattaaaatttcagagtatacgatttggtagatattaaaattttagattacaatttagtacatggacaattactgcattagtgaaactgaatggaatggaaagaagtctttaaatctaacaattttgatagttccagaaaatttttaatgacctaaaagttcggaagtataatttaatatgtatcaaatttcagagaacaaaaattctaattaccctaatgttaaaaggtataccaatgcatctacattatcctaaatactgaaatcgataaaaatagatcggtgcaaccactaaatatgcagttgaaaattataatcagattcgttaattctatcaaattaatcaaatctttatgggctcgtttggaacgccgtattagtttgtattgtattgtattgtattatattgaattgtattttatgcaatatttttatgtaaaactatatgtggtaataacttttatggacacttaaatatataatattttagtataaattaaagtt

SEQ ID NO: 378844 - DNA, 2098 bp, Cannabis indica
gtgaagagatgtggttctctataggaagtaaaatggttagatttagtattgccgaatttgctttgatatctgggttgaattgcgtgggtgatactgatctttcacgatttgcttcaattgaaaatgctatggctgataggtatttcgtagaccaaaaggtaactgctgaagttattaggaaaagatttgagatgggaggttttgctaatgatttggtcgcagtaaaatttgctaagttgttttttgtttctaacttcttaattagcaatgaccccgataaaaaacaggttcctgtaaagttgattaatttagttggttcagatgagtttgacacatttccaataggtaaattggcttttatatcaacaattaaatctcttaggagtcatcctaagggtaaaaatatgaagaataccatggtcatggaactgcttaaaaaagatggagggaagaaaaaaaggagaacaattgtaattactacacttattacaagttgactggttgtccgtttatttttcaactttttgcttatgaaacaatgagaacattgagggaagaggggtactgtgaatacataccaacaaacccttatagaatttgttgttggaagagtggtaagtcgtgcaacacagcagaattacaaaacaaagtgtttggatcaaagcaggtatgttttatatatatatgtatatatttttttttaatacaaccgtgttttatttataatctaatctatattatatattcttcatagttgtgtgtggattattgtttaccatccctggttgagaagcagagtttgagacttgagacattctcatttgatttccataataaaggtcacattgttcaatatgaaatgccttcaagaggcagtcttgatgatgttgataaaggacaagcgtcaagttctaaacatgcgtatggcaatggtgactatacggttttggcggacctaattgaaaaggttattatggctgtggctaaggttgattctatggggcaagcttttgatgatttgaaagatcatgttgacagaaggatggataagaacgaatcatcaatgatgcattttgtggcaaactcatttatggatgggcttaagttagctttgggtgagaacaatgactggtgtacagttactccatccctttatacttgctcctatagcaaagtacatatatttgaatctgttgtcttcatccacgataagatctgttatggtacctattaacaaaacataaatacactaattacatgactaagaaaaaacgtgtaaatgatttcatccatatggtgcaatttatagttaatttattttattatttaaattagtataattacctggattgcatttcattaaataatataaatatcctggtaacaagctatatgaatcttcatcatttcctctaacagattcatttgccttttgtttagccctccaagccttttggtatgaaatagatacactatattctcctatcatagtgttcattatttctcgtggacgacatgttgtttttggatccatcagttttgatttaatgcattcacttactactgcacttgttgcttgaggatggtccgaaactaatttatttagtgagcatgtatgttgtgtttcaaatttacgtaccttgtacatgcttgttttttttagttgtgaaccacgaaaataccaatcacagcactcatctaaacataccaggacataatctctcttagatgctcgcttgaccttgtgctggtagtttgatcgaattgaccataatttcatcattcttatcattgtttttctatctttgaaaatgtgccccgctttaattatggttgtgttgtcatcttcgtcttgcaatggctcatcttcattttcacttgcattttcaagttcatcacctttgtcaattattgatgtggctagtgatctagctacttggctccaattttgtgaaccatgtatttcttcaattgcaatctgcaaagacgacttagatatttatttactttgtaaaaattgcattgtttaatgtattagaatatttttattatggaaattattttctaattaagaaaatgattttctatttaaggaaat

SEQ ID NO: 378845 - DNA, 1253 bp, Cannabis indica
taaagatttcttggtcaattttaattagtaattactattaaattggttgtttttccttctattggtttcagctgcaggagttagttttggaatgattctaattataacactgatttttttcatcatgaagaaaaagtctattctcttttggaaaaagagccaaactcatcaaaacgtggaagcctttctaagtaactatggaccacttcaagttaagagatatagctatttagaggtgaagaaaataacaaactcattcactgaaaaattaggccaaggaggatttggtgatgtgtacaaaggaaaattagacaacggttgtgatgtggctgtgaaaattttgaatgatttaagagatgttgatggtgaagatttcatcaatgaagttgcaacaattagtagaacatcccatataaatgttgtcacattattgggattttttttcgaaggttcgaaaagaggtctaatctacgagttcatgcctaatggatctctcgaaaaattcatattcaatgtgacccctattgactcgaccaagagccaattaggatgggatatgctttaccaaatctcacttgggattgctcgaggcttagaatacttacacagaggttgcaacacgagaattttgcatttcgatatcaaacctcacaacattcttttggaccacaatttcgtgcccaaaatcactgatttcggcctagccaaaatttgtacaaggactgagagtctcattagctctataatgggcccgagagggacggcagggtacattgctcctgaaatttttagtagatgtttcggcggagtttcacacaaatctgatgtgtatagttatggaatgatgattttggatatgattggtgggaaatataatgaggatattcaaagtgaaaataatagtgagatatattttccacattggatttataaacgtcttgaggtgaatcatcatgatgaattgggattggaagaaataattgatgatgaaaaagacatagtaaaagtgaagaaacttataactgtgagtttgtggtgtatacaaatagctccttcagataggccttcaatgagtgaagttattgaaatgttggaagttatgagtttcaactctttgcaattaccacctaagcctttcttgtcttctcctaattcaaagatggtctaaaagttgttctagtgttataaatattcaatattattgtaaacttgggattttttctattatacctttattaggtctaaagtttact

SEQ ID NO: 378846 - DNA, 2595 bp, Cannabis indica
cttttccgccgactaactcgacgtcgcgtttccccaccggcacggcgaagtggtcggagttaacgtatttgactgccttaagagattcgatcatccagcctggtaatgggctgtggtcatcttcgatctttggtgggattaggacaccagatgatgttttcggtaacacatttcgatcacgttgagttctaatgtcgatactgtaaatcggccattgtaaacatttgtgaaaatttattaatggcggtgcttatgcttctctatgtgaaacagataagtcgttattctctttttttaatttcaatttattgtgattatttcctttacttatttatgggtatatatgcaagagttaatgtagttttcttctcaccattcttagatttttttttttgaagagacctgtatcctagaaaataaaccagagagaacatgatacagcagaaaatagtttaatgagaagccacttgatctaagcctaaagcttgtttagctaggcgatgagcggctgtgttagcctctcgcgggatatagctaatcgaggcttgaggaaggtgagacagaaggcctttgatgtgggtaataaagtcttgcagatgaatattatcagtgtaacccaagtgaatagcatgtattaaaatcttgcagccagattcaatatggtgaattgcaattgagttctgaagacaccattggagggcaaattgaagagcatgtgctttcataatgagaggttgatgaataccacgccaaggaatggctaaggccgcaattgtatcttcggcatgatttcgaacaatgaagccaaagcccatcttgttttgctggactcgctgggcaacatcaacattgagttttacacagccaggtggtgggggctgccactgtgaattgcgctggcgagtttctttcaaattaggtggagctctgtggtcattgtgttgctggtattggcgtaggtaatcttccgtccattgaatgagcgttggggcattttgagttggcttgtgatgtaagacttggttcctgcaatgccaaactttccaaaggagacaaacagagaactgaaagtctttgggtgtcataacatcagtaaacaaaagtagaatatcgttacaatgcattgaatttaaataataagaagattataaaatatagttaatttccaaaccttctggactgaagagcaaccaaacaaagcatgtgctaaggtttcctcatgattatggtagcggcagcaaataggggaactcataattcggcggtggtaaaggttaacactagttggtaaaacgtcatgataaacacgccaaagaaagtgtttgattttggaaggaattttggagttccagatcatcttccaccacttttcttgggtagttataatggagggggagggttcaaattggtggatgatagagtaagcttgatgatatctcgaattgacagtgtatgatccatgtggcgtatgggaccaatagactcgatcttgacctagagggtgaaggaggggtagtgattctatggcttggcacacatcacttgggaagagattttggagttgctgtgagtcccaagatccgctaggggagataagactggagaccttactgcaaaggtaggtgatggttgaagatagtgtagtttcccatatctcggaaccaaggcatccttgtaaatgtttatggaatcatcgttccctacaatatttcgtaacctagcttgaaggagagatttcccccaagagatgctattccaaacaagagaaaggcggtgtcctttcccagagtcaagaaaagaagagtgtggggtgatatcgacttttgagaagttgcgcaaccagtgagaaaggagcctgaagaatacgccaagcctgtttggctaacaaagcttgattgaaagctttcatttaacggaaaccaaggccaccatgaaatttggatttacaaagggagggccaattcttccaatgaattttcctggtgtgagtagttcctccacaccaatattgagccatcatggtttcaatctttcggtggaaatagtgaggtaatttaaagtaagacatcacataggacgaaatcgcttgaaccgccgatttcagtagaatttctttacctctttttgagaaaaagtagagttccatctgtttagatggttccacacacgatcttgaaggtaagtgaaagcttctctctttgaacggccaaaagattgaggaagacccaaatatttctcgatagagtcacggataggcacattgagcaaagaagtgatttgagtcttaacaaggtcagtggtgttaggagagaagtagagcgatgatttgtcgtagttgacgagctggcccggagctaggctgtaaacatgaaggaggtccttgatttgagtggctgcgatgggagaagcatcactaaaaaggatgatgtcatcagcaaaaaagaggtgtgagattattggtgcattcctggaaatcttaagaccaagagcatgtttcctgtggagacgctgattgactcgttgggttatgagcgaggaaaggccttcagagcatagaaggaaaagataaggagaaagaggatcgccttgacgaat

SEQ ID NO: 378847 - DNA, 2408 bp, Cannabis indica
agagagagagagactaacgggctttgaagaagaataagctgctacagaaacaatcccattgcctttatcagaggttgatcggaaaacagtgtgtccatctccatcggtggaatctgttccccaccactcagatgagtaaaaccagtcaccttcgtcctcaatacgatgccgtaccgctgtcgaaagccgccggatattccaagctgaggtcaacccaggtcggcgcaacatcacaacaaacaaacccagaaatgatttttgttaaagaaaggcacaaaatttccaagttttgaacaaaggacagagaaagaagaagagaagtgaagtgaacccagttgctggggctctctgtttttgtccctaaacccaagggttttagtgtttggttgacaaaagtagaataggaatatctctattctttctccgaatagtattaagatttaagaataaggttttccacactaaacatataatttatctaattatcgaaattctatctggattaaggcttggtggtaggaagaataagatttttttttacactacactttttaggattttgcctcttaatttttttccgttaaaaaatcctcgcggtctataaaaattgtaatttttcctttcatttattttttgagattatttattgttgtagctataaatcaaagtatattgtgagaaattttaactaatgtgtggaatcaaactaacttaaaatgaatcaacaaataattagcaatgacaaaatcaactaaacacaattcaagaattggaagaataataaagtataatagagacgataaaatcataaataaacaatacaagagaatcttaaaatcaacaccaagaattatactagtttaagtctgataaattgatttgatctatgactctactacaattttagaacaccaacaaaacttcttttattgattgagcaagaacacaagtataattcatttaagagtggttctttgtttggattctctcaagatattttctctctaacactctttcttgagaagcttctcttttacaaaattcaagacctcttttttctctatacctattacttttctctcactacctctcaatcaaaactctctcaaagaacttgcatactctctgcttctggtgtttagtgttgttgttatgtctcaaatgacgagaatgattgtatatatagatcgaggatatgaatcccaaagatggtagcttcaaacaactaagtagttaattcggttaagacttagacggtttaactggttccttacaatgagatctccaagttagctcttggcactgagctctctccgtacatgtatcacacttcttggacgggcgtctcaaactcattaagcacaatttagaaggacgtcccggataggcacaaggcctattggaacagactccaaaaccccttcttggaggaaccagctagccttctgaaatcctttccaaacgacgaccaacttttcacaagacttattccggatggacaagctagccttcgggaactccttttcggacgacgactaactttcatgaagatttaacttgaaatattttcatttaaaagaactataccacatatgttattatagtagaagaatttatttaactaattttagctaatttaaactaagtataatgaccttaaacatttaaacattaactcttaaattatagatacataatctcatattttattgttagatactgtttatactattattttttgtttggattcttgaattacattaaccataagagagccttatatcaaagaaactgtttgtaaaaaggctaattaggattttaaccccgcaaattttgacatatactaaattatgccccttgaaattttttggccgttaaaaatttctcctaaactattgaagttattggatttaaggacttttgtcaaaattcatttaattttactaattcaataattatccatgtactaaatcatgctctcgaactttgatatttaccaaatcatacccttcgaactttgacatgtgccaaatcatgtctcctaatctttcatacttatcttactaaaattagaccaaaaattttaaatttaacaattttaatgatttaggaaaaaattgtaacgttcttcaaattttaaaaaatataatttagtacatgtaaaagttcaaggaacaaaaatcttaattaacgttgtaaaataaaccgaatgcaattaaatggataaatttacaattatttccaaaatctaggataaattgtttcacaaaaaagaacaattcaaaagagaaatcctttcataatttgggtaacaaaatccaatttattcaaatattgatattttatagtgtcagtttggaaacacttattattataatccaaatgtatgtagagagagagagagagag

SEQ ID NO: 378848 - DNA, 1019 bp, Cannabis indica
cagactcaatgcaatttctgacaacagtaaaacctgcacagaaatcctactcaattagccaggacatctagaattatgacccatgttaaaaacttaacgagaataataaaagcacttaaccatcttttggcacgacagatatattttccgctaaatgaggtccttgtttcccatttttcggttgccctttagtgatgcttggttttgctctacctgcagtattttctttctgtccatgatctaacttcgttgtttctgctatgttattctgcactggctgctttattggcaatatagatcttccaacagactcgtctcgctgacccattgaatttggctgatttgagtaagatccagtgactttaatccgttttttctctggttcttttgattctctttgtgcacttttggcagatgtcaccccaattttcctagctgcatcactaggcaaactcacagcattctcatctctgagtgaaactgcttccttacttcgttgtgcagacttaagcttcaattcactttcccgaagtgcaatctgctgacgcaagtcttgaagcttactattgttcaggcctacaccttgaccaaacccacgttcttggcttgatacatttttgttcacagaattaacttttctcattcgattactatgctcagctggcaatgccccagcaccactaacattgggtccaggaattttggccactggtgaaatatatgttcgatttaaaggcaatcttttgggtataactttgcctacaatgccagtggcaacctgtttgtttaacctttgaatgtaaaggggcaggaggtttttgattgctaaccactctagctacactacttttagtttcagtagcttttacttttacacattcatcagaatcactgccactgtcattatccgagaagcgtattacaagattatcagtggctcccaccggagcacaccatccagggccaggactaccagtatttgacgatacccaactcttatcaaaattcttcttagtcat

SEQ ID NO: 378849 - DNA, 1175 bp, Cannabis indica
gttgcacagtttagagccttctccagaaagcactgtactgtcggtggtgatacctgatactgccagcctgaaaaacaggtaccatggtcataacaatgcatcatatatcaggaagtgtatcttaccgaaaaaaaaaaaaaaaaaacaagccattgacatcctccaatgcacaatgtattacaaaatatgagcactatacctaatacataacagttcaatgatgcttaccatgttgtcaattatctccaaaacacacatccacataattaaatggcacaatccaatcaacatgtagtgctcaaacagtttgaattaagagaaattttaaacatgacaatgggggagactatcaaatataacatggaattagaattagagcatcaataaataggcaaacctaaactgacttaacatccaaccaacatgtattacacaagctattttgatatggaaaatttaaacaacacaaatcaagtaaacaaactactaagagatggtttcagtaaaaaaaattactacagctaaaaagaacaaacaaatcccagcatttaagggattgcataaagcagtacctgcatatttagttccttcgtatgaaataaccaaacgccacttatacccattaacagctggcttcatttctacacggttagagccctccgagttttcgccaccaactgtgctctgcaaattttgacaaaggcccgattttcagtagagaaactagcatccccattgtaatatcatactctgagagagagaaagagaggagtgattactgagttgtgggaggtagaagatagagacccatcaaggaatggaggagcatgaaggggtaggactggcactgcatagctcatctcttccaccaaaagcaaacgactttgttcaacgttccaattccaaaataaatataaaatattcggtaatttccggctaaaccctagagttttagatttgttacagttaaattctttactaatttggactggacaatcgttttactctatagtcttttcctttactttagtctcttaagtgcgaaaaatgatttagcaccaaaataaactaccacaatatacataagtatatacctggcaaaattttattgataattaaaaaatattttaaaattttaaaataaaaaaaattataaataataattattttaaaaa

SEQ ID NO: 378850 - DNA, 7627 bp, Cannabis indica
gttgcagtgaaaatgttggcctacttggattgacacacattggtagcagaagagtggtgcaaatatcaactgctttcatgttcttcttcgccatatttggttcgattcttttgtttctacttctttacaaaaaaaaaaaaaacaggttcattcgttttgtttgatcatctttattcattcatgtctttttgttttttggtttccaggaaaatttggtgccttctttgcctctattcctttaccaatatttgctgctatatactgtgtcttgtttggcattgtcggtgagcgatgtttctgatgctgctgctgttatagttctttaaacatataccgttttccgtctacttttctttctcaaatgctttctattgagttcttttttactataatctcttctttttctttattattattgtatatttgcagctgcttctggaatctcattcatacaatttgcaaactgtaattcgatgagaaacctatacgttttaggccttagcttgttccttggaatatcaataccccaatattttgttatgagcactgcttcagatggacatggaccagtaaaaacagatggtggatgggtaagttagttaattatgcttgcttgcttttacccgaacaaaacagttacgatgatgcgcctggttgggtctcaccattctgtttttattccttcaaactgaacatacactcaagagagttttgtcatgagaaaatatgtgtttgtttgtttgtttgtttgcagtttgatgacatattgaacacaatcttctcctctccaccaactgttgccatgattgttgggacattgcttgataacacactagaagcaaaatatgcaattgatgacagaggaatcccatggtggagacctttccaaagcaagaagggagatgttagaaatgaagagttctacagcttacctctcaggatacatgaatatatgcccaccagatttctctaaactaataatcatatttttggctctgtatattactacttttcttttttggtctaccatctttaatctgttagcacaatgtttgagcttttttttaggttgtgttgtgtgataagttgtaatcaatgaacactttgagcttttctttttcttatttccttcttcagaacttacaggactttaaagagtctctgaaaaagaacactaatattattttggtctctcattttgaaaatgactcctgaaattttagaacccattaaatatcatatcctagttagtgttataaatacaagtggtaggctgtttcggctcacatttattcgtgtttttcaaaatgcgtcgcgtaaaaaaatataaattgtgtcgttctgtgctaacaattttaaagggtagatttgagatttttataccgtgcttgaattcgtaccatgcttatgtcaatctggtttttttatatacaagttcgaattcgtgttctttatttctttaaattttatttatacaattaatatgataattactagattgttagtattttttatagtctcaattgtttttatataattttttaataatattttataggtaatcatataaaaaaaataaaaaaattattaaaattataaatatttattaaactttaaatatttattaataaatacttaaattattattactattataaaattataaggatctaaacataatatgtttttggacagttcatgtttacgtgttgtgcttgtcatgtcgtgtcgtatttaagtccgtgttttttatgctatgtcgtgtcaatttgtagtattgtgtttgtcgtatcgtgcctagtcccatatttttttgtgtatgtgctcgtacctcttaagcttgtgtttgcttcgtgctgtgtcaaaaaacatagttcatatttacaacattaatcctaattaattttaattattaatttttttttcttttttgtcgttgatttcttgggagttgatgaaactatgattagtgatcaaaatctaagacattttaggaccaagttagacattttgaaaatcgatccaatccaataacaatcgatatatctaattacaatcgatcgtcaaacatcaaatattcaattatgatcagatcggattgggtgttatttttaaatatccaatcgaatcgaatcgggtgttcgatgaggtgtccaaaatccaatacatccaacatccaatcaaactaattaatattttcatttagtttggattagtaattagattttatgttgttatatgtaaaaaaaaatatatatatctatatataaaaattaatattaaaattttactttaattttaaattggatagttccaattcattccaatagatactgaatttaagatacttgatggatttgatccgatccaataaatattaagtttaaaatattgaataaatccaaattaaactaatagatatacattaaatatatttaatggatagaaccaatccaatctaacatttattggatgttggattgattggacgactaaaatttattagatcagatcatatgataaaatttatcatctattatataaatacatcaaatctaattaagcctaaaaacattcgatgtaattccatgaaaatctttatttaaaatgacatgtatgtagtatagaatccttttaacataacatggcccttatatattagtctaccaaccaaaaaaggtaggaaaaaaattaaataaaaatatatttatataaagacaatgggaaaggaagaggtaagaaaagtttggagaaagtggagagagaaagaatatatattttgtttggttggaaataaaagaggatatatttatagaagatgaatattggtgtggaaaagaagttattggattttggatcccaccaatattttttctaatttttgagataaatctaataatatttataatcaaaataatacaaaagcaatcttattttaaaaataataattagtaaattgactaaaatatattactaaatcaataattctattgataaaactttaaatttgtaagtaatactacttagtactaattaaatcctattgtaatatgattaaaattttaatttctaatttttaaaattatattcactttcttttggaagattgtatttaatagaatcttcacgttgagaaaaaaaaattaaaaaatcatataatataataagtttattgtatttttttaataaagctttagctaagataatacagaggatattcactttgtttccttttacacaaaaacaggaaaagtctatgctgattaagccggcagagaaatttaaagcactccattgatttttttttattattatttatttatttattcaaacatataaatttgacaaaataataattttctacaagtacgagtatactattactaatactatccatccaaagctgccttggaaattggtacatgatcatatataataataatacaataaattggaatatataatattatgatgatgatagttgagtaggcccagcttatttttaagaagcaaaaatggctacaatatctttttaagtaaatcaatgtgaaaacaaataaattaaaattgtgttagccatcttctcttctcttctgcatcatatttgataatttgaaagccaatattttggacgttttctgaatttcaaccatttttatctttaaatatataattttcttttttgttctctaatccctatcaaatcaaaaaatacgtcaccccattaaaaaaaaattgctaataataaattaacaaactaaaactaaagtctaaagaagaagagaaggttcactgttatttctcactacagttatatggcccccacacgttttctcttctctctcaaatccgcgtatagatattattattattgttctgttttttcaaagaaaataattatagataatcacagcccatggtttttatttatttatttattttttgacttaaagtgcacgtacacatgaactgaaagcattataaagtaattccaagtcttcccaattcagttcagttcagttagttgcctaggtcgtcttcacttcagtagttaaatgttgagttattgactcataaattgggaacaaaaaaaaaatggttttgaaaaagaaaaaaacacatgcatatgctttttagcctaaaaaatgtctttcctagtagtgctctagaccaaaaagaaagtcttctcttccttttgatgatatttttaatctcagtaggccaatgaggaataattatatagtccaactttgatgaagttggtagcacagtttctaaactatttttgtatgttagcaagaatattactaaaggagagattgttattccaatactaaattaccaatcaacatggaaactgttgaattataattatttttaccatttttacataaacataatggaacatacaacacaccttctgatctgatcaataagctctaaatttatttacaaacaatatacaaaaaacataagatgactactcgtcaagccagtctaggctgtactgtgtctcagcaacctgaatgtgtagattgggcaatgccttcttggtactctcccaaagccaagagacctcgtcgtcacagatcacgtgacgaagagactgtggtgaagcatcaaactttggcaagctgttgaaccttgaacactctctcatgtcaatcttttccaagcttgacaatctatctatcccttgagggagacgagacagtttaagacactgagaaatgtcaaggtacttcaacccaagtagctcacagattccacaaggaagttcctttagttcagggcatgcatataacctcaagatttgtaaagtcctgagttttcccatatcagcaggtaagtgctttagattgtggcagttggtgatactcagtgtcttgaggcgctgcatctcacaaatggttggaggtaattcaaataaatcctcacaatgatcaattgtgagttctaacaaggaagggaatatatgaggcaagtctaccattgactgctcaaagctatctttgatattacagaggattacagataacttcctcaagtatttgaggggaagagtggaattagataattcaggtacagaaaccttttctagccaaagactcctcaaattggccaaactcagaaattcagggaaatttctaagtgtggcattagctgaattgtagtttataattatgagtgcccggagcttgggcatgttgtccaagaagcttggtaaaaagtactgcttggatgagaagttcagtatgagaacttcagcctcaggaaactccatttggaaccagtccatttcattcatttcgcctgtaaacaaagtgttaatttttcttttttcccttaaataaggatgaaggtaatagtagaaaaaatattacctgtatggattgaaacaatccgagcgttaaatggctgctgtgaattcctctcccactctttggggacagccatttctctccttggcataagcaatcgctcgcgctggtttatatggtcacgattgcttatatggagagcaaggtccctcaacacatcatgctgagtaacagcaatatcatagtaactgctgtatacatccccatctctgcaatagatcaaatcaaacacagtaaaggattggtcacataactaaaccgatataagagataaaaaatgagtttagtataataataccttgaatctttcacaagggtaagtaaatttttgtttgcaagttcaacaagaattgcaaaggcttcttcctcatcgatatcatgtacttcaacccacatgttgatgagtacatcaagaggtatcttcttgtcttctggaaatgcccccaaatccaggaaacaccgtttcactttatcatcaagccatttaacactcatctccatcctcacaaggagttcgttctcatgggagtcattaataggttccccacgcgataaccggttcttggcgcttgcccaatacatttctggttggtcccttaacgatgcaccaatgactttaagagccaagggaagccctttacactcattcacaatctgaaaaaaagagcgaatataagcaagtactcaagaacccatttgagaaaaacaaaaaccatgagagagtgttcaaagtccaacagtacctgcttgatcaaatttacattagcaccgggaggtatgttttttggccaaaggcagagtggcaaaacagagagatagcattgttttcccttaataactcaacctcgtaagtgtggttgataatggtttggaacttgaaacgagaaacgactaaccatgtgcaaccgggtattttcgaaaccaaacgttgaagctcagggagtgaccacacatcatccaaaaccaccagagttctaacacttgctctccaagaacattgcaggttccactgtggaacgacgtagtttgggcccagattttcgttccccgaaagatatccccaaatgctcctcaatagattatccacattaggagattgtgaaaccgtcaagaacaaaattttgtcattgaaataagctataagacacagagttagaagaaaaccctcgaaattcataatgagttataagagattgaactgagattgatttttttacttacttcgaacctcgtcatctctgcaaatttctttagctaaggtggttttacccgaacctccaattccacgaatcccaacaacactcgagttgttcccaagaatcatctccttgaccttcttcttccccaaatccaaaccaaaattgatcaaattcccctccaagttcatctgattatcctcctccactttcttcaaagcttcctccatccacccaccggtttctccaccgccaattttcatggagccaagcctctgttcaatctgctcgaacctactgtctattcgctcgagcccctgtccattcgctcgaaccccgcgtcgctatcgaaccggatgtggtggacgtcagccaatatattagcctgaaaaggaccctgcataaactgttggacagtcttctcgagcttttccatctgacgagtcagcctgaggttcttatagacgttaaatcggcctgtcttcaggaccttttgagctagctcgttgcctttctttagagtgacggagaattgatcgagctggaactgacgatggggttcgagctcaacccctatgtacttgatcccctcaatggttgggaggaaagaattaatgtaatgaatgaggttctcggcgcttgatctgcaaaagcaagctttacggactatggctgcgagagtcttgagaagctccgtggctatctcgccggcgaagaaatcggtaaccgccatgagtggttgttagagtagagaagaaagaagagaattttggaattgggagtgaagaagaaagccaagtggaattggttttttcaattcattcttttctttcttctacttctattcaagttggcggtaatatatcactttctataatatataaaagtttagactaatatttttctttttatttaaaaatttaccaaaattaggtttttctccttttaaactttaatacgtgctgaacttttttggcatttagtgtgtttttttttttttaactattaaaatttaaagatttttgtaaaattttatttaattttactaat

SEQ ID NO: 378851 - DNA, 2169 bp, Cannabis indica
agagagagagagatgtacattgctaagatggtaaagagtgcaaggaaaataagagaaagagcataagctgtccgggaatagccataaggtcttctttgtttacaacaaaagtaacatagaaatatgatagataggcagagtccaaagcccaaaaaccagatgacagcaatggcaaacaatgggactgcagtgtaacctacagactgaatatccaaagaatacttagatacaaaaaagagtagccaaaattgtaagatgaacacacaattaaattgttactacaaaaaggtaaaatggattaatgacttggggaaattttctaagtaattttaaaacaagcaagcctctaaataaaaatcttgccgaattattgagattgtttgatttaaggatgtttgtctaattctgttcaattttactaatggacccttgatgtggacgaaagtttgggggtacaatttggtgcgtggacagtcgccacattaggcatcacttagtaaaattgaacggaagtagacggaagttcttgaatccaacaatctcaatctcaataattagtagagaatttttaacgacctaaaaaatttggggagcataaagtttagagaaaaaaaaatattaagtagcctaaattttattggaataaatatcaagaaaacatgttctgtaatcagagttgtaatatcttggcatcttcccgagcaaaaactcaaaaagtatttcaacttttcaagggctaaacaaaactgtaactcaatcaataaccaaatcgaggtcttatttattatttgatataattatttctaagttggtcaatagctgtaacagaaaaacaataaaagataataaaaaaggacatgagatattattagagagtgtaaatgtacttacagcccagtaatggtggtcactaatattccatcctctagtgtacaacttcaacccatcaagtggatctttccggcgtgttcgctcagcagctaaaacaaccgacgagtaatcctccacaggagccataaagggtccttccacaaacgacattgtggggctttttccccacaacttctctgattcccaacctaaacacaaaaatatcaagccattatttttatttagtaaaacaataacaatcctggattggaaaaaaaaaacagaaaatgtgacctgaagaagagggtgttggggatatttgaaagtagtgaaaatctccatgagaaaagggaagatgaagaagaagaagaagtagtgttgtgagaaatgttaggaagagtgaagtggaacttgacattgttgttataatgaatgagttttaagtttgagaatgaaagtaagagtgaggcagtgagctaagctaagagtgagtgtggtaactggtaacggtttggggtaaagtgggaacagagggagcgttggtggagacgaagtccaatgattcccatgctcattttttctctctttcttttttgactttacttcaactggtgtcatatgtctgaaccaattgtgggatttttttctcctcacaataatttaaaatactgttaaactttttaatttcagacaaaaacaaagcaatattatataacaacattaatgtgtgtttgtagaaataagaatgtatttctattaatgggataaattcgattagacatgtgtcgtttttagagttatatactctcttgggaaattttttttgtcaaagtattgaaatttagtggaaaatcttccaattatatataattaaacaaataatcgtactacattaaatactatatttattattctctcaaaaaaaatactatatttattattatgctattatgttattatgttattattacgttcctctgtatcaagtttctatttatggcaggaaatgttaggtgtgtataaattggtgggattagacacactgacaaaagttacagcttaattcatcaattaatattattagacgagtttaatataatggatataagatagattatatatagttttttttttaaggaaaagattatatatagttcatacatactaaactcaacaagcgatacataattctaagattaattagaacttttttccaccaaactttgacatgtaataaatcatactccttgaatttttttttgcagttaaaaattctccttgaactattgagatggttag

SEQ ID NO: 378852 - DNA, 3564 bp, Cannabis indica
aatgcaaactttccaggagattactccccaacaatggcagagcttgtggcactaaaacgagcaataagctggagtatagctcaaggtgtaccagtgtcatatatagagacaaattcaaaagagatagtagataaaatcaataataatcttaaagacttatcccctatggatgatgttatagtttttataaagaactctttatctataacccccagtgtttcttcaactcttgtaagaagggaaggcaataccattgcaaagaaggcacttgtcttgtaaaggtaatatttcaagtgttttaatgatgtaacttgtactgaacagttctatttttttaatgaagttacttattcagttattctcaaaaacaaaaacaaaaaaaaatacagcatagagtagttcaacccttaattcttttttttttttttactaatatgtagacttgatataaagcaagcaaactacactgcataatcatcacatcaagtccatccttattacaacaacagcatatacattccactatcatggacctcgtgattttgtttaaattgttcaatcagaatacaagctttccaggaaatatatatactgattatccgtgagaatttcatgttcatcaagagtacaacttcttccaccgtagagataaacacaagcatttcactacagattaagcttacctgctaagtaccatgagtgcatggcaaggctgccaaaggacatgatattagcaagagaagacaagccgtgaatcatcccaaatttcttgttcatagctgcaagctttggattcaccttggcaacttccacattctttgaccacccaacttcacccccaatgttctcttctctttccactttgtgtctttgcttcatcatctaaacaataaaaagggtcgaaatgctacattagtattcgaaatttagcatcagcacacttatctgattctgtttactgctcccaaatgaaagaaattgaattgtaaggaaaattgtttggagacaactgacaaaaactaaaacattttggcattgtaagtgccaggttttaaattcaatatgtaggcaaaattatgaagggaattcagatgcatctttagaggcattccaaagtcagatacttgagtgaaatgttcaacttgaagaacaccaggaaagattcaagttttgactaagtgggacattgccttttgttaaaaatttgtgtatacgttatgtaaaacttgatctgtttgttactggatcgcttacttggactaaatgtcccaagaagtagctatcgaaaggtagtgaacctgtaaaaatcttttgagttctttctcttgagcttctatcattgaatattgaacagaataataataacaatctggtaacaactctaatttaggtggctaaaacaaatttagcatgttccaaagtcaaacagtaattatttctaagttcccattgtcatgcttggcataaaaataaaatcattgaaaataaagcttctatcattgaatattgaactggaataataatgacaatctggtaacaactctagtttaggtggctaaaacaaattttagcatgtttcaaagtcaaatagtaattatttctaagatcccattgtcatgcttggcataaaatcattaaaataaagcttttgtgttacttcaaatagtagttaaatcgaaaattctctttgtcaagcttacaatgaagcttctaattaagttttttcaaaataagctcggtataactacactaattctcatgccccttgagaattgaagagcctcagttatctccatttacataataacaatgtaattactcagttaaaaacataaatgtgtaacctgttaattcccactaattatattaagatccaattagcatgttattttccaaacacagccatagctttttcttcctagtttgaataatttccagatatgaatatgtgagtagaacacatcaataaatgacgaagagaagtacttggttatagtctcagaaatactagctaatatgaaaatctaagaattttcacataagaattttcatattttctgagaaacaatggaaacgtaaatcaataatttagattaataagtgctaagccttgaacatcatagtagtaggttgtaacgtcatcaaaacacgaggttttatgtatttatgaaaaagagaagagttttaagaaaaactgacctcaatggtcatgggtgtaaagacaaataaattggtcagattgaaggcgaatgcagatagcaaaaacccgagttggtatttctcagtagtagctgatgtcttccatggatgcagatacccaaacgaagctactgatactgcgcaacaaacacccaccattgagaagtaagcagggaacattttgctctgcaaattaccaaattgatgcctcggaaggttcctaacaaattgtatcacaaagcaagaatttccatgttaagaaaagtaacaatagtgagacattattatatttcattatgtagttgaatataataataacagaaagaagaagccctaagcaaattttcctagtttatttgaattgagttccaggaaaaaatatcaaagaaccaatagttctaggtttggtcctcgaatattaatgattatcaatgaaaaccctactaagaatgaataaaataaaaccgagaaaccctctttccctatcaatgaccaatctcaaaattttcaagaagttaacaagtataaaaccgagaaacgctctttcccgtcaaccaaacagatcatatatacctccaattccacatcttcttctagaactgaagaccaagattaacaattccaacgataaaaaaactaacacatttaaaacagaacaacacctacttgaacatgatgataccgccgatgaaggtgacccatagagctgcaccccaagcggtggagaagcagagaagatgagccaatttaatataggtgaaaatttttggtgaatggtgactgtcggacttagatccaaagctctccggtgaaaatataactccaaccgctaagaaggtgaccgcagtaaggaatcgagataaccaacccatctcacactggagtgtcgtctcgtcggttttgcagagcaagattatttgttaggaaagaaaattggggagaaaaaaaatgaaaggagtacggagaatggaaagagtagaagtagtagaaccaaattgttaagaaaagttagacactgttttcaattagtattagagtaatttatatttaaatttaactttcgaagtaagtttaatttttagaggtatgagttttttttaaaaaaataataatttatatgtaccacacatggataatgagttgacattcatatctttatatattaaaagtgtctatctaacggcatttcttggtttaacagaatataccttaaaaataaaagaatattctgttaaatttaacgatgttaataggtttgatctcccgttaacaaataaacccaataattaaaaccaaaaaattaaacaatcttttttttaaaattaaaaaaatcatcttagccacacataactctctaacaaaccg

SEQ ID NO: 378853 - DNA, 1128 bp, Cannabis indica
aaaaaatccataatatttaatactttttatatattattataagtattcaacctcattaaagtgtaaaaataaaaatagagacaacacaagtacctaatgctaaatgcaaaacataaaaaacctttgcacgtgatcgtttcattgttgttgtttttgaaccttttctttattggaatattgttttttaatttactcgagagtagagctatttatcggccaggtcttttggcacaccacaacaaaatatggtgtcactgactgtcagctctacacattaaagccctatacaaatacagtcaacaagcaggatttttttttatttttttgaaaaatgtaatgcaacttccattggatgaacctctagacaaatttaatatttaatttgagattcatcatgatttctgtattctgaacctctttaaattgaaaaatttggatttagcattgttgtattcttttcaatatgctcaaatttattgaataatcgtttaattttaatatttttctcaatagtctcattttcaaaaattttaacatttagttcaaattctttatttctttatttctttaagaaagagatttaatatcttttgtcagatactttgaacacaatttcaattactcaccatacatacttttgtatgcttctttcaaggaattctcatctaaatctaattcatccccaaagcatcattaacatctttatttaccaaaatgataactctatgaaaatagagttatttatatctttttgggcattaaattagctttgttttcaagtatttttagtttattttagtgacttttatttggttttatttagttttgcataaatattaattttagtatctttagattaaattttaattaattttgttatattttatcaatttgatttagttttccattttataagtgtaatctcaatgttgtgtatttttgtaaaaagattaaatgtacattttggacttattattcaaattgagagaaatgatgttaaagtccataaactcactaaagcccaagtattctacacttaattcactaatggatgttatgtttattgggccttactttactagttgaaaagtcaaaaaaaaaaaaaaaggaatagacaaatgaaaataa

SEQ ID NO: 378854 - DNA, 4701 bp, Cannabis indica
ttccatctcgtactcaccatgatggtaggtagttattaacacttctgttcactgtacttagtatttcgttagtagatcaaagaagatcgtaaagaagcaagacaaacacaagcattagttaataaaagtaaactgatttgtgaaagaacatttgacaaagatgaacatgaggattttatagtggtttaccccctttcagcagtaataggtagtccacttggggtgttattgatatcaatgtttgaggagagttctccagaggtatgttctccaagagttcactcctcaagtgagtttagaatgagagaatgagagctcaagagagtgattttgtgagaatcaaaatttgggttctgttataagttacttcactccccatatataggttttcatctaggagtaatttagagtttaaaatcccttaacccgagagcaccttcccgtaactatggtcaagttaggtttgaaatacaaaaattacatttcaaaataaatatctaaaaaatgataaaagattaaaatatcttctaacttcatgtgttgacatattttcgtcacgagaaacacatgctaagacaattttgttagtaggtggcgagaagaacgtgggatactccttatcttaggccaagatgacaagcatgttgaggctcatcttgggtcgaggtgatgagagtgttaggcccttcttttggtcctaatgatgataaggtcgagatgattattttggtctgaagtgatagaggcgtaaggaaccccatggtctaaggagatgatgaggttgagatgtcatgatggcaaggctctacttttggttcgagacgatatgttagggcccctagggctgagatgatgcatgttgaggctcctagggctaatgtaatgcatattgaggccctcaggaccgaggtgatgcatgctgacacccttagggctgaaatcatgtgtgctaggcctttagggctgaggtgatgtgtgctaggcccctagggcaaggtgatatgtgcaagggcggaggtaattttctttctttaacctctctcagtaaaacatgcataactttctcatacaatgtccaaatgagttgattcaagatgagttttagaagttgtggaaaagatctaaaacttttatgttgtcttttcgaaaaatctgaacagaacatgattatgtttaggtttaaagtttggcccaaggtgacgaggaagtgttgataggaggtgttgtgaggagatgtctccttttaggtcctaggtgaggaaatgtcacttttttggtcctaggtgaggatatgcctccttggtctgaaatcctatgagtaggtgaggtctcaattaatggtgagggtggaggaccccattaggaaccccactaggaggacctcattagggaggaccccattgaagagtttgccattaggaggacctcactgggagtaccccattgaggaggaacccattgagaggaccccattaaggaggactccatttgcggtgaaatattatggcgtttcccatatccaacgaaaaatttataccgtcaatttttttaggcataatattttctcatctttttttttcttaatatgtttttcacttagttttttttcttatttttcactcatttttttctgtcattttttttattatcatcttttcactttttattaaaattttgagttgcagtactaatcttttttagagtcatggtgaggtctcgattacagagaaattgaaaatctcaaaaataattagggtcatggcataacatgtggcaccgctacactcgacttttgagagccgcagtagaataatgaatcagagagcacgagaaaatttatttcaaagtttggccccgtccttctctactggctttgccaggacttgagtaagaatcttatatagcttatacaaatttgcattcacattgttattaatagataaagctatatatattattataaaattactcaaataaccgactaactccaattatattttttcaaattttacttgttgtctacatttctagacaagagccacatgtggatttggtatccccaaatcagtttacatgctcattctcaaggctctaacagattacgatctgggttaagaacaaagctagaagatcaatggtctggattcgattaaggcttgaatgcaagcaaggccgaaccaatgaatctggagagctgacatagccgaattaccaaatgtccaaaaagacatttacggataacccataggtattccagaagggtagtccaaggggtgtcccagagatcaatcttgtagggtcggtccgacgtggcacgcctctaacacagaatcccacaaaattaggggttttcccccacatcaaacctagaaaacgagcacatcacaaaaaataaactacctttttgtctctgactcttggtgtacataatcgacgatgcatgaccatctttcaacatcaaaaagtagtactttgtatggatgacaagtatccctcaattgggcctataccaggtccaaagtcaatattatattgtattttacgccatcggttgatttattttattacaattatccctcaattgagtctcacctacctggttttagcctataaataaggctctacccctccatatatgcaaagggttacgaactttggctagaatctctgcaaaaattctgcaagaacttatgtaaaatactctatataactaaagaacttcaataatattgatttgtggactaaagctcactaactccctaaccatgtaaaacatttgtcttctttactttaaaattagcttttcttagcttaatcttttattaattcagttttcaaaaatcatggtaaacgatatctatttaaaaaaataataatgataaggtgaaaaaataaaaataaaaaaattgagaggagaaaattaaataaaacaaacataaccttaaaatattatacttcaacacaaaaaaataaaaaataaaaaaattattctataaaaataaactagtaacgaccatattttttcaaaattttatacaaataagtattgaagaagatgtggaaaaatagaaatagatgtgtttttgattgtgtgtagctcgagtaaggcagtttgtcaagagacttaatatctagtgcagtggcgtattttgggtgtaattaattctaatttgaaaaaagataattaatatattttaaatgtaattgagggatggtagtgtgttgagtgagttgttctgggctgtgtgcctttgctgtatgtttgcttttattcaagtttgaataatatttatcttttgttcaaaaaaaaaagtattgaagaagatgattttatacaaataattttcgttagatctgttacttttgccagtgtatttgtttgcgctggcaaaaatcttaattggaaccctaagatgaaacaatgtgtttcattaaatggttaaattctgcaccagcaaacatttattctccccataaccctttctcatgcaagaattttgtgccaaaattttatttacttttgttgaggcaattactcgccggtaaaacattaaacttcctcgctaaaactattttatggagggaaatttcccacataaattttttcaccttttgcaagtacatgcctgcgttgacaaaaatatattaaataaccaaaataggatgcgccttaattttgacgattcctactaagccttttgccggtacaattacctaaatgcgccgataaaaatctcattttattggcgcaaatatgcgccgattaaaattaaacctaattaaattagggattaaaagttatcttttttgccaaaaatttttacttgtgcatttagccaactgtgtcgataaaagtggcaactcttagtgaatagttagagtcgattataaaccgacgctaatatttagcgtcggtttataatcgatgtactaattttttttttattattgattttaaatggtctctcaattttattaccgtcggtcattgaaaaaataaaactcttagtgaatagttagagtcgattataaatcgacgctaatggttagcgtcagtttataaccgacactatagtggcttttatagtggttttgaactataaaaataatcgacgtttggatcgataagaatgtccattctttttagtagtaaagtattaaattaatgacaaaaaatactaaattttcatcccaaatgaacatgtgaaatgacattcatccaaagattttctaataaaaacatgcagttcctaggcctggccctgggcataggcgggctaggcctgtgcctagggcccacctagcccaagagtaccaaaaaaatatttcccttttgaaattatacaatatttttactgattttgaaaaatattatatttttttaaataagagcctaaaataattttttttatggctctctaaatttcaggaccggccctggcagtacaccaattattcaaattagaataatagagaatataacaagacaaaccctcttcaatattctcgacattaatattgatgagccataaaacaagttgttaaaagacactgagaaagaaactgaaataacttttgtgtccaaataccaaaaaaggctggagatgatcatcaataaatatttctattttgaatttattaaaataacatttgaaagtaataaatactacaagtttctgtctaaaccacaatgatcaagaa

SEQ ID NO: 378855 - DNA, 3550 bp, Cannabis indica
tactgagtttcagtactcttacaaaagaataaacctccagcaaggacccgatcccttaatttaacagaatgaaatctgatgatgaatataccttagactcactaatccaactttttccacctgatatttccacatacgcctcccaaacccagagaacagaccaatgataggattttctcctaagatagagcataccaaagaggaattccaataagaaatctcctctgccttaatcttgacccctttaactttttttgtcttgtcttccgttgccccgaatttcgaatttaagttttgcatcaaatggtttgatttcagaagggaggatgaattacctgattactcaaagatcctcgaaccaaatgttggaggaatagttgcacctccaaatttgagaacctcctctctacgctttgattctaccaaaaaataagagaaatattctcttatatcttgcctctgcttcaaagaacatcgagataaagtcccctacaattcttcctcaaacttagcttgctcccctgtatcttcgtcgaaacactccactgcctctactcaaagaacctcctccatcgatttcgccttgagccgcgtagctgatacgtcaggtccctgagttttacccattttcctccattgtttcccttcccattcactactttcttagaaccagaatgctgagtaagaaccttgcgaggtcttcctcgaccttccatggctccaacaaagctaaagtcgaaagtgccataatagagctcgaaaatccagcgttgaaaatcccttggtttttttatttttaattagcaaatttttaaaaagatatgtaaataattagagtatataataaagagtgaacaaagaaatttacttgataatattacataacccacacagagagaatgatcaacttcacaattaattatacaacttcaatattattacaatctttctacgtgtagatcccattacaccagtttggacaccacttactctttattttgatatgatattgtccgatttgggccaaactctcacgattttcctcttggatttcaccccaaaaggcctcgtacctgcctaatttaaactataagtcctcttattactttagttgatgtggggttttccactcaacaattctccctcaaataaagttctatcgagcctcccttaaatgatcatgtatccatcctctcctacaacgggaagacctgcttcaacgagtctgttaacctcgccggctttctcttttctctatctaagtcatctatcttctttcaccaagagcacaccgcctgtccgatagagctcaaccatgatcttctttttacgggcttcaccacttttgtttggcgttactccaggattttagctctgataccacttgtaggatcgtctagcataacttaatcttcatcttggtatgatattgtccgtttttggccaaactctcacaattttactcttgagttttaccctaaaaggtctcataccatttgaagacttttctcgtgtattttaaactctaagtcctcttgctacttaagtttatgtgggagagtctcacttaaattttttttaatatatttatatatgtaattatatataaaagatgattaattaaatttaatgcaatatcgtaccaatgtagatttatgacctttttattactattttggtaatttttccagagatcatacttgcaacgagaacaataattggaattttatttattattggtcttatcatctataaatggcgaaagagacatttgtcaatttaccaatccattgagaaatttctacaaagccaaaataatctcgtgccaataagatatgcatattcagatattaaaaagatgtcaaaaggatttaaaattaaattaggagaaggaggatttggcactgtttataaaggaaaacttcgcagtggttattttgtagcagttaagatattaggtaaatccaacactaattggaaggactttattaatgaagttgctacagttggaagaattcatcatgtcaatgtggtacgactagttggattttgtgtcgaaggttcaaaacgtgcccttgtgtatgactatatgccgaagggatctttgaataactatatcttctctggagaccaaaaaataaatgattccttaagcaatttggaaatatttaatatttcacttggaatcgctcgtggtattacgtatcttcatgacggatgtgagatgaaaattttacattttgatattaaacctcacaacattcttctcgatgaaaaattgactcccaagatctcagatttcggtctaagccagattatgcccattagagaaaaacacagtgtccttaaccgcagttagagggaccactggatacattgccccagaattattttacaaaaacattggaagagtctcgtacaaagcagatgtttatagtttcggaatgttgttgatggaaatggctagcaggaggagaaatttggatgcggaagctgagcattcaagccaaatttattttcctttatgggtgtatgaccaagtcaataaaaagaaggaaagtgtacaagaagacattattactgaggaacaagaagacaaactaatgaaaaagatgattatagttgcattatggtgtatacaattgaatcctagtgatcgcccttcaatgcacaatgtcatagaaatgttagaaggtgatgttgaatgtctagaaatacctccaaagccttctttgtatccacaagagtcatacaataatagagaagctactaccgaggaggaggcatcaacatctttttcagaaaattctctttaattggtgagtttataatttttcccactatttgtggaatcactttttttttatgctttacatgtttatccatggttattatatatttggtattggtgctcatttctctagaactagctaaaagcttattaaaagctaggcattgtgtcaaagaaaattatatgttgattcttttttaaataagtttctgtctataatatatattaacttacatattatttttatttagagagaaaaataattaatttcagtatcttttttctttgatgagaatctagggcttactcaagaaaaggttcagtctgggttcccaggatagaaggatatgttgctactttttttttctctataaatattccttcagtttgtggttaatttttggttgagttgtttgtattgtttcggctatgccctatctttgttgttgctcttcaaataacacataaaggcagttccatgtagattatgaactctaattatgtatatattaatattaaagcttttttcataaatgtacaacaaaaacaatataattacaaaaatgtgaaaaaaaatttattttaaaactttatatattttaaaaacttattacatgaaatcatacatattaatcattaaataataaactatgtttattaaaattcaaaataaacaattttgtaaaattaattaagcagttttataaaaataaacaagttaattttttttattaaaagataaatgtttattatctattt

SEQ ID NO: 378856 - DNA, 1857 bp, Cannabis indica
taataataataataataaacagccaatgacagcatttaatgttgtcaaaccacaaatcaggtatcatttgtgaaaaagtacacaccatgtattgtagagttacataaataaatttggggatatcatgccccacgagtgagttgccaagtgccccctataaggggcagtttaccacaagatcgagttggagcttggagccaaacctccttttacttagactggggttgggtttagcagatggcccctccactagtatattagttaaggggtttaacacactagtgataagacactagtagaggggataaagtgggatatataatagaaggataaatgggttattgtaatggtgggtagtaagtaagatggaatagagccgtatatataggagagtaaaaggaatgggaggatcatgataattgtatcatatttgagctttggctcttgggagagttgaggtatcttgaatacctcatagtaaaatgacctatcactacttgagtaacaagcattcttacttaaaaatttacataaacttcatggtggcaaaatttttaaacttaaaaactaattttgagagagggagagacttaaactattggcatgaaaataatgaatgtcagagatgcatgtgcttgagaaatttagaacatcttactgtggattatgatccaatacagccaagtatttctgatttaaagatgctatctcatcctgtttctggggccagttacgttcaacaactgcaatcttcagttcatcaacacctgaaaatatttacgaacggcaaaaatcagaaatatagaggatcagccaaagccccaaaccacaaaaacaaaccacggacccaatccaccccatttggtgtaattattttcagttttcaacacaaattgtaaatacttttttcacactatatccgctttcagtcatctcttgcaagtacaagaaaccataaaaatggctgtaaagtttaagtagtttcctcattggtacttagaggcgaccaaccaattagtacttggatttctctacaaggaaaatcatcattccatagcttcatgcaaataaaaccagcatatttgtttttaatattttctaggctaataaagtcatgtaatgttcagttcatgtagcatgtgcctaatatcagggtcctcgcaatatagctcaaaggcaatacaataacaagaaaaagttgacagaaaataaagaagagacaatgatggaatgagtttacaatataacatgactggtctgaaataatttcaacaacaagtagaatgttgcatactataccaattaatatgtcactgagaactcacctgatgtaccatgggcaatatcatcttcaaatgtatcccttgatataaactggagtttaatgatgacagtttcagtctgaagcgaacaatgttaacaaggttaactgtacattctcataccaagcattacagaaataaaaaattaattgtgaaaaggatagttaaaattaaaaaactcacagtttgaaaccactgacatctgatattgatgagatcatcaatattccattcaatgtcaaaatcttcttcgtatttagatgcagttgagtaactcattttgatactattgttggaaaaagtcaactgggacccagaacaataactatcccgatatataacataatcaggatagagaacaaccgttatcgtgtcatcctgcaaatttagaagaagtacagaaaagtcatatatcaagtatccttggaaacactaatatattatacatctttagacttcgaagacaaaatgggcttaatttaaactttggaggcaatatggactaattaaaattatatgtgtgtgtgtatgtgtg

SEQ ID NO: 378857 - DNA, 5098 bp, Cannabis indica
tattaggtaagtagtcacctccagctaatccttcagacccattcgtcgtaggttgtccattgagtaatactgcagaaatataaacagtagaaaaaaaaatgagtaaatgaattcaacgagtcattcatgcagagaaatggagaaatgggtaggcttttttattataaaaagaaaagatgtaaaagtagctgtattagaaaggatgtgaaaatacatccttttgaaaaagtcacaagcacaacaagattcctcaggttacgtcaggcaaaaaatttaactgaactattatatgccacaacaattattctcactacaggctaaaacagttccgcaaacacctaataaaaagctcaattcccatcattacagttgtgtcccatttcaatttatttcaatccttcatcttaaattaaataaaatgaaacaacataactccaaaatcaagtattatacaggaatccaataccattgaagtatctgaggtgacttacagccgatattctaatttaacaagaggacaaaaacctaaattcttagtcatatttcaatagtcacaaagaaataactcaccccaccatgttacagctaaaacctgattgaagagatgtaagacggaagagattgtttagaacaattgaagggtctgatccccgtttgagctgatacaaacgaatttcgaaactttcaacaatagaatctttcttaaatatagcttttatgttgttgaaaaggaaaacaatacagcaccaacagctcttctcacctcaataacaatgcgcattccagttcgatcactttcatccctgatatcacttatgccatctatattctgttatggaaagagatcaaaagatatattaactagctaaaaaaagtaattatgtcaaaaatgactatttacactataaaactgtaagccatgagtaatgtcaaaggagcactgttttcttaaaaattcgatatccattttatctacttgccataaatctctagcttaagaaatatatttatttatttatttattttgaaatatatgtatatattggctgatttatttgaccaggagacctcccagtggattgtagggattgtagggattctaaccttcaaacaaatgcctagaaccactttctgacattccttaccactagaccacccgttggggtttctagcttaagaaatatatagtgaatggagataggcaagggaatcatacccatcactccatgagaaatagattaccaccaaaacaaaataacattaacaataaattttgtttcttttcaaaaaacattagcaatgaaaaaagataacagagtaaaagcagctaaagattcaatgaatagcaaacaaaagattaataactgaactttagaaagcaaacaatcaattatttacagcaagaagcttgaatggtggtaggaatttcatgcacttcacacagagatatggaaggaagaactcggtggaaactgtacatcaaaccaggaattcgagagtctagtgtctcccaaaggattacaataacctgacaaattactgaataaaatgcatgtaccctcctcaaccccaccctgggtgtcttgttcccactaaccaaacagtaaagagattttgtcctcaagctaacagtcaatcacaggttcctcaccaatacaaaatcctagccaattctctgctgaaatggcgtcaatagtggttgacttggatttgtgtccaactacgagcgtatgtgtaagcaattggaggccattcaaattgctaccaaacctccaacaaaaaatatatatgtgtcaacatctaaaatttcacacaaataagattaccttattttccacaagttcagctatcttttccacaagagcagatttgttggtttggtaaggtatctgcatcattcacatcaacgaaatggccatttatttttttataagaatcaaaaacttaactaaaatttaagaaacgaaaaaatatactcaaggactaaaaattcacaggaataaaaacaataaatgttaatatccatggccaaaccagacaaatcacaaaaagcagttacctcttttatgataattgcagttctctttgtcctagaatcaagcaattcaacatcagtttttcctctgaccacaacccggcctcgcccagttcggtatgcctctaagatgcttaacagagtaaacatacattaaaacataaaaaagaatgcaactcgtaagaaaataataactaaattgctatggtcagaatatttttatgtaaaattaatataagcacaaatattacatatctaacttacccaatattgcccatgatcagccctccagttggaaagtcaggtccaggcatgtattctaacaattcttgcagctatcaaaaagtgaaacaaaatgctaaaggtcaaattttgtgcttctaaatgctttgatgtatgctttgagatgagacaattatttccttagtacaaggtaacatctctaaaatattgttagatggccttcaaagtcttaatctaactatttttatattaagaaaatgtatttaatattttatgataagccaccatcttaagctacagccactggtgccaattggtatttggtgctgaaaagtagtgctttaaactcagttttaaagatcccaatagcgaccaatatttcactacaccccacaaggaggagtatagtgaaatattgtatctatatatggttgttgctcacatgcagtctattttaatattgcaacatacctattaagaaaatgctgctacgtaataccatcaaattgaatgcatccattactactaacaaaagaaaattacatttctcagttttggtatatttgaaaaagactacccttatcaagctatttaataaaggtgtttctgtgagaatagcttgttgcaactattttgtgagccacatccactgaaaacatttgcatgaaaattagtttaacagctagtgaattatgtaagcagaactcaaatatactgttacttactgtagcttctggattttgaatcaacacacatagaacgtcaaccaactccccaagattgtgaggaggaatattggtcgccatgccaacctgaaattaatttgacctaagaatgaattaaaaatagacaatgcaaaggaaaactaaaattgacagcactttttagttagtatataagatagataggattagtacaactggaacatgactacggtaaaggatgacaatggatcatcttaaaaaccattctgtaaactatataagattattgaataagagaaaattaccgcaatcccagaagatccatttaacaataaagttggaagtcgggcaggaagaagtgaaggttctttttgtgaattatcaaaatttggaacaaaatcaacctgtaaaaaataaacattcatgattgaatatgacagaaaatagattgatatgcttacgtgaaagtaattaaagagtgaaactcactgtatcaagttctaaatccaccagtaacattgcttccgtgagtggctgcaaaacaagtaaaagcctaccgcttataatcatagatgtcaacagtaatctcaaaaaccaaattataagtgtattctatcagatatagtaccacatcaagataatgtaccacaagaaaagaaagaaaagctgctgacaacagcaacaagaataatgatttttacttgaaattcaaacaacagtgagaaagcagagtggaggacagagttccaaattcatagatttctttttcttcatattgagcacttattacacataacgcgtcaagacaaactaatataacaaacatacatctaatctgcactctgtgtaacgcattgcagcagctggatcagcatcgattgaaccaaaattgccatgcccttgaataagtggggaccgtaaggaaaaatcctggagaagtaacaattcaagtacttataatgaattaatcaattctataaaagagcaatataaagaatgagaagaagtgaactggagcaccctatacacactttaaataaatcaaggaaaattatcaaaggaaaagaaaaaaagtgaactgaagcattgtcacaagggctatataataacctgaatggactgaatcaaatgcatatggctcttctagtctaacacctacatttcacataaataaacaaataaataattgaacaattacctgagccattcgcactaaagaatcatacacagcagtatctccatgcgggtgaaatttacctaaaacctgcaaagagatacatgttagctgcatctaatgcagagaaaagatagataaaacactacactattctaatgggaaacaggaagagtccgtgttgaggttttcagatagaatatcatagattgtgaacctctccaacaactctagcacatttcttgaatggtttctttgatgcaagtcccaattcatgcattgcatacctgtagttttcagtattagaatacagctgaaaacagtaagtacaacaaacacacacaactatttacagaccaacacacagaaataactcacagtatccggcggtgaacaggcttcaaaccgtcacgaatatccggcaaagcccggccgagcaaaaccgacatagcgtaagccatatatgcctcagtagcctccttgtggagctcagtgggcacaatcctgccatcatttccagttccctccttaaccagaacgctgccgttaccattggagccctcggacccggaagagtctgtggcgggctcgtccctctgacgggacttgatggagcggactttccgtgagggaggaacagtggagaggaatcggaagtccgggagggtgcggcggagccttaaaaagtgagtagaagaggataaggcgggagaagcgagacggcagcggaggagggaagagaagcggaggccggaggtgaaagccattgttggggaaagcggtgagggcggtagtggtagtggggttttggcggagaacggtatcataggagggtgagagagaggaatcccattcgggtctctctttttctttttcttttttaataataattgttgttaatatccatgtctgaaactgaaactgaaacggctaaaacccttt

SEQ ID NO: 378858 - DNA, 5613 bp, Cannabis indica
cgaagaaaatttcgctttgtttcgtattcagaaaaatttactcaaaatatctaaaaacctccattactggtagaagaagaagaagttttcagttcctgacatggataagcgattaagcttagcattgttggttttgttatcgtcctcggcttttcttatagcttttggagccaaaaatctcgacccatacaaggtaagtttctctctcttttttgcatttaggtttgtctcgatgaatttgaatgggttgttgatgcaattgaatgccattatgctctgaaagttccattgtttagagagaagtttaattggaactgttttgaattctgttttatgaattttgttgattttatttgtttttttaagtaaaaaaaccaatctttcctttcaataattatgacttatccaaaaaaatataatcaaattgagaataaagtacagaacttgtacttgaatttggaatttgaagtaaaggtcctccacctttttaagaacaattagctcgccttgaatcattacttagttataatgcttgttaatgggtttgaatcgccatcagttttttatttcctgattcgttaagtagaaaattgacatttttttttctttttttactctgttaatggtttttaaattcttatcaggttcttggggttgaacgaaatgctaatcaacgtgaaattcagaaagctttccacaagtatgctcttctttttttcctatattttgttctaaaggctgaaatattgcacatttgcttgatatttaactagtatatttgctcattactgccttgctttatagacacagtttgattaggtcgcttacatattttcatgacaaggaatcacatttagaatttgttgtttggtctcctacttgaaaatgagagatcgcacaccaattgggatattcgtgatgaacaatgggggttagaaggtgtgaatatattttttggcctaagcacaagtgcacaattttaaaagatctgaaattagttcatgtttacataaaatagttgctcaagttgtattttagactgagtaatggcaataataactgcggtaatgatgtggggttatgatacttggaagcttttgcaatggcatctggttggtgcttcttagtggtctacattagtatcatttgatatctgtacttgtgctaccatttcaataatggaacaggtagttgcaaatttgtcttatttattttctctctcacatgtaattaagataagagttctttgaatgtaacaaattgttgaaaggctgagtttagttttatgaagactatagaggtccttgtctgctcactctcatacaagttagtcacagaacgttcatagagtatggacacgcatcttacaataacatgttaaataatgtactttttctctttctcatgcttactcttttctaacttatggtttcaatttttaggctctctcttaagtatcatccagacaagaataaaagtaagggagctcaagagaaattttctgagataaataatggtaaattttattttcacaacttttatcattctttttcattccctttatcttcttcttatggttgatgatttttttctttcatttgtttcatcagcatatgatattttatctgacgaagagaaaagaaaaaattatgacatgtatggagatgagaaaggcaggcctggatttgaagctggccatcctggggatcagagtggatattcttactttacaggtggtggaccagggcatagccaattcagctttagaccaggtgattggcagaatatgggtgggggaggaggaagttcgaagtcattctccttttccttcggtggttctggtggcccaagttcttctggttctgggggttcaaatccgtttggtgttggcatggatagctttttctcaaacctatttggaggtggctttcaaagtagtcagtttggtggatctgatggtcgggctggctttcaatctggatccagaagtccctcacagagcatcaggggcattaattcgcaggtttataaaaaggaaatagttgaccaagggatgacttggcttttgttctgtcacgcctcttcactaaaaggaatccagacggttaaatccaccatagaggaggttgctatttcattgcaaggagctttgaaggtatgtgcatcttatgccatcttttgtcccctaattggctgtatattaagcactgaaaactgaaaatactccattctgttttctgtcaggttggaagcataaactgtgagacagaacagtctctatgtaaggaccttggcatatttcctcgcagaattcctagggttttcgtttattcatataaagctggcgagaagggttctttggtggagtatgatggtgacttttcagttaaagatttgaaaaacttctgccatgatcatttaccaaggttctcaaaacgtgttgatttgaagggctttgaacttccatctccaacaaccgaaaaactgcccacagtgatgcttctttccaccaaaaaggacacacctgttatatggcgcgtccttagtggcttgtatcgcaagcgcttcaacttctatgatgcccaggtattatttcaaatggtttgatctgtgattcctttgtagtgaaataacccattaaagttagcatagttttctttctgttacaattcgctaaattctttttctttaattgattgtgtaggttcaggatgctaatgatccatctgtgcaaaagttaggagtcaatgcaattccagctgttgttggttggttatcaaatggtgaaaaatatgttctaaaatcagggattagtgtgaaaaatttgaagtctgcagttcaggacctcagtctcctacttgatggttttgaaaaaaagaacaagaaggcagcttcaagtcagactagaaagacagagtctaacgaatcctcggagagtcaaataccagtattgacagagtctaactttaatgctgtatgtggtgagaatactccactctgcataatcggggccttcagatcgtccagatcaaaagagaaactcgagtcaattttgaaaatggttagtctaattaacttgatggggagattattagtacttctgttttccaagtagagatattattctgtaatgttctttaaatgaatgtgttaggaattagtggtgcaaatattactctcaaatcactcatttttggtcaatgtaataagacattttttgtactaacatgctgcatgacttttgttctcaggtttcccagaaaacgctattaaggcgacccagttccgcccttggctcgagggattctgtttcctacagcctattagatgcctctaaacaatcatcattcttaactgcgctcgacaaatcaggatttaaatcatcagataagctcttactagcatacaaaccccgaaaggggaagtttgcagtattcaagggtgagatgactacagaggaagtagagatgttcattggttcagttcttaatggcgacgttcaatttacaaagacacagggaaagcctatggtcaagtgaaagttattcccacaagaattataatgtggtttttgaatgtaaatagctttcgtttaaacaaggtaaagaaagaagaaacctcagcttcggccaaacccggaaaagttgaatttgaaggataggatctccccatgattagaagttgcacatagaagaaatctgtagtagttatagaagtgttcttagggtgagagaagagcatcttttggtgtactaactaaagccttaacaacattgagatgatgttgtcatatttttggatgaataataatgaaaaaaaaaatcatatattttattttgagtactttctattgaaagcaaattacaaagcaaaggcagctgcttaaaactgcaacccccaaaacaaaaaccaacaacatggctgttacaatattaaagatcttgtctcttagctttgattattaatttgacagctgaactaatcatcttggctgaattacaaataagctcaaaaacacacatttgttactattgcaccaaacaaaatatatagtgcctgagatggttgaattagtaattgagttgaccgaaccagtctggaaattaacacaccaggcccaccactcaaccagagacaaaggccattaaaaatggcccaaccaagaagaaacttaagctctaatttgactaacgaaggtacaagaggtgttgatgtgtctcaatatcagcttcacaaacaggacatgaggacatgagttagaagcgagctccaaaaacttaccaagatgattacgggcagggccggccctgacttttagtgggccatagaaaaaaaaattattttaggcccttatttagaaaaaaatatagtatttttcaaaatcagtaaaaaaaaatgatataattttaaaaggtaaatattttttttttgggctcctgggataggtgggccctaggcacaggcctagcccgcctatgcccacgcccgggcctgattacgggtcaagagttggttgttcagcgctgccaatcaataaaacgatgcttcaggacactcattctatgccaaatcgctactatatagtccactttgctagccgtaattaaagaagagtaaaattttttgattttgaacttctcttttaaaatttgcaaaacgtcttaaataactatattgtatactgtcatttaaaatcaaaattaatgttatttagatgatgccatttggggtgcactagaattactctatttttttgtcacttttgaatgatgcaaagctaaaatatatctcacatggtaaaagaatatgcttcattggtgcatggcaaaatataatgcaaatttgacataatgcaaatagtgtgtcaaatttggcctaaattttatatcaccataaattcactattttttttatttatttttatatcattttattataaatatatttagttataaaattaaattgtggacaagttatatttttttttattgttttgtatgataaagcaagtaaaattaattgtaaagttattagatttttcaaaaatatttttaataagtatattaattaaatattaaatttcacatcaaattttataattgtaaattgaagtacagtgctaaaaaattaatgcaaatatatcacaaagttattttttgtgccaaatataacataatatgctggttagtgatattttataataattatataattaaattgtgcgggacccaatacttaattacactaatactaaaataaaatgacaccttaagtgatgctagacactaggcctgcacatggggttgggttgggcggttttttgggcggttttggcggttttttttatttggcggtttttttaaaatcacaacccatacctgcccaataaaagtttgggttgggcggttttttagaggacggttttatgcggttttttgggcggtttgggttgcttaaaaatcaaaacttccaaagtatattgccacaagtatagactccactttttgcttaaacaacatatgtaaattttactcagcaaaaaaatatctccctcccttcccccatacaaatacaacctgtggtatactatattatcaccaaaattgaagcttt

SEQ ID NO: 378859 - DNA, 7246 bp, Cannabis indica
tatatatatatgtgtgtgtaaatcagagagggaaaaattttacaaaaaaaaaaaaaatcgattggaaaaatatacataaataaaataaaatgaaattttcagtaacgagagtagcaaaaaaaaaaccactataatatttcacggcaccacccataaaagttgtaacctattataatttggttcagcgatgaaatgaaacgggcttcaaaattttcaaggattgatttgaaaaaacttttaagcacacaaagtaacgattttgtttcaagccataattaaaaattagtatcagcaacaatattcatccaaacagggaagaattacagtttgttttctttgaaattaaacgtcaatagttaaattgaaatattgaagttgaagagccttccaattcccacagtgaagaattgtcaaatcttcttcaaggaactacctttgcagctgctgatgcataacttacgctgctgtctctcatactcttgcacttactcgactgctcatatcggagaaaatttatctttatctttgtagagcaacctctcagcatctgaagatttgaaatatgattatggtaaaattaagtagctatagtatagatggtaattgtcagattaaaaaagaactaaagtgataggagatgacttgaaacaaacttacatgaagaaaaacactaatcggatgtcgtccacagatggtattgtcatactccatcagataatttttaaatgcatctggatctcctgtttcaattatatccattcccatcttgtccaaagcctcaatagatttgtatattggcccatgtttcttgtcatagtgtgtgtaactaaatctggaataaattaaacaaatcaatgtaaacaagattgaattgtcgatgatatcgatcagacgccaatggttcattatgttcttcatacaaaaatcatgtgcatacatgcatagaaaaaaatccaacaagaaaatttagcagagtttgacgattatccttcaacagtaacactggccataaaatttgaagtcactaaagtaatgatatcatgctttatgcacacataattctaaggtgtgtgtttcaatctcaactaaacaaagctcagtgaatggtactggtaataagcaaatcaaactgaaaatacaagtttttgcagttcatgaagggggaaaacagctatgagctatatgatgatttgtacaggtcagtatgtatatagtacgacagaaacagtcatcttaagagtatatttaaataaattatagtaccaacacatttcagaagagtacttaccgagaaccccagtgacaaaaatctgaagatacagagaagaaattttggggatcatccacatattttgaaagcaactgtccatacatggcttcattttctgcattaacagcaccaactaaaattggtactactttgacagggtgcctgcaataataccaagtcagtcgcggtataaatattttggaacatagaactttaccatatgggaaaagtacccctcaaaaactttggcaagatatggcaaatgcatttccatgctatgttcagcctcatcaacacgaatagtcatttgttcaaatttcccagtagcctttagctccttaataactgatagcaagaaaaagaaaccccagttcgatgaaaacaccataatgaagaaaatgagcacaaaacaaatctattttgaagctgatcaggttccacaaatgaaaaatatgacgcaactcaattcatgtattcatagttatcgatgcatttgaggattgagaacatcaagcgatacaaatataagagaacagatatgcatgatgaaactataagtataggtaacaaaaaagactaaccacactgccaaaccctggccgtgtcttttctaaattttcaaatacaaaaaagagaagaataagaataccttccaaatcaataggtaggtccccaattggcgtcttgtaaactgaagccattgaaagagcacattttggggtgtaatagtgatgagacggaccaagaaggaacacccgagtactgaattatttgtttatcacaaattagtttctaaaactaagattaatctttaccaatttgaagagaaagaataacaaataatagaataactcacatgctcgtcggatcaatatttccaaatgcataggcagcagcacgaccagaataggaatagccagcatgcctaagacctcaccatcccaaaaacaataagcactaaactccctgtgactcttatataaaagaaaaaacagaatcacattgcgagaataacttacggagcaataacaccccgtacttcaggagatttagttaggccagattctctcagccaaccttcaagttcttccgctaacttagtagctgtcaaaatggaaaagtaaaaaattatgttcgacctttcgcagtaccaaaggtttaaatgcacataaagtctggaatactcaaaatccaaatttgcataatgggatggtggagttgggaaggaaccactagccacgcccaattatagtcaaaatagtaaaatggccttacaaccaagtgttcagtgttggtaaatgtattatgcaaaaatatataaaaaaacactacttgttcagattaaacttgatactggtgattgtatcaagtattgggtgtagctggtaataagacaagaaaggaaaatcaatttaaaaagaaaaaaaaaagaaaagaaaagaaaatgggtccagtaaactcttcttcctcgttctggttgccttccattaaaaatttcaactttataggcattttaaactgtaatctacacatcataacacagttcataaacttgttttttagttcagtcactcaggtaatcatatattcttttggattttccatagaaatacaatcaaattgatagatgatggaaaaatctcaagaaagaaagagagacttacgattatcggtgtaccaagaaccagcatgcgatggccttcttacgatctccatggaaggaattggggattagaaagacagacaaaccctaagatcgaaatgccaaaggcctgacaattgggatgctattcttctaaagtctttcctcctttttttttctgccaagtgctattctagtgtcagttattttatatttttttttatctttattgttattcttttcggattgagcatatagcataaccgatcatttggtgtctagtcccgccaatatttcataaaatttattatattaaattacatggaacattaaaaaaattatataaaactcgataattaattatatcaatagcaatataatatattgaaaagtaaaagacaatagtgcatttttaataattctcttttggattagatttgtttgtgttttttagtggtgcttcttatatctctgtcgtagtgtgtctttgtggttatgttgtgtttctttatgctttgtgacttttcttaatgtgtatttagtgggtttgtcttggagtttcaaaggttttttttttcttcttttgctccctttgcttgtctggtgactggtgtgtggggtatgtgtgtactgctttcgttctctcgcaatttttgtgggtgaggtgtcatctcgtgtgtgtgaggggttggaaagcctctgttttatgggttgttggaatctgaattggctgttatggagacagttaatgctcatcttgtggtcaaccaaggtaggtgtgtctccttaaacgaagccactcttgatttggtcccgagtgctggttctattgaagctctctcaaagctttgcctttttagtaaagtgttaacttctaaagttgtgatgagaaaatgattagggactttgctacccagatctaaaaattcccagttaagattgatcttcaccatgtggagttttcttgccccaatctcttccgttttggtttcgagaaagctgcaaataaacaatgggtgcttaataatgggccatggtgcatcaaaggtgataacttgattttaaaagcttggtcctctagctttgactcttatgattcgttgtttggtacaatttgattttgggcccaaatacaccgtctcccacatgattttttctcgatcgccaatgccaatactttgggctctcaggtagaaagggttatttctatacaacttgatgaaactaaactagcatcttgggcgaaatagcttagagttctggttgaaattacggtggccaagccgctgttcttaagatgttttatcaaactcgaaaatggggagaaaatttggatccaatttaaatatgaaaaacttgaaaatttctatttcatgtgtgaacgtttgggtcaccagcggagtagatgttcttggactacattggacacgattctaaatgcccaaggcatgccattttctctctttggcatgtggctcaacccaaccaccaagttctttgactgcttctttggtaagcagggactccccagatctctgatggaggatatgttactgattggctcaaaacgaaccaccttgacccttacggctctgacgaagatgactggggacggtggtttctcgagtcaaatctctaacggcttgggtacacagtccacgaggaagtttcaaaatgggctagctaggaatcgtactgttaagagacctacaacaaaagttgtttgggtccccaagattggcaagacaagttaagaagggtcaagggcaaaacatacctttcctggtaacaatcaagctgggacttctctacaaattggaaagcaagatgtgtgattaccttgcttaaaagaggagcaatgccgagacaaagtttagaagatgtggcgattgttattgatggtaataaccctaatggatctaaatgggttgggcgtgtgaaccttattgggctgtctcatgtgtttgtccctaatgtgcaaaacaaaacaagttttgaattagggtggtggtaatttaagtgagactcaggccctaacaaaaacttctcaagcccaagaaattgttttagaagaacttaaagcatttggagcctaagagataaatgatataccgcatgtggaaagggacattgggatccatactacttcaaaagtcaacaaaagaactacctcatttagaaaaagaaaattctcagagagtgcactttctctttgtccacgactagagaaggctctccaaccacaccctggcgtggttcgagatttttcttgggaatgcgaggttggaaagtctacacactttggaaacacaaagttggttattccttctcttgagaagttgtgcaatgggaagtttcaaggaaaggaagggatcattacatttgcttccaataatgctaatgctactagaaataagtgtacttcatctgttggatttaatgttcggttgtcttagtggaagtcgaaagtaggctttacggacctatttgtgccctttaatgatggtgtgaatgtggatgatgctagctctcgagttgttgtcaaaaatgatacccctgtggaggaggataactcatctcctccacaagagccatgaaaggtgtggcttggaactgtagaggattgggaccgaccgctacagttctagaacttaagtctctagtttgggtgtgctcaccatacttcatctttttaaccgcactaaaagtttgtgcgaattttgtggtacatattcgaaactgattacatttttattttaatatttctattcctgctattggtaccgcaggtggtttaatcttagcctaaaaagttggttttgtattcgaaagtattactacttctcgtaaccagattacaaggattgagtgctacccttggttgtttcctgtgtctatggcctgccgttttaccatgccaaaaataagttcttgactgatttcatgaatgtggaggacgagttcagtggtccttggttaattattggggacgtaaactttgctctctatcagttagagagggttggttccaaaggtagagacctatttatctcggttatctcgatgttaactaactctcgaggtcttattaacttacccattaaaggagatcacttaacttgggataatcatcgagatggtagaaatcatgttaaatcgaccttggataaaggtcttacaaatgatagttggatttcccttttccctaaggcgatgttatgctctttccagtcttgcgatttcgatcataggcctttatgcatttactctaagggtcgggaaagcaatgttaaatgccagtttagatctgaagaagcttagactcgcgatgatcgtagaaacctggtagtgagtcatgcttggtccttcgttaatcataattggactccaattaaaaattttaagaagattggggctactagagttgcactgctcaactagaataggcaccaattcgaaaagattgacgaaatgattagagatttggaatcgaagttgaattttatccaaactatgacgagaggtattagaaattggaaagaggaagctgagattataaattctctaaaccaggccttgtagcgaaaagttttatattggaaacaaagggccagagtttcgtggctaaaagagggggataaatgctcaaaattcttatttaatctcgatcactattaggaaaaggcaaaatgcaattgagagtttattgcacaaaaattgaaattggattactagctggaatcaaatagggaaagaattattggactactttagaggtatttttgttgaaaattttgacacagagaggcctagtttgaacatgaccattagagatggcttctctaaagagaaatagaggagtctgctccttatgccagatgtcgatgaaattaggaagactttattcaccatgaataacaacaaagctcctagcccgaatggtatgtcagtgcttttctttaaaacattattgggatacagtgggtggggacttttgtgactcaattttagatttctttcggtcggggactatgcataaaggtataaatgctactatgtagtgttcatccctaaactccataacctgaacaaggtgacgcaattcagactgatctccctttgcaatgtaacttataaggttatatccaagatcattgccaacaggattaatccgttccttccacagatcatttgccctactcaatcggcgtttgtgctagggagaaacatttaagataataacgtcgctattcaggagattatccactcctttaaaaggaaaagggtaaaaaaggttggtttgctatcaaaattgatcttgtcaaagcgtatga

SEQ ID NO: 378860 - DNA, 7680 bp, Cannabis indica
tacttaattacattaataatggtataataccaataaagatattagacaccaataatacctcttaacaatttttatatttttctttccatcatacaaaatcaaaatagaattaagaaaaaaggtcaaaaattagaaaaagctcccgccaaattgtaaatgttgtttccctccacagcgaaaccggctacagccggtacccttcttcgaattgaatcagactcactcctttataaaatgcccaaaacacaactcagtttcagttttatctaaacacctcttcagtcggttcccggtcatcgttttcttctcaccaagaaacaaagagaagaacaatctcgcttctagggttttctctctggttcatgaagctttatccaatctagggtttcgattgttctatgatatcagtagttgtagtagcagtagcagagagtagccgagaagatgagcgccgtcaacattactaacgtcgccgttttggataacccttccgcttttcttaacccttttcagttcgaaatttcttacgagtgtttgactcctcttaaagacggtaaactaaaatttctctgttctgatcttttttttttatttaatcgttgagcatatttggtttattttaggatttttgagattaagattcagctgaagttgatgcgatttgagttttagtttatttatattatttgctcaaatatagctaagaaatttcgatagagaaatgattatttaaagaacagatgaactttttataatatttgctcaaatatagctaagaaatttcgaaatagaaatggttatttgaagaacagatgaattttgctttttgattttggttgtttaggaatggtgatgagtaggtaagttgcgaaaatgaggattatttattgttttgatcagaatttgctgtggtttatgagtggcttttattatattttagaattttgagtccaaatctgctatttgacatgttgttacaaggcctgaaaattattgattttgaatccaaattctggcttcatttcaagatttacaccaaattcatcgcataagatttatctttctgtgttattttttgaacaaaaatatgttctattgagtttgctttgtggaggcatttcatgtaacctcatccttaattttgactgatgatagatttcgccatttcggaactggatatcaaactaaaaaacttttattttggtattttgaagaattttaatgtttttcatattcgttctgttgtaatagaataaataaattaacaactctgtttactgcttttagtttatggtatttgttcaagattaattgtcattcttgatttttgatttcatttatcaattggtttcatgaaagtgatctgagtgtgtttctcaagtatgtctttttttgcattttagagcttcaaagttatggacctatggtttaataggtctctaactatagctattgtttcatctttagaccgttcgatcatcatgatgttatctattgggctgtaatttagttgccacttgcctagaattcttcattaggtgataaattgtgatacaaaaatcattattttcgaatgtgacttgaaataagctttcaggacattgccctgcaatcattttctaaaaatttgtttaaatgatgtactcataccctcattagctaaatctttctgatcatttgagataattagtggggtgttttgggggagcatagggacaggattacctaccactaagtaaatgatggttttttaaatgttcatagtcttaagcatcttgatttgtcaaaatttgatataccactttgtacataaaggaaatgcttacacttctatgtctgaaacttgtacaaagttggaagaataatatgtgtaggtgaaatagagctatttttgcgatattgctgtcttgtaatttattgttatgagtttataccaacctctttaattcaatttactgcaattcatatgctcatatataaatcctcaccaacaaaaacaagctcttatgttaacaaccttatttgacttgctcttaatttgtttcagacttggaatggaaactcacttatgtgggttctgctgaggatgagacatatgatcagcttttagagagtgtacttgttggtcctgttaatgttggcaactatcgctttgttcttcaggtaaattccgtgactattggttagctaggcttgaattgccaattgcttgtgagaaactaaatttttgttatttcttgtcaaattccttcaggcagatccaccagacccatcaaaaatccgagatgaagatatcattggtgttacagtactactattgacttgttcttatgtgggacaagagtttattagagttggttactacgtgaacaacgattacggtgaagaacagctgagagaggaaccgccaccaaagcttttgattgataaagttcaaagaaatattctagctgacaaaccaagggtaacgaagttcccgatcaattttcatccggagaacaatgaaaccagtgaccagccccctgcttcttcacccgatcaacttactgaggtcaatggtgctgatgtaaacgtccccgaaaccaatggtgctgaagaaaacgtccctgaaatcaacggaactgaagaaaaaccacccgtctcatcttcatgataaccaacaacatgttgtaagttgaaagtgactgcataacaaagtatatcgctattgacttttttttgcataggagatcatttcgggtggctaagcttaatagagttcttcacaaaatttcaaggatctccccctttttcgactggtacgctttctctctctcgagtatcaagtggaagttgttatgatctgatttctcctgagattcatgagagtacaagttcagttcaaacatattgtaatgtcacatatgattgcctctcaaaattttgtgttttaaagatttgttgttagaactatgatgtggtagtgaaaattagatggaaaaaaggcctgaaattttctgagcagtaatgtaattccaccatttgtgtcttgtaaacaatttttaatttggtcttaaatgttattataacatattttggatgaaaaaaactaaaaaaaattatgaaaaataaataaccattatacatactaaattaactattttttttccatgaaatttaaaactcatgcaaaaatattttcaaatatacaaactgaattaactatttttttccatgaaatttaaaactcatgcaaaaatatttcaaataagggtatttttttttggtgacaaaataatttaagagaagtgttaattataactttctattacaattttttagtcaatttttatgtttgaaatcacatatcatatttttttttaattttttttatagcggtttctgttatagttatagtattattcttaaatttttttgaaaaatttcaaatagtttatattattgaaaatagagttcgtgatatttaagtttatcactcgtgtttgaaaaattttaaatgtatttttggtactgtaaactatttgaatttttttttaaaaaattttacaaaaataatattgtaagtttaacgaactttgctatgaaaaaattattttgttatgtgttttcaggcatggaagttgagtaagaaattgtaataagaggttgacagtagcactcatatatcacttattatctcttcgggggcatgtgttatcgaaaatttcgacaataaaactatgaaaatatgtgtaacgaataccatgtatgagctcaactaagatcaattaggagaacaacaatacatcttttagggtttttaaattcacccacgataaggatacttaatcaaagaaaagtatctaataactcggaatccgattccggccattaaagaatccactcgagtagaaatcacaacactaccatgcatagagaaacacgactaacaagtttgatatgattcaaatttctgaaagttgatttgttaaataaaatcttttaaagtgtcataggaaagtaagaaatcacaacactaccaaaagttctaacattctcactaaactcaataaaaaagtaaatctttatattaaattagattaaatcaaatattctcattaaatctgaatctataaaaagttaattatgataccataaaaggttaatttgaatctacaaaagattaattatgatactataaaaggttgatctgaatctataaaaaagttaattatgataccatagtccccaaggaccgaatacgtaaatctttgtcaaattttaatttggtcaaaatttttgaaccatttacaaaatattcttccaaagaggtttttaaattattgaaaaaaatacttatttaatgaaaaataaaggaatgaaaaatggttttgtggtatttatttcattgattcttttattctaatacttttcccttttacattttaaattagttttttttttcgtatttttactgaattttacaaaaaaatctttattgcaactagcgctgcaacaatcgtatagaaacccctattgcaactagctgtaaccactttaggaattcaaactgtaaagttgaaaaaaataaaataaaaagatagtatatggaataattcttttatattttaatggtgtctacttcatttatttgtagaatatgtaacatcttgcattacttaacaagtcttttagtatttatgtattactaaagcataatagtacatcgttccacttaataaaactaattatcaataaataaattcataatctaattatacaagtctcccaactaagttaaagttacatgataaaactagttttcagcctacttcctcttatttttccacaaaagcaacaatgaaacataatataaaaccctataaaacaatccccaaacaaccaaaatcaccaaatattcccacttattactcaactcattaatccccatctccttcaacacatccaaaccattcttcaaacaagtaccactcgtcacattcacacccaccgccgaactcaaattccccaaaaccgccgccttcacagccgccggagcaccaccaaaaggtgtcatatcaaacaaatccacccccctctcaaaacacctttttgggtcttcaaattcactcatcataacaccctcataaggatacttaatcaaagaaaagtaatgaaaccaaatccaataacttggaatccgattccggctaatgaagaatccactcaagagtaaaaagtaagctgagactgacacaaccaccgtgtaacctaccaacacatgtgaaaccaaaccggagagaaacactactaatgagtttccggcccagaatgagccggaaactacacagaggtaaaaacaaaaccccgaattcctccggcgagtcctactgcccaaaatgtggctgtggaaaaagctattgagagaatcagaagaagtgggaggattgttatggattgagagaatgcataggagagttttctgtaagagttgaaggaagtttctctggtgaagatgaatctttcttggagtaaaagaggaagagattgacaacttgaaaagtaagttgtggaaatggcgaaagcaaaaaaactcattctttctctaatccctttacttgaatcatcaagacgccaataaattgttgataataaaagaccggttgttaaaacagtgattaaacgagtcaagaacagtactggtgttctcctagaattgagaattgaacgcttagtcaaaaccataatttcaatccaaattggattcgcaaatttttcaacaccggagattaattttccgttgccggaaataatcggacttgatatagagttttcattgctagaaattgtaaagttcccttttgaaattcttgcctttaatgcctctttaagtactggaaattgcctgtagtcgtcatcgccggcgccggtgccggaaaatacagcgattccggtaggggagttttcgagctcggaaatcaaatcgagcacgaactcgaccggattcgcgttttcgggaattgggtaaccgagattagagcaaaattgagtgagttcagtggaagaaccgccgttataagctatttttccaccggaaaggaaaatcaaacggtcaagtaatccgattatccggtaacttggttgatgaacagacataacaattaagcttccactctcattagcaattcttctaagaactttcaccaccatgaaagcactagttgaatccaaacccgaagtgggttcatccaagaacaacagaatcggatcatgaattgcttcaattccaatcgaaaccctccttctttctccgccggaaattccccttttaccctcgtcgccgattatggtattggcaacgtttctcaaacccaattgctccatcaacgattggactctgtttctcttctttaaagacccaattgatctcggtagccggaactccgccgcaaaattgagggtttcttcgactgtaagcatcggaaaaagaagatcgtcttgcattacataaccagtaatggatttagagagttttgaatctataatctctccgtttagagtgattgttccttttaagctctgtttctcgattcgattagctaaagcatcgatcaatgttgtttttcccgaaccgcttgctcccaatagagctaaaatctcgccgtcgtgtacttcgccggagatgttatcgaggagtgttttctctgccggtggtacggcgccggcgttgtttcgtcggagaaaattgtaccctttgggacgatgaagctttactctatatgtaaggttggtgaaactgagtacgaaggaaagtgggcgttgccgttgttggttaccggcggtgagatttccggttatgttgatgatttcttcttcttgtgataatacgatgtcgtttttgggtgcagattgaattaattccatttttattaaaataaataaataaaattaagattgaggctctttcttatatagttttttatgaaataagtgccaaaataattataagaagtttcttttgctttaagttttcgagattattatttatgtatttttataactttagaagttttcgagattctttgtgttaaagtttaagattattatggatgtgtgtacgtattttttgtagtcatgcatgcatgcatgcattaattgtaaaaatgtaagtaaggtggtaacgtatacgtataaatttattaattaagaagagttttcttttttatatgggattttggtgattagtacttacctaccatccttcgaaaatgtacattatcataattattacaaaagtaatttgcggcataaatatttaagtttaattctcagttgtaaataaatacttaatttaatttttgacagtaataatacctaagttatatttttagaactttgtaagtacgtaaccgttaaatattatgttattattcacatgtcattttcttattagtatatttaaattattatttttttaaaaaaataaaaatttaatgacttgaaccaattagaaattgctacgtggcaatttacttaacaattaacagttgggtacctacaaaagtttcagaattataacttaagtattattaccaccaaaaattaaacttaggtatttatgctgcaaattactcttattacaataacgaaatggaaaaaatatagtgccgtttggtaatacttttgttttctaatttttta

SEQ ID NO: 378861 - DNA, 3969 bp, Cannabis indica
gggaggcttagagatggactttatcagtttgatgttccaaccactgctactaccatatcaacccaaccagtttctttcatgtttttctggtgttgttgtttcgtctgttgagtcaaatgtaacacagcctgtggctagtcaatctttctgctcaatcaaagataggtggcataggaggttaggccacccatctaatcgggttcttgatgttatcttaaacaaaatcaatgttaaaaatactaattccaaaatcagcttctgtgattcgtgtcaactgggaaaatcacactccctgccatttacaaacaatccaaatcgtgcacaaacacctcttgaattaatacacactgatatatggggtccttcacccattatgtcaaatactaacttcaggtattacatccattttatcgacgactttagtcgatatacatggatttatccactacgtgcaaaatcagaagctcttagtgcctttgtgcagtttaaaactctagtagaaaatcagcttaactgtcgaatcaaaaagattcaaaccgatttgggggggggggaagaatatcaaagttttactagatttgtgagtgaaaatgggattagttctcaacatccatgtccacacacctcccttcaaaatggtagagccgagcgcaagcatcgacacatagtcgaaatgggtctcaccctacttgctcaagcatatgtaccacaaaaattctggtgggatgccttccaaactgcagtctatttgataaatagacttcctactcctgtcctaaagcttaagacaccaatggaggttttatttggaaaacaaccagactatagcttccttaaggtctttggtgtatcatgttttccctgccttcgtgcatatcaaaaccataaatttcaattccattcaaccaagtgtgtcaacttgggatatagtgagagtcataaagggtataaatgtttatctagtacaggtagactttatatctcacgtgatgtgatattcaatgaagaggagttcccctttaggagcggtttcctaaatacacacaaacctgaagcacctgtatccattctagttcccttttggtctacaacttcaatcacaaatagcccaaatagtccaaacacaccaccaactgatacctcactccaatctcaccaaacacaaactgatggagttcatcctactcctcaagatgaacaacaacctgaaaaattaagcacacttcaggtgaatgatactgaccactttgtttcgagttttgatgatactagcaggtctggtgacgccagtacaccgagtcatgagccaagtgcagaaccaagtgccccaatgatctctgtccaaacaactccacaagtaaaagcaacacacccgatgatcacaagggccaaggctggtatcttcaagccaaaaatgtacttagctcaaaccaagtgggttggaaataaaaatgaacctagttcagtcgaggaggcactgcagcataaagcctggaataaagcaatgtggacagaatttttagctctaatcaagaatgggacatggaagctagttcctcgcagaccccacatgaatataattgattgtaagtgggtatacaaggaaaaacaaaatgctgatggttcttttcagcgaaacaaagctcggatagttgcgaaagggttcaatcaacggcctggagttgactttggagagacgttcagccccgtcatcaaagcatcatccacagtccgaattgtactcactattgttgtggcaaagagttgggaggtgagacaacttgacgttaacaacgcctttcttaatggacacattacagaagatgtttacatgagacaaccttatggttttgaggataaagacaaacctgagtatgtgtgcaagttaatcaaatccatttatgggctacgacaagccccgagagcgtggtttgataagctaaaagctactttaatcagctggaagttcaagaattccaaggcagattcttccctgttcttcttcaaatcggcatctcacatagtgttggttctcatctatgtggatgatatcattgttactggaaataactccatcatcttacagaatttcatcagaaaactcaatcagcagtttgcattgaaagaccttggaccgctacactattttttgggcattgaagtcaaccgtgactccactggtatgtatctcagccaacctaagtatatagaagagttattaagaaagatgaagatgttaaatgttaaaagctgtccaactcctatggccaatgggaaagtgttgtcaatcaaagatggagaacctttaaagaacccaacagagtataggagcattattgggggactgcaatatttaacttatactcggccagacataagttttgcaataaacaaactcagccaatttctaaaatctcccacaacagctcattggagtgcagcaaaaaggatattgagatacttaagaggaacactgcatcatggcctacatataagctactcggatagactgagtctcgttggttactcggatgctgactgggcgtgttgcccaaatgacagaaggtcgatagcaggtacttgcgtttatcttggtgataccttaaagaagcaatccgtggtttcacgctccagcacggaatctgaatatagggctctcgcccaagttgcagctgagatgtcttgggttcaaagcttgctaaaagaaatagagttcccactgccagcaagaccagtaatttggtgtgacaatttgggagctagtgccttagcctccaatccggtctaccatgctcggactaagcacatcgaactagatgtacattttgttcgagataaagtcattgagaagtccttagaagtgagatacattccttccagtgagcaaattgcagatcttcttactaaaagccttgcacacggccaatttcaatccttggtaaacaaactaggtgtggtatctaccccacttagtttgagagggaatgtaagaaatatagaggtatcagctgaagccaactcgtgtgatagtccaacaccaggaggcccaccgtacagcatcaacaatcatggcccaagaagtttggaaatgattctgttatagacaatgattgataccctgtaaaatatcttttctttgtcaatttctgtagtgtaacaaactatgagctgtcatatatacgtgtcctatttccagaatattccttgattgtaattacttttcctataaatacagtacagttgcctcagactcaattgagctaagtattcattctttcctgcattttctttcttcgttactgcttttatttttttgactggggccgggttagagttgaggtagagtttattgtaaagataatataattttacacaacctattaatacaaatcaatatcaaatatagtactttattagataatactaatacaattcaacacaaacaatatacaatacaacgtaccaaatagacatctttacgatctataaaaaacatgaattaataacttgtcttgtataatattatcgtgatttgtaatattgaatcatttaaaccagttataaatattttttgtttctttataaacaactattatttttaaatacacaaaaattaataatatcatgattatttttttatcaaatacattttttattagtatgacataagattttttttttttttcgaacaagccatatggaaatttatgttatttcatacataaaataagatcagggaagaaaacaaaagtattaacggcaacatactcattcaatttattactgagaaaattcataattattttattttttaaaaaattcggatcatcctatttaaggatcatcatatttaagtactaagataataatgtaatttttatttggaattgggataatataatttataatttataaaataatacaaagaagcatatattttaattattatttttttaggttttttttttt

SEQ ID NO: 378862 - DNA, 1879 bp, Cannabis indica
aaaagaaactagggtctctcgacatccttgctacgcccccagggactatgttccaacagcccgaaactcaaaacctaaagccttctctccctctctccctcttatcttgttctttctttggtgcatccctttacttctctcaaatgctttccaggttcaaccaccaatccccaccaccggacgatgttttacaaaccattttggatattaaaaagtaattatttttttctttgggattttattcattagagctcaaagaacagcttggtgactttagaaaatcattggttgtgatgataacgattttatgtatttgattttaagtggtgatgatttgtttatatcacaatttttctcaagctacatgtaaggattttatatttcgtgcttttgaaaagctgaacaagtcagaatttcaatcttttctatgtatactttggtgcatttgatctgaacaaaatacctgaatacatggtcatacacctaagttaattgctacatgtattattgcatttgatgcttcttatttggcaaatttcgctcaagtatgatctgggcagcaacaacaacaccagcaagttttgaatcaacaactacatttgctccaaactcagtcgcatcaacaatttttcgatcagcaacacctgcatgcatcagccttccttgttgcagcaacaagcacaacagcagcctcgagatgttgcttcttaactcaaagttctagttaagcaaaatggttggaacctcctacaggacgtctgaaactcaatactgatgcaacttttaatgtagctacgaaaacggttggtattgacactatactttgaaagtttgtgggtgcatggcatggttgctacactttcaaaatctgttagggtcattacaaagttgaagaaatgcaggctaaggttatggctttaagtttgtgatggttattagtttggagtttcaagttgattatatgaaatggattctctccttagtgttatggacttcaatctacacagcagcatttcacttcttttcattctcttgaatgctatttcacctttcgtatccaatttcccacgaggacagattccacattttaatagatctgccaatatcaaggctcacttgtttgttaggttcactcttaaggtggatacagatacagatcttatttagttggaagacactctccgtccactaataaatgttatgtaatcttttatatatttttgtaacataccttactctaaaagaaacatttaatttttcctaagaaaatagtcttaattattatttttttcaattaaaaattctatttaaataaatcatataaaaaatttatatttaaaatcagattttataaattatatagatatttttaattatagatttattaaaataatttttaaaattatctcttaactagactaatcatggagtggattcctgctaaattattgtgtctaactaattatatttagccaagtcaattaaagacataacagtatcttaactctccgttaaagcatttccagtgagaaacaacatttagaaaattgtacatttatatatctaattattgaattatttacaataaaaacaaaagtaatttgattattcaaaataccgtggaagaataccaagatacaaaattagtacatgtttgacatcataactaaaaaattgctttttgtttttaaaaacagaaaattgttttttgaaaacattttggcttgttaggccttgttttttgaaaacagatttcagaaaacaaagttacaaaaaacaagaattttgaaaacaacaaaatattgttttttctgttttaaaaaccaattcacttttagttaatattgtttttaaaaaacactaaccaaacatgacttgt

SEQ ID NO: 378863 - DNA, 8986 bp, Cannabis indica
ttgctttctaatttatgttatttaattttcataattaaaactcttttttttaattcttgtctttaatttttgaataatcaaataagtatagtcctcgtgggatcgatccttacttactattatattgaaataactagaagtattggaatcaaaataattagtaaatttgatacggcatacaacacgcatcagttatctcaaatttcgcacaagatgacgtgacacctcacaaggtaacacatggaaaatatgttaaaacctgattggagcatatctctcaaataagctgaccaaattcctcctaaagttggatttatccaagtaaagctatcctgcaattagaggtgttagtggtgcgagttgtaatatttttctcaaaccaaactgcatatgcggtttttgtaatttcttaaaccacaaccacactgcgagatcttaaaactgtaaaagctacaccacaaaaatattatatggtacagtgcgtttgagcggtttacactatcatcattatcgaacattataataaaaatttaaaaatcaatctataaaattttaacaatacaaaaaaatattattaatattttaacatcagaatatatatatactaattatcaagtcattatattgaattgtctctaaaaaaaaataatgtaatatatacttatattacatacatttgttcttatatgaaaaaaagaataaaaatcatattgtaaaaattggcaactttgtaatatatagtgccatgcggtttaaaccgcaattattaaattcaaaaccacaaactgcaccgcaccacgcggtttgaaaaaattacaaaccacaaccgtatcgtaaagaatttcaaaccacattttttactcggtgtggacaattttatgaacacccctacctgcaaccattctttgaacggagctagtatctcgtgatgtgtcgtgcaactaagcatgccaggttgaatatattgtccgtatagataaatacgatgggaaaagatcttctttagattctttctttaattgcttctacgaaaatagcaactagaatttctattcattcgagattaactcgccagatcaaaattcgtgagattaccaacctagcgttggagctagagctaattttcaactgattctaccagaatggggaatttgatttactacttctatttttcaaggacttaaatgtattatctctcccctataaatagtgaaaccattcactatgaaaggaactgctttttaagctcttaattagcgattaccctgtaaaaataattgtacactctcgaggctattaagaaatttatttgggcagaccttgtgatcttagtagttttctttaagtaatacaactaaaagagaaatatcgtgtgtcgttttattttatcgtttttactattattttattattattcttgtcgctttaattaactctatatcgttgactagaagggagatcaacaggtaaaaataaaagtttcaatgtatttttataattttttggtgtattatgtgagaatttgtatttattactcgtaatggtagtagagtagaatacccgtcaatcaccggctaattgagaagccttaattaatagatatgagggcggcaaccgtttggcttttaaagtagggaactgtacgggttaggatccgatccggacaagtctacccgtcatactcatatcccggaccctcttttcctcctctaactcttaactttctcggaagagaaagagcgagaaagagcgagaaaatttgtctatatccattacccagttcaacacctacttcctcccttctactctactcccgcccaatccctttttactatcattatgtcttcgtttttctagggctggggtttatacgaattttatgttgctcgcatcttaattctcgaatcttcgatccccaaataccctagaattctctgtagccctgaaactttcatttcaaatggaggaagagaagcgcggcggtgaatcaatatgcagggtttcgtcgtcttttttcaagtccggtgaccgtcaaatgttcacgatggagcttcgtcctggtgagactactatagtctcgtggaagaagctcatgaaggacgctaataaggtcaatgggtcttcttctactaccgttctcgagcttcctgtcaatgctcatccccgtctcgagtctcgtatcgctcctgtggcggtgagacattatgattctatatttgcgtcgttttaattgatttttgggttgttgtcaagaactgaattcgcttttattttgtttttgttaatatgttttgaatttcatgtgttgggttggtatatgttattgtagtttttcattatagttctctaccgttacgtgaaaaatgttgtgagaaaatcattggtgtgactaaccattagtttcgtttatttgaaggaccaaatttagtcagatgacgaaggctgatgatgtttatctttcttcacgtctcacactttaagtttgacatgccattaaactgaacagttcaattcaattgctacaaactagatttgtttccttggttttttgttacttatgtagtttgactatgtttgaaataactagctagaaaatttattgtgcacatttttgaagagggcaaagctgttcaacttatgctgatttacaccatatgctatttacattatgttttttgtggtcactctttaaatctataattattttgggggaaaatgagccatttggaattttctttgagttcttaattaattatgagtttaggtttatgacataatatgctatttccctttctgtgcatgctagtcaatctgtagtttgttttcttactaatgacatgtttataggttgtagctgaaaatgttaattgcatgtgttatgcataatattactgcaatattcatcaccttaaaaaagttctattccatcatataactataagcttgtttactgagctgattcatagagatttgaaaaatcaagcacaaaatgattattattcattaatttttaaattttgcttcactttaggcgcaaccggatggtgaagaagttaaagatgagactgctcccagtcgttttagtgctgttattgagaagattgaacgactttatatggtatgtaatttcattgaaaaacttgtcttgctagcaacgttttcttatatcactatttctcacatcaaaatattgtgtatgttatgctaatgcgtaatataatttatgtcaggggaaagacagtagtgacgaggaagatcacaatgacatccctgatgatgatcagtatgatacagaagactctttcatcgatgatgctgagttggttagtctacacatctattttatcacatctatattgatttttttttcttgctgcactagcaacttaatgttgtagcatatattattttaacaacaacgatctctcattttattttgtttttgcaggatgaatactttgaagttgataattcagccataaagcatggcggtttttttgttaacagaggacaattagaacgcatgtgagtttgtttaaattttctactgtgttgtgtctttcttcttctttatttaagtggttttttagtttctttgtggctatcttatcttctaaaccttaacaaacattgcagttaaaaaaaaaaccttaacaaacattgaatattcctgtttctgtatgaaggaattgttttagaaattttaaatcaatattaattgcttgaataatgaatatctaccattgttttatttttgtaagagtagaatgatataaatttagccacacgatgacacaagcactagaattttatgtagacactatctaaatatcatgcacaaaacaagctaacaatttttaggtcactataatatgtttatattttataattttttaagtaatttcagtaatttctgttgtatggatgtatagatattttttttttctaaatgatggagagaaattgattccttggtataataactagtcaatgctttcgatattttcatttggactttttttctttcttattttgttctcttttctatgaaaaagtgaatccactgcactacctagccagcaaccaaagaaaaggcgaagaaaggatttggcaaagggtaatggtgaaaatgatgatggttgtttgcaaaataaacatgcaaaaccaggcaaaatggctagtggtaagaatacatcagcacttgcaaagactttgtctaccactactcaagcagtagctgtatccggtgaagatatacaatttcagagtcagttgaattctacagtagtttgccctaagaagaaatcttcagattcaaaaacaataatagatccttctgttctgaaagtttcaaatggagatgctactatgatattagctgaggtaaaggatattgaaaagcagaagacaggatccctcttatctaaagatccaagtagcaagttcaaagaaatggctgtatcctctgattcttcacattctaaacatcatgataaaaatgtctatgtacaatccaaatcccaatctgggagaccatctagtggtgctgatgaattggattcatcaattcgtgtgagggaaaaaaatggcaaccgtgaactttctgatgttaacacctttgagggaaagtactctgcaccaacaactgttagtatttcttgttctcaatctctttgttaatttccattgttaaagtaatgtgtagttcaaaccattgattctgtacatcagatggagtcatcaaataggttgcaagatactgcaactctgaacatcaattaggttattaacaacctgtgtttcatcaaaagattacattctataggttgcaagatattgcaactctgaacatttagcgcttgtgaagatgtaatagacatagtttgttagtcttctgtcattgttgttgaacaactaattttccttcccttccatttataacaaatggtaagcattgtaataagcatctcaagtcaaatcagtcacataatatgtgagaagctgcctgtaccatggaattaaaaactgttaaacgtgggcttgaattgcttgtaaccagccacacagccatatatttgcttcaaccttagtcttctggcttgttcctattttcttatggcttcttggtaagatgtacgtttccgaaagcagtttagtttatcgggataaataaagcattatttcttggtgttatctgagagtgagttgagtgccacagagagggaagatagcttcctttatccccataattctctatgtattactatttggaatgtgtctgagtgtatttgaggatgagcagataagttaattattgtggaaaatttgaaggttcttgttatgatctctgtatttcatggttttacagaaatctatgacaattgtctcatctcatatgttttatctatgatgcttgatgaatcttttaattttgaatttattgatgcagaaaacaccgcacatgcacaaaaaggatggttctaatgcaaggccgaaaggttcaatacttgaaaaggctataagggagttagagaaaatggttgcagaatgtaagtgttaatgttctcccaacatttatttttattttgatggtatattgggctagttattttaggatgatatttcttctggactagtatttatgtacaatattacagcaaggccgcctaatgtggaaaatcaagaggcagataattcgtcacaggctattaaaaggagattgcctagagaaataaaaatgaagcttgccaaagttgcgagattagcggtacttcagaaaacttgactgaaattgcacaattgagttcttctatacttcaataaattttaacattcctaaatgagactctcatagtggtcctacactttttaaaaatttctaaaggaatttgcattttcatgcagcaggctagccatggaaaagtttcgaaagaactactcaaccgccttatgagtattcttggtcacttaattcaactgagaacattgaaggtatgaaagtatcattaagatgtacttaactgccttatgagtataatgggctgcttactttcaattgactagtattttcttagggctgcaattattatgtcacttatctttcggtaatgtaattttgctgcagagaaatttgaaagtcatgattagcatgggtttgtcagctaaacaggagacaaatgataggtttcaacgtgtaaagaaggaagtcatagagatgcttaaagtgcgagcaccctctatggagtcaaaggtatgatttctacttgttaaaagtgctacatcatttatttttgttctcttttctagtttttacttcttctagatatgagaaacctttcacaattcttatcaaaagctaactctagaaagttgactttgtatacataatatgtatttcaggccttggagaaacaagctggagcatcagacgattttcaagaaattcctactgaacaaaaagaagtttctaaaagaaagtatagtatggatgctgcattggaggacaagatctgtgatctctatgacctttatgttgatgtactgttatgtgcttgcaatgcttgctctgatattctctcttttggaacttcttgttgttatatgttattctttgatctttattggtttgatggtttcagggtctggatgatgacgcaggtcctcaagtaagaaggctgtacgcagaggtatttcctcgatgtttttttttcttttaatttgttttacttagggcttttgagcacttcctaagctgtttgatcattaaagcagcctaatctattcttttgtttctgaatggtttgcttttgaattcccaaatacaaattttaggatcctatgcttctttattcttcttccccttttatacatctcgtcccctctatttatttaaagtagattttggaagctctcaattttacccaggaaaagctacgtcacacactctagttaattttcatgaatgtggtgctataaaacttttctttccattttttgtaaaggttatctgtgtgaagagctttgtatcaaacttctgtggttagtcaaacttctttcaacatcatggagctttcataacatgtccaatctcatgtaaatacagcttgcagaattatggcctaatggtttcatggacaaccatgggatcaagcgtgcaatatgccgggcaaaagagaggcgaagagaactatatggcaggaaaaaggtatgttcctatcctgtacacattgagtgtgtagcatgctgtgtccttttttgcggagttaattcttgctagaagcattttttttttcttttgccctttctgatcttgacacatttagaagtcctatttttaatacaatgaatcccattgtatttatatgttatgtattcgtctgcatttcttgacaatataaggtcttaaatttatttccaagttcctagttcctacccatttgaagtcttttctgttaaatggtttgcatggtaatttaagacttctacaacttaaaagaaaaagagaaaaaggaaaaaactgttgcaggtaataaattttccgtgacagctaaattcttgcttgaaaggagtgtttgtttttgttaacaggaaccttagtagggaaagaaattagtttgttttctagtacaactgattaattctagtttcttgtatcttttgtaataatatctttgttcaggatcaggagaaaatgaagaggaaaaagatgttagcctctaaaactgaggagggtgttcgagttgagggtggttccattttgcagcctcaatacacacgagaaagttcggctactttatctggtggtcattgttcagcaaacaagtcagttcctgcttcaacagtggtcatgcagccacccagtccaataaatgttcagagcttcgacaaggttaaacaagaaaagttcaagggaacttcaagccactccccagaagatgctagggtgggagacagtatagtggtgacaaagaagaaggtgagaagaaagccagaagtagagttggatgaaactcatctccggtcagaggaaagacagaagtcgcttaaacaatccgcaactccaccacttaaaccaaaccttcagtccacggccctctcaagcctcgaacaatcaagctgacatgatattatttccacacttagaaaagtaattttcatcatcaaagctcttgtaagaaagtcttcatttttttttgtttcagtagttctctcatgggttggcttcattcttttgtgaccaacttcttgttaccatttttgtaattaagtgtcgtttcttgctaccttttctatggcttagatgtatgcgtttatatagagttatcagaaagctgtactgtaattccttaatgcctggtgcagttttataaactcttcacttaacatgtttctttcttcattggtggtcacatctttcattaaagtaaagttgtgcctttttcattttattattattatttcaaaaaatccatagttccttggtaaaagaaagttttgaggatagatttcctacttggtttagatagtaatgtccttacatcaagatccactaatgaagcttttgttaagatctttttttttggttgtataaatgtataagtaagatttgtataaatgtctattttaaaattaagatattgttttgatagtgaaatgtgaaagtgtgaagttgcactcctatacgagaaagttaaaatatatttggtgtctaaaattaaaatgtatatatttgagacatgtttggtattttaaaataaagtgtaatttagatatgttttatccatagtgtttaattttgatatgtttggtatcaaaattagtgaaatttgagttgtgtaaaaattaatcttttatgattaaattttcaaagcttaagtacttaaggaagaaagtgattacaaagtgaacactatattttggcatgattcacgtataatcaatagtgagaggttataacaaattgtttaatttccgtacaagattaaag

SEQ ID NO: 378864 - DNA, 4619 bp, Cannabis indica
tgaccaataaatttggatgtgtagtactattagatgaaggtaaaaatgaatatggccgaggtagccaaggatctttaaataccaatatagagtctcctgttcctactctttttcgaataccttttttaaggagagatcggccccaaataatactacgtcatatataactaggggattttccaactgcaaatatattcaaaatgaccacaatttaaataaagtaataataaagaacctcacgagttaaattgataaaaaagtaaccaactatactaaaaaatagtattagttaaccacttagacaaatgaagaaattaaagactaccacaataattaaacctttacttatatttacaatctttttttgataaaattaaagggcaacatgagaacactaaatgtaaagataagatttgatctaataacactaatattttgttggataaagaattttagtccgattcgacgtaaaaccatttgagtaaatataatcaccttagatttagtttgtgctaaaagttaatattaaagaaataaatcacaaacctaaagcatccaaaaaggtagtataatgataatatttagctttataaattcgagttggtaaagtattcggacaagtaagaatcttctaagcttgagtagctaacatggcttgattgtgaaagacagaagaacgaaaatctaaaccacccttttgctttggaaagcataatttataccaggccaaccaatgtaccttttgtttgttcactaaattagtccaccaatatcttgccattaacccttccaactcttcacaagttttcaatggtaactgaaaacaggacatcacgtaggtgggaatagattgaataactgcttttaataatacctctttcccgccataagagaaaatcttattgttccaagaatttagacgagtccaaactttctctttaacgtcattaaataatcttcgttaattttgaccacttagcatcagcaatcccaaatacttctcaatggcttccgtaacttgcatatgaaaagttgcagtatacaaagatttaatatcatctgatgtatttggtgagaaatacatagtagatttattataatttattagctgcaaaaaaacagaaataaagttacataaaacaacatagaaaatgaaagaaaatatttattaagagtatagaagcaatgtaaataatgtagtttcagttatacattaactaagtcataataagagtctctcaaacctttattttaataagaatatatcatttaataactagtagattaattaaaaaattgtgaacaaaggaaaaataatattaattataaaaccatagaacatatggttaaaactaatacactttcatagaatcggcttaaatgacaatataagtttccccaacactttttattgtaagggcataacctttttgacacctaattaatcattagtaatagaataattaaatggaataaacacctgaccagaagctttagaatatgaattaaaaagctcaagcagtgaagaacaagaccgagaagaagcacgacagaaaagaatactatcatctacgaaaaaaagatgagtgatcggcaaggttgaccgagctattttgtagccaattatctctctattcctttcttcctggcataatagggccgaaaagccttccgcacaaaaaagaaaaagatatggtaaaagtggatctcattgacgtaatcctctagttggtgtaaccattcttttaacttcgccatttaagtttaaagaataatgaacaatacgaacacatttcatgagtaagctcacccactgatgagaaaaccctaaggtgagcatcattgattctaaataatcccacctaagtctatcataggctttgctcatatctaagtttattacaacataacatctcttccctttattcatagcccttaagttatgtaataactcatatgcaaccattgcattatctgggatacatctacctccaatgaaagtactttgagaaaaatgtatgatatcatttaaccacggtttcaatcgttgaaccaatattgttgataaaatctataaaggacattacatgaacttataggcctgaaatcactcacttttttttgcagatttaattttagggataagagtcaccacagtggaatttatagtggataaatcagacgtaccatttaaatattctagcacagcttgggtgactaagtctcctacttcactccagtgggtctgataaaacatagcattcataccatcctctcccgaagatttatctgccgtcatagaaaagacaaacctcttgaaattcatcaatagagaaaggaagtaataacgatctattcatatcatcagtaactcgaatggtatagctgaaactacagccccattttctgcatctgttggaaacggtgtcatgaacaaggtagtataattactctcaatatatttagtacctctaaggaatcagtacaccaaactccattataattaagaagacctatcaaaacaaagttagagaaagattagaattcaattaattaactttaatcacttaaaggaagatcataagtaaacaaattatttttcaagaatgccaaaatatctaagcagtcacaatttgaaaatacaaattacaagatatcatactaaaatcatgaacctagtatcaaaatataatgactaaactaagtaatggacattagctcatattaaccctagtatcagattataatgacaaaactaatattagctcttgttagaccatagtatcagattgtggtggcaacaataaattatggcctaagcttaaatatatatcgttaaaaatatagaacaagccatcattaagaaactatgaataagagcataaatagaagaatgaataagaaaattactttatatcaaaaaaagaaaattagaagaaataattatagagctttcttatgggcatgggtttttgtggagggccacgccaccactccttttgtggaaaatgtacttttaagaataattaattttatgaaaattatggatgatatgagattaatgagtctggataaatttttactattgtcaaattaaatcacaatatgtagtttatatatcttagaggaaattacactatatatatctttgaccttgatgcatttaatttttattttctctttcaatataaaacaagccatcatttagaaactaagaataagagcataaatagaagaatgaagggaaatcaaataaagatagacataaaagtgaaaaaaaatacatttaatgatattattttgaactctagtactagcatatcgataaaaaaaactttgtattttgatccccagcttttaatcattgaacacgtgatcattgtttccaaaagagttcttctttttccaataacttagacaattgggattctaattgagacactttcgcctaattataaacacgataatccacattttgagcgtctgagagcttccgttttgttctgcagatatcattaggtagtgtatggtatttttcaagatgtcatgagctgagtttttgtgaacaggaggagatgtttgaaattatgacatctaaggcagaagagtcagcagaatgcttccatgaaccagcaaaaatctgatggcattcaggatcctctttccacaaggcttcataatggaatcgcttacgtttgttctacaatgccctttgagggtcatatgttgttcctaaatccaaactaagtggtcggtgattagagccaaagaaatgtaagtggctaagtttgcaaacggaaaacaagtattccattccgagttaaccatagcccagtccaatcattcttgtatagtactagagttagtattatattttcatgtatatcgttcaccagaaaaatccaaggggaatagtgcacaatcttctattgcacgtttaaaattttccatttgagactcccttcaaaggaggccaccaactttatcgtcttggttcaaaatttctaagtaaatcccaagagaagtgtctatttgttacttttgggtctccataaaattcactaaaataaaatgatgaagtaactgtagatagagatagccaacaattaatatgatgtgattggattcaatatgtgatatttccatagaagaatcccacaaaagtataagccctccactaagaccgttactaggaacttcatgatcattagaaaatgagaaattttgacatatggacggacaagaaccctttttcagcccagtttctaacaaaaataaaatatttggacgacaatctttaagaaggagatttagataccgtttcctctccttgttctttaaacctttaatattccaaggttgtataatcatgggttgaaaaatgttgggaattattttaccaggatcttagatctactcacaagtatgttgtttaaacaccctaatttgaagatatctttttaaagttaatatttgaaaagatattaaccaaaaaatatctaaaatattccattttaagttaatatttgaaaagatattaacttaaaaaatatcttaagaatctttaataactaatgcctaagattcctcaacttgatttaaaatttaaatcaaatatt

SEQ ID NO: 378865 - DNA, 1764 bp, Cannabis indica
accttcaacaatgaagatatcttgaaatcagatactgctttctaagtagcataagtaaacaaagtgagatacgagatggggagacaggagaaaattacctgctccacgggtgctgaagatgttgcctcagttaaagataagtctgtcatctttgggattgaattgatagcattgtcatgatcaatcacttcttttggtggtggaagtaggctagcgcgctgaccacttgagtgttcgttactgcacaagaaaaaattgttttgcaacatttcagaaatttgcacagtagaaagtacagctagaaatatttaagcttcactgcttgagcttactaagcaatatctaagctttgagtggctctgtattgtattggaatttccatgagggcagcaagtgcaaaagctgtttccttctttgatggttctgtgttctccgacatgattttattgaagtttacaaactgcagggaagattcaaaacatcagatttttctttaaatggaaatacagaaaatgtttaaaggagattttaagagctgggaaaagcacatatcatataatggattgtgaaaaattaacaaaaaatttaatataaaaaaagaaacctaaagagaagctgtaagtacaataatgacctgaaaattgtcaaatgagcgctgaggaatgttatcatcaaattgttgcattgcgtcccaaggtccatcccccacaccgatcaaaatgattgaaagaggatattggctgtttagaatacattagtgatgtgtcaccaaacattgaaacttcagtattacccaatttactcacatatcatagctttacctagcagcgacaatggaattgacagttgcttgttcttgtggacttaaccttccaggtggtatatcaggattccgagtgacctatatttacagacacaaactgaagctttcaataatcaaaaactataatgatgcataagaaaatataaaaaaaccacaccaacatgatcaatatgaaaaattaggatctgaaaaaataataacctgtccatctgcaattatgacaaggacatgatattgaccattgcttctgttgacaatgtcaatcgcagcatcaattataggcgcaaatgaagttggacctaaggtcaaggacatgaaatattcagctaattctggattgaaaaatgaaaaaccatttttcatcatggttttttcaagctagaccattttctgaattgtgaaaggttagttcaacaattatcatgtcagaaatcaagtatctattagtattcttacagtttcttcctgttgaaggaaagtgcataaaatataagaaaaacaaaatttgccaaaacctgacaagtttagtaggggaacaatctctctgtatcttctgagaacatcttcaaaaccgctgcaaggtcgatggtcagaataaaaactgaacacttgtttatcatgtgttgatgctgcaggagaaaagtttgacaaattactgatccataaaagaatgggtaaattgcggcataaatacctaatgtttccgatttcatacacttaaataactaatgtttatttttggtggcaaaaatacctaatgttacaattctcttacacctttactaccacttccgttattaactcataaataaggacacgtagagagcccaaatgcattacatttatttattttattttaaaatttaatattattaatataaaaaagtaaatattacttgtttttttaaaaaaataagtgagatgcaatactaaattaccat

SEQ ID NO: 378866 - DNA, 1963 bp, Cannabis indica
acgaattttaaattttctaatcgaattcattccgcacaaatacaaatatttacactttatgaattgaattagactgaatgggacatattagattagatattgtataaacatccctatttctaacactatatatgtgcataaatgtccattcaaatataatcatattatataaaacactttatttaaatataattgactgtggattatgtcatgaataattttgaatgaaactaaaataaaataattacacaatccaaatttagaaatttcacaacaaataaagcaaacgaagattttatttttaattagattctagttttcattcatattagggagttactaaataataaaatctcttcatcaattttctttaataaaaagacagcttcgatattttggaaagaaagaaaaaaaaaacaataattcaacttgttggtggacaatgacatttcaaattaaaaatttaataacagatgaccctaaaaattggtcaaaataataattatattctgtgaataatttctaaaaaacgacggcgtatcatcctcactttccagaaattgcaagccccaaagcttccaagcaacgggttatcatagttgtctgctccgttcactacatgcgcattttagcactctacacaaacgcaggaagcgcgtcgaacgatttccggcagatccgcagccctcctccattctccggcaacggtatcgtacaccaataccaacccctccttcattccacggccaccccgtccactcctcctcagcaggtcatcgatgcagccggagacctgaaccaacacaaccttgtctccgaccccggcgcagcagaacctcactgtgctgtccacactaatctgcgctggcaatggcggacactttatcctacaccactcgccgaaaccaccgcctgaaccggctacggcttttcggcgtgcgtcgaatctccaaaacgtgagctccacggcgtggctggcgagtacgtagatatgtcctgctgcagcgcaagccgctacaacgcagccgcctccaggaacggctcggcttctgagccacgcacgcgcttccacatcgtataaatccatggaactagcatagacgtgagcttcaatagaagcggcgcgtaattgatcgtttcccgatgcgcccaatttcaaacccccaatcacgtagaaaactccatcaaccgatgccccaatgcatccgtaacggctcctggacgagtgagcaaccacgcgccacttatcttcatcgggatcgtactcttccacagccgtcgttctcggaccaccaccagcgacgtagatcttacccgagacagccgcggcggcaaatttcttccgcgagatcatcatcggagacctggcagtgaccgtaccagtccacgtgtcgtaacgtagagtcgcattccgaccgacgatgtagattctcggtccaacggcggagaggcgcgcgtgggaggggaatccttggttaccaagagtcgaaactacgttatcggggagaaaagctgaaactttccatgggctttcagtgttgttattgtcggtttggtctgggtgaaaacgtaaggtggcagcgaagagggcggagtcggcggcggagagagcgaagagggtgtggcggagaaggccgtgattgcggcggagatcggagaagataggggagaggaggagacgagtccagcggcggcagacgagggagagattgggtatggaagagggtgggacacgagagaggcaatcgatgaggatgtcgtctgggagtgaagagatattggaagagaggcagttgttgttattgttggtaatggaagatgaggattttggggcgacggcgtaaacgacagtggtggagttgtcgtttggattggggtagcaagatttcattagccatgaaaagtggcgagaattgcagctatctgacatggggtttcagtttgagattagagagagagagag

SEQ ID NO: 378867 - DNA, 1404 bp, Cannabis indica
aaactattaagacttttttcataaaatagaaagacatcacaaattagtaagaaatgaataatatatactacaaattaaaatatagagtatgatatagaataattatttctccaaatgtcaaatattgagagatagggaaaaaagtagtccctactatagaacttttctatatttttatttttgattgatttataaattatctttgaatacataagaatatttttccttatttttatttgttaaaagaaaaaaaaaaggttcttaaagtttagacaaaagtggtgccctactatagaattttctaaatttttatatttttaatttaatttttaaattatttttacatacataaaaattttagattttttaaaaattaaaaagaatatcagagttcagactttcttcatagaaaaacatcacaaattagtgaaaaatcgaataatataattttctctaaatgtcaaacataaaaattatatttagtatgggatccttaaaccctaaactctaaatcttatacttgagttctttgaactgttctgccattcatataaatgatgatatactataaacatgactctctcttgacataattttttaaagttttttaattttaaaaacaataaaataaaaataaatcttttgtttttaaaattttatttttaaaaaataaaaaatatgttctatagctaattttatttttaaattttaaaattagaacacaacactctgttcgcgctgagtgttggggaaagattagaaaaatttataggaccgaatttcaagaggtggcagcaaaagatgttcatttatttgactacaatgattcttgcaaaattagccactgatgacaaatcatagctcaaagaagataagaaagacaccaaagtcatcaatgttgctaaaacttgaaacaaacctaaatttttttctcgtaattatattataaatagcttagacaatgtatgaagtgtatcataaaaggaatacgattaaaaaattgtagaagtctttggattgaaactataaaattgaaggtgctagctctaataaatttatggttggtcgattctttaattttaaaattgtaacgtccccgtttcaagtttctagtggaccttcccccaatgcttatacacgagtacgttactcttggctacttcatgaaatgacgactgatcttgcagaataacacgagtctttccagcatgctttgtccttactcgcctgcttcttaaaaaaatttcccaagaggtcaaccatccagaaattaccccaagtcaagcatactgaactttaaagtcctttcatgatgggctactaaaaagaagatatatcttgttgatatagatagtatcaatcaatctatttaaatccttttaaactgtgtagtctcatacctac

SEQ ID NO: 378868 - DNA, 5925 bp, Cannabis indica
tatgtttttgtgaaataatttcatgaaaaagtgattgaagtagccgacccatttactgacgagggtatcagacaaagtacatgttttaatttattttggctctctttctactcttagcttaggatcgctctactatgataatttttcttttggaagaatgaactttcatatctcttctatgtattattattaatatattattattattttcaattaaatatcgtactcagttacctaatatccaaacaatattgtaaacattttcctgtaaaaaacaataaaaccattttttttttataaaaaattgaccaaacgctcatgtttacacaattttttttctttttctgaaagcaatgaacaattaataaaacttaatttcaataaaaaattatgttcattgttaaaaaagaaaggtagatccataaaaaatcaaaaaaaaaaaaaaaaaagactaatgtccccacacaacatcactgataatttatataggacgtttcgaaacgaccccacaacagagcttcctaaacgcgccacgtgtacgttgcattcgtttctccctgtaatgagtagttattacaaatatttttttttcttttttttgtctttctgtattctcttctttttctttttctttttctttcctttttattgctttgttggattataccttcccctttggctgttcctctcctctttaatcctttttccactctgtgttttttcttcctacctttacttaacttcctttaaatatccaacacaatcccaatgcgctagattagagatagaagaaggagagcattttccaaacaaccccacctccaaatttctccttaaatcattcgcatttccatttctcttctgagcttcatcgatcctcaatggcggatcatcgccggacccgatccgctacttcgagcagtgacatttctgtatctctagacgcagaaagctttactactgatgcaaatgccagaggtttttctacgattttgaattctaaatttttgaatatgtttcgataacgtaatcgcaacgttattggcaagattgtatttatcttgaactatcttgttttaaattcaggaattaatgacataaaattatctggagagagcacggcaggggaaggatcagcgccaggagaagtagattcgcattcgacttcaagttcgagttcgaattcgaatttgaatcacaatccgctggaccagcttcaaccggccaaattaacacagaatcgctctttggctgccttagcaactaaactttttgacgacaagatttcattcaagaagaaggtttttccattttcttctcctctatccatttccgtaaccaataaatacatatatttatctatatgtcttaacttatttgtttttcattaaactaagttatgtagctgtaatagtgttttaaaaagactaagttttatttatatttatatcattattatttatgcatttgaagaacaataccatcattcatgttatatatttgacgttttctttttatttccagttgaaatgggtaagaagagtggctactgttacacatgatggtgctgtaaggttcgatgttccgggagatattaaaccacatagtcttgatcttgaaactggagtcgtttataatggtactggagatgaagaacatgttgaggcaccagaagacaaacatgtgcctccattgcaaattgttatgcttattgttggaacaagaggagatgtgcaaccctttattgctattggaaaacggctgcaggttatacatagaatatttacatatgtatattatatctttatttatattagcttattagtggaatatagttctgttagcgaatgtaataggagacccgaaggccaatattatgggactagacatttttttcttagctccctaaatctatgatatgctgaaatcttctcttcttactgaaaaataggttgatagttattacgtaaattgggagcctgtgatttattgtgtgctagcctaatgagtgtatctatttacttgcaggaagatgggcatagagttaggctggcaactcatgcaaattttgaagattttgttcttactgctggactggaattctatcctttagggggagatccaaaagttcttgctggttgtaagtatgttaatcccgttgaagattttctttttgatgtcagcttgttttgttggcaataacacattatgaacttgtaactttctgtggtacatttcatagtttgttcaaccttatttcttcttcgtgaaattataaattgacatttatatatttatacaatatatgtggatgtcctcttcctgcgtatattttcttttgtctttatattttacttctctattttaattaattattttaacgatataagagaatgattttttttatatttatctcttatatgcataattatgttcacgagcagatgcataaggcatgtgctttaatgctagactagtgtgatctattatattatatatgcttggaatagttttctgttctgtgttctgataccttttcaacgatttatagttataaagttgaagagatcagtcaggaaacgtaaattcttgttttgtcatgattagccttttaatatccacaatttttttttattagtccagccggttgagaacttagatttgattgaaaattattattaccacttttacgtatgtctggttgatatgtaatcttctcaattgccacttcacatatcatctgaatcttttttgcagatatggtgaagaacaaaggattcctgccgtccggaccctcagacataccaattcagcgaaatcaaatgaaggatattatattttctttgctccctgcatgcaaggaagatgatcctaaaaccaatattccatttaaagtagatgcaataattgccaatcccccagcatatggttagattccacatttattttcacgttttagtactgcagccttttaaatagaattactgtagtatgtcttaaccttgcagctggttagggaatgggaactatggatgcattcttagcagtttttcaacttgtattttgcttgttcaggacatacacatgttgctgaggcgctaaaagtaccaattcatatatttttcaccatgccatggacgtaagtcttgttttctgagataaaattttcagatggttggtttatttttagaatgaatcctatgattaaaagatagttactgaattacgtaaaattcctgaagcgggatatatttatatgtgttttgtaatttatatggttttgactttgttaacatattatcaatttactttaggattgcataacaaaagtttattcttttttcagccctactagtgaatttccacatcctctatcacgtgttaagcaacaaattggatatagagtatgtctcatacactaattattttctttctcaaatctcatctacgctagattttcttaaaagaatcctctcatttttaagttttgaaattttacaatcacttttcatgttgtttgcagctatcatatcaaatagttgatgcattgatttggctaggaatacgagacatgataaatgaatttaggaagaaaacgctgaagctgagacctataacgtatttaagtggaacctctagttctcccaatgacatcccatatgggtatatatggagtcctcatcttgttcccaaacccaaaggtcatatgcgcatatcttcattactttaaagcatcttgaataacatgatatgtcacgaaaggcctagttttgttaagagtcaaatctgacagctgctgcttcttctggaaggatatataacacaatcttgtataaaatacttgttatgcagattgggggcctaatattgacgtggttggattctgctttcttgaccttgcttcaagttatgaaccaccggattcacttgtgaagtggcttgaagctggggaaaagcccatatacattggatttggtagtcttgtaagtttagttccatttaacttcatttatttaggacatacaattttttgtaagttacaatctaaactactgtcaacatttttgtgttatctgatattcaatacttgtttgtaacagcctgttgaagagccagagaaaatgaccaagattatagttcaagctctggaaataactgaacaaagaggcatcattaacaaaggttggggtggccttgggaattgtaagtttcatttctttccccttctataataataaatatcttatatgtacgcatcattgtatgtgaactttgtgtgtaaagaaagtaaagcatcacccttttcttaaagtcccttagcaagcaaggcactgaatgttttttctatgttttcccatctcattagtggaagaaccaaaagaatctgtgtacttattggacaattgcccgcacgattggttatttcctcgttgctcttccgtggtaatgttttcccattaacagatgtcgtttccttgttttactttttgttttgtttggctcctaataaggggcaatacttttcaggtacatcatggcggtgcaggaacaactgcagctggtctaaaagctgcggtagtagattctttctagtgatttttttgttgtattatttgccgactaaattttattgatgattttcaaaatcatttatcaagcaagcaatttacataatgagtattgaaaacagttctgggcactcttgttatttatttcatcagctaatttcaggtcatattttggctgttattttagtgtccaacaacaatagtaccgttctttggagaccagccattttggggggagagagtacatgctagaggagttggtcctgctcccatcccagttgaggaattcacgcttgataagctggttgatgccatacgttgcatgctagatcccaaggtaagaagctaataaggcccataagatggaccataacgtagacctttctgttataaatttttgattgttgagttggttgtgtgaccatatggaaattcaggtgaaagagcaggctgttgaaattgccaaggccatggaaaatgaggatggtgtggcgggggctgtcagagctttctacaagcaatacagaccaccaatgagtaatagtgaagccttgtcgcatcatcggaagagattttcagttaggcaatgttttggtttgtcgtgctcttgagattataatcaatacacctcaaggaatggtctttgctttcagtttcccatcaccaatgtaaattttgcttattattgtaattgtccttttgctgcagtaagtattctgtttattctccaatcaaaatcgtacgtttcttgttgattagaaagtcttttcacataattatctcgggcctattacatttacactagagttttgtgcaccttgtctattgtaaaggtaaaaaacataacatataaagttttggaagttaaatcctgtttttttttttagttaatattaacacgaacagtttgtgtatatttatctacacatgacacatttatactaatcaaactaatataatcaacaccttagcaccgccattttcttcaactgctttatttttctgctttggaaaaatggagtatgataatgatatacatgatacttactaagagcacttaaacctttttgcaagagtttctatatacactatattaattcagtggttgtttaacaatcatcttcgacgatgccgttctgcattctcgccacctttgccgaagccattaggggtgttcatccgatccaatccgcaattttttggtcaaacaacatccaatccgcactaagtgcggattttatattttggatccaatccgatccgcataagagtttaaatccaatccaatccgcaatattgcggtattggatcggttgttttggatcggtattttttttaataataaattatttaatat

SEQ ID NO: 378869 - DNA, 2426 bp, Cannabis indica
ctctctctctctctctgtgtattgaaatgtttaagctttggtttagatttggtaaaagtttgggttttgggggaaaaaaattcagttgattggggtaacctagctgttgtttgaatatgaggtttttgagctctttaaagttgagcaaaatttgttgttgtaaacataattttgaagaacccctttgagttgtttgatgtggttcttaaaaattaatcctttatttttatttgtgtggatcttgagataacatgtggaaaatcttttgtgtgtatatataattgatgtgggggctttatgtattacaacctttacaatcccatgtgagaaatgggacttgtttttaaagaaatgatggtcaatttgtatggaagtttccttgttagatgtattcaagtagttctatgctaataataggatcttaggtgttttggcagcatgtgaaagattaacacttattcaagtttatggtgcatgaggctagttcttcaagtgggttggctactatgctattttgaggttagctcatgtgattaggtgagattaaagtgtccattcttcatgaatgtgtactttaaggtggtgtttggttcggaaaaatgaaaacataagaatagaaataggagttggaatagaatggaatcgaaatgatctttccttccatttcagaatggaatagttattctgctaaaatgatggaaaaatcattctaatactttataatgtaaccaaataaagaaatgaataaaaattatttctattccattttattatctccaactaaacaccgctataaggatcccatgggatctacttagtgattttgcttgatttaacttcataataaggttttatgagaggatgccattacaaagaaagttcaagaaattgatagatggttcttaattgtaaaacagaagaatatgaatattttctagacttgtgactgacttgggttgtgtttcaatcaatctgagctaggtctttaattgtagactagtttttttaatctaccttattctctactaactcgaaaaagttaagattcttttttccttttacgcgttttagttagattctttatctataaattcaacaatattgacacttaagaagggtagctcaaatagttaggtatgtgataatgttctcagagattcgagtctctacttttctggtgcccaaatattgtaggattaagcaggaaaattagtttcatatatgggttttgttgaaaacattacacatagtaattgaatgagcatgttgatgattgcatatgttccattttatctctttagaacttgtaaacttcgtatcatagttgaactttttgcttttcaattatgatttgttaaaaatgcaaactttattggtcaagtgaattggctcactcataggatagtttagttactagttagttattcagttaagtgttctttagttagttaagttagttgcattatttcctaatcatttcaaggaatcgaatgccataacttttcggttatgacttataaattttgaactcactctgttctttccccaacaggcaagattagtaaagcaagctgattacacctattgtgtttatgacaaagatatcgcgactggtttaggcgttggggcgtttttgttcttgttgataagtcaaatcattataatggtagtaacccgatgcttgtgttgtgggaaggcattaagaccgagcggttcaagggcttgggccattgttctgttcatttctagctggtatagttcaacttctaatcatatcagttcaatcaaatcactctttagctcgaattctaacaactcgaatacaacatttcaggatattcttcgtcattgcagtatcgtgtttgctctcggcttcagtgtcaaacgcggttcacaccaagtataggagatcgttgtcgtgtaaggtagtgaggaaaggtttctttggagcaggagctgcatttgttgtgcttacaggtatagcgaccgagctcttttatgttagtttttctagggcgaacgacggttatgcaacttatgctagggacaccggtgttagaatggggaatctgtagttgaaaatttctcatgaagatgtaaaagaaaatgggatttgaagaaacatatttgtgtagtttttctttatggaaagacaaggatagagttatgtgattattgataaatattattgtatgagtttcacttatggaaagttatattagatgaaagtttctcttgtgtgtgttctttcaatttggatcaaccattaaaaaggagagaactttactattactactaatcgaaattcagtatgtataatcgattataaaggagtagattttgttcgaacaggcctcgtcccgtcttcactggatttgttacctcgagttctctagaaaaaaagggaatttttcggtttgttacct

SEQ ID NO: 378870 - DNA, 2139 bp, Cannabis indica
tcatttaagatttattttcaaaatatgtagagataatataccctctgagccataaagaatgcttgctaagcttccgttactcatgaactggtacaataacatgcgttgtcctttatctacacaatatcctactagatttacaagattgcgatgatggagtcttccaagcaaagatacctgaaacagatttataaaataaaaaattatgaataactccaaattgtccgttggagtcttggcgaatcacactaaaacagataaacacttttcaaatggaagactacaatttatctcaaccctcaagacaaatgtagtctgccctgaaacctaattaaagtagtcacttaaaagaaatacacaacatatatatgtcagagtaaggtcctctgatttcttggcactaataaccatttggtgtttggaagaactggtgatatataacttctacactcctgagaaaaaaattaggcagataatttcccataaaattcataatactattactatcaatgatattgatattgacattgatactcttttctttttacttgacaatgccatcctgaggaaatatacaacctttgggacatatggttaggtatgtatccttactcagaatttcttcagttttcagtttatttggaaaatttcttcaaggcaaaagagaaaaaaaattatgtttggtcatacaattcaggtgaaaatgaaattattaggaactatattgaacatgaatgcataaacagaactctgttattcctaagatgtcttgacatgttgttgttggataatcccttacctcagtttggaattctctttccccctgtttagaatcagaagcaagcaccttcacagctattatctctccagtagccattgttgctttatacacaggaccgaatgaaccttgtcccaaaatagtggtgaaattttctgtagctctttgtatatccctgtaaaatatagtatatacatccataaaatttgatagaccctatatatagattgtgtgaagttagtaatttttaaaatttgaatttatctgttaactctctttaaatctgaaccaattacattctatctgagcaatcaatgcctgatagttcattccaatggaaataaatgtttgacaaatgaagaattaagaattcctacagcatgaaacatcaacactccaaactaatgaaaagtaaagagctttacatacttgtaagagtatctaagcaagcctgacacagaagcaattcgatctttgttttgatgattccaggaaaagagactatttttgggaaggctttctgatccttgattcactacagaatttgaaagagaagcactgaagtcagtacttgtccctaagccatttgttcttataggaagagttgtgggactacgttcatttgcacatcgtcgaagatgagcatgtttcttgtaccaacgcaagccccaaaataagagcgaagctattaaaataccaagagctacaccaacagagattccaatgacaaccagatccgctttatgaaccattctttggtctctttggaagttcaggcaatgagaacattttgcgaggcaaattcccacaggttctctatcataaacaacacacaatttagataaaacagccataacaaaaattaaagaataacttgatgatcatcaggtaaacttctctgctccatgatcataaaatggcaagcatatagttaaacgaaccaagaagtgaaatgtaacaattatttgttttacacttgtcctcttgcagaatcttagagcatttcagagatgggaaactataggaacttgcatgacaagtctccacgaggaatcaaatccaaaacatgggagcaaccatggtttgaccactcaacacttaaccattaagtgtaagtaattatgccttcaagttcaacataaagactcaagaatctgtgctttcttactacaaaagtattatctatattcctcacgccctcatttaatacgaaaatcaatctacatctcgataaatatcaatcagattatttacaaaaagtcagaatacaaatctaccagaaaggaaaaggaaaacataaaagcaaaagattcaagtgtccatgatcaatcatctaaatccatatgaagactaatacaata

SEQ ID NO: 378871 - DNA, 3095 bp, Cannabis indica
aaaaaaaaaaatctaaaaaaatgaccaattttaagtgtgttgtgtatatttctctctaatttatatgttatgatatagtatctaactattaattaaaaataatgcaggaacttacagccatttaagactagacaaatctcctaagctgcttggtatggtccctgtgagttgattattcgataaatcgctgaatatataatgaaacatacattagaaattcaaaactaagtattgcttaaggcaatagtgaaaaaactagttgtaacaaaacaaagagtagaatttgtagccttacagggtttctaagtaaagcaaactccccaagctaaacggtatggaaccttggagattgttgtcggacagaacactgcttagttcacacgagaatgttgtcattaattcttgttattaagtcgtatagagaatattattcttattttaataaaacaaagacccaatttatttgaaattgagatttttatttgtatcttataaaataataagtatacttgttattaatattaaggtggcgtttagttagaagtaatgaaatggaatggaaaggagataattttcatttcatttctttgtttcgttgcatattaaagtgttagaatgtcattccttcattttcattattttggtggaatgactattccattttaaaatggaaaaaaaaaaaaaaaaaaaaaagaccattccaatatataatgagaaaaaatttaataatttttttattaaattttttattttgggccccgaaaaacatggactctaggcacgggcctagcctatctatgcctaggaccggccctgcctaagtgtctaatatcatatactcttttataattggttaaaaatttctcatatcaattattagattcaaatacgtggaattggatttaaaatgcaccaatattaacaatatgtcaatcattagtatttctgaatttgtaagacaaaacaataataaaagagagataataaaagtactaattacagtttgttcagccacggaagatttcccacttcatcatctatgtatccattaagacccaatttatttaagattctagcccaacaaaaaatgatcagtactttgtaataattaatcatgagctaattaggtaattttgactaacatatataatactatattacgtactaaaaaaccaactgaatatatggtatgtcatcttacattaaatttcctgtaaatacttacatttctgtaatgtgggaaacttctgaaccacattcgcaattgattatgtaaccgtagtttctgagagtgttcatgcaataagaggaactaatcgaaggggaagtgaccttcgatttgaactgatttataacgatgttgagagaaaacactgccaaataataattaattacaaccaataacgttagcctaaacattataagaaaccagttcatgtatttgttattttgcattgcggttgaactaatatagaattttctgcaaaataataaaaagacatccctcagtaacagaatcttttcccctgtatttttttctttcaatatttttatttgatcttttcgctgctttatttattagtatttatttcttttaaacaaaaattttaattccctgtttatgttcttcgctaaattattatgtttgagaacactaaattattaatctttgctaaataaagataatctacaataatgagttgaaattggatagaatactagtaagaaattacactcgaataatgtattatattttattttcatgtgacacgtgaaggaaaacatctttttaataattaagtattttatgtttaaaatattagataatattaccatttaaatttatttgtatgtattcatttcatacaacatttatatgaaacatattttgttgtatgttacatatttcagcataaattttgaatatatatgaggctaatttattcaaaacatcataaaaaaattataaaaagaaggatattgacagtaaaattatatgaattttatattttttaatactttatattattaacatgattaaaattatatttacatatttaatatcaatctaaatatttattgtattatattacttattgtaaattatttataaaattttatttataatgaattaacttattaatgtataataatatttaacgatcaatttgtatgattttgtaaatatatatttaagtgtatatatttctaaattatttttttcttcacattttttttttattacgttctttttattgtaaactaaaaaaaaaggccaatatatgtatatatgaatatagttttacgtttattatgtaacgaaccttcactggcaggcaacggaggacaccacgtctttactgtagtggcggtcaaaggctgtggcgttctagccttatttccaagagagctgcgttcaggataagcaactccgagggctactgctctttgaatttggaataagtcagagccagagtaaaggaagatgatgatgatcaagtactgatgaataaaaactttattattataacctaaaccaccaaaccaggccttattccccattttgctttttctacctcaaacttgtaatatctattctataaacaactaacatatataatttcttactcttctattctatattataacccacctatatggctagtcaaagagatattttttttttggaccctatagctaacgatattctttaatttttttttaaatgtttgattataattttattttgggatatttgtgtggaaatcttctttctaattgttacacttatggttataataaaaaaaataatggtaaaattattttattttataattttgttatagatgtattatttttgaattattaaatgtcaattaaactcctcatatttttgttacttatttaattaatacataatattcttcttagtttacacttaatagttaaaaaagaaataccattacaataaattcataaaataggctaattagtaatttttctccctgaactttgacatgtaccaaatcgtgcccctgaactttttgggccgccccccgaactattgagatttgttaaatttaaggacttttgtc

SEQ ID NO: 378872 - DNA, 5871 bp, Cannabis indica
atctataatctttattcaacctatattacaaacaatttgaatcaacttcatttcaatataacaatattagttgatgcaataaaaatcttccctttattatcttcatgtagagtttttttttctttttctttaatcttttttgttggctaatggacatccctaaaagacagttaaaaggcctattacgatatatagttggtagttgttgggtgtgtggaagccattgaaatctactagtggattagatttttttatataaatataatagatatttatatgccttttttaacaaaaaagatatatatcttatttattatgagacaaataatttaccaaaatagtttgaaaagtaatagagataagcacccactatagccacgatctgaacaaacgacaattgccaactaattgactgttctgttcgcagattgtttaataaaagcataaatattaatgtacgacaatcaaaaataactaaactaataggagacaataaaggagtcgaactatcataacatcaatgatgcttttacaatccaactgaacaacgacttgatctaggccccgttctttggtccagctcaaagtttccttcaatctaattgtctccaccaaaagaggagagatacggtcatgcaattatttagaccaatgataaaggacagttctatgatgatcacatgccaatcctccaatctcaaaataaaaagccccgaaagtgaaagaggcatctacattgactttaatcatatcaatactgagaaccaaccagtactgctccacacgaacacaaagactgaaatctattgtgtttgcataattttgtaagcaatcttctattgattaaagtaagacaacgcaacagccaccaccccatttgcaacagaatttttattttttcaaacaagcctgtttcttgctttccaaagagaccaacaaattatcgcaacatgacaaactaaagtcttcgaaaatcctatgacgaattgataaaaccatcctgaaaaatcagtggccgaaaagatgcaaatagtcccatcatcccattgccaacaagctttggctaaagaacacttaaccaaaatgtggaggattgattcattcataccttgacacaccgggcaaatgacgaccacatcaacatgcctaccttttaactgggtcagtgttggtaaacacccagaacaggcctccaaagtgactctttaaccttagaaggaatttgagttgccataatgccctctaaaggcccaaattattatcttccaaccatctaccatggcacacttggagaagcttgtaagcactcttcactaaataaacagtgaagtctctataaaccaataccaatgatccgacccaagattatcattcaacacaatacacaagattatatgcccttttttttttaatggaaatatgataattttatttaaatagaatcagccattacaatgtttgataactccaaaagagagttattatgattaaaagtgtaaactggcaagtaacaagcactacgcgcaacaaaatggggagccttgttagcagaatgtttaacaaactttaaagaaatattacccaactcagccatagtttcttacagtcccaagcaactgtcccgaatgcagatgacatttgtatatcactgctgatgccttgtactgccaccaaataatctgtttcaaccaacacactatgctaggattcgccttttatccagctaagggcttccttaataccacaaatctcatcaatctcaagagagacatggtcgattctgcactttgagacaccttcaaggattcttgctccacagtctctagctatgaaaccaaccccaaaagagtcaattgctgcaaatatagctcaccgtgttaatgacaggtttagtccaatgctcaatatttaatccttgatcatttttaacaagaataggttccccacgattatggtttaaatgaaaattttttttaacccaacacgttatataggtggcgccccacgaatggttagcaatattctgtaaaatttattttcttaagatatatgagactcgatacttaatttcactaagcggtatgtcactgaagagggtgtcttttaacaattctcttttttgaattcattttatttcattgtatttttgggttaaaatgtatgagttattgatataggattaaaatgtaattgattgactatctattgaattctaattttttctttagaccatctattgaaaatgatttaacattattgaaagaatatatgatatagttaatcctataaagttctatatttaacaagtctaatttcattatcaattaattaattagtttttgctctatattttattttatttaggaaattttttttagaaaacacaaccaattaattcaaacaaaaatacttaaaaagagagagacgaaggagcactcttgccaatgaacatcttatctgatatctcacttatcaaaaataaaaatattaacatataccttagaatgttaaacactacaaaacgtgatatataaatgtctagcatattgaaaattaaaagaataagatggattagagtagactaaaccattaagtgccgccaccactacatccaccaccgccatgacatagtgactatggaaagagttgccatagtagtgatgtaatcattattagaagaccactactctctcttgattagtaattacagctggtctcgattgcactgaattattactcatactatctattagtactagctagtgttagtattcaagttattcttctttctttctttcttcttctcttccttttggctccaaacacaacccataatgccttcacttttcttaaatattgtgctaagaagaaaaataaaaatcttcacatttttataatttccaatatttcctatattattaattttattgagtataatacgtttattaatatatatatatatatttatatatataaaatccatcatcgtgcaagatatttttgatatatatatattgaatataatgagctaaattagcaacaaacttaccaagaataccgatctcatttatagataatcgagaaataaattaattaaatgattttttaaataatgaaatgatttataatgtttttataatcaaaataaaagaattttaataaataaataaatttaatcccaaacgaataaatagattaaaaaggaaaatagaatattaatagctgtattaatatatatacatatatattagccttttaatataaattaatatattatacaatcatcattaggattatagtgaagtctgaaaatttaaccatttttaccgaagaagcaaacaaattaatagggaagaaagaatctaaaataaaattataaccaaccatgctagtagtacgcgtacgtacgtactagaggttaactagtttcactattaataattgttctttattattaatatatttatctttatttcatcattaatattaactcattattttttttaatagaaaaataattattcactaaacaaacttaaaccttggccgggtgtacatggagaaaacattgaaacaaccatactaattatgtaaaaaggctcattttgattaccacattataaatcaaaaagtaaaaaattcttttacaatgactaaaataataaacgtcaaactattaaaagagtttataattaacccaaggacacagttattgagattagtagtggcagtttgttaattataacatgcaaacgtgtgtatatattatggtacaatttcattataaattgttatgatgatgatgatcatcatataatggatcaatatacctatttccatcccacatattttaatataataaataatataaaatagttactaaaaataatttgcagtataagtatcacttagtgaaagaggtccatgaaaaacacctaaaatgagttattttttttactcattatataaatatatattattttctcagtattatatatatatttgttagaggtggctatttttacctacaccggatggagtttctatatatggtggtcgtaatattaataaggtaagatcgatatatagatcgtagactaccagtaccaactaggcgagcaataatcctaataagttatgtcatttgatgttatatatatatggaaattaaaatgaattacaaattacttatatattggagaaatattaacgtcgttccaattaatataatcactaccattagggattttggggatgtgttggaaggacttatagctcttgatcatggaatataccataattaattaaccatataatataaagttatataatttcccaaccaattttcatgcatatatataataaatctcatttcataaacatgtctaattaattaaccattaaaagttgttactgtatagcaaaatttttaccatattcaaaattaaaacaataaaatagactagccaccaccacagccaccgccacagacacagccacagccaacgccacagccaccgccccaacaaaaaccgccacaaccacagccacagccaccgccaatggcatcgacacaagtgatattatttgccgtggagactacagagacagctgccatagtagtgatgaaatcattattattagtatttttgttattcttgtttccttttttctccttcttttctttgctttggctccaaacacaacccataatgcccaaacacactctctctctcactcctcttcaatattctgttatactttcaattttacaacatccattttctatattataaattttctttagttataaatatacgtttattaatatataaatataatcatgtaagatattttttatttttttttttgaattgatgagctaaactatagcaacaatcttactaacgatatctcaacttactataattaatcgggaataatttttttttattaatgaaatgatttactaataatatggtgatattatattgatatttttttttgataaaataacaccataatttgatctgattactaaaattctatcataaaattataacttgtaggtgaattatattgttatgctaaacaaaacttcttcaatctgaaaaaaaaaaagatacaattaatttataacatatttactaataaataatgacaattaattgtaaagactcattctcttacatttgtttatttaatttattaaatttagaaaatagagaccttgattaattaaggaagaaaagaaaaagagaacttctcttccatgaataatgccattaagggtatgaattttatttattttttaatattaaatttataataacaattttatcctttaaagtatatcttacaaaataattatcatatactatagttttactcaaaaagataatttactcaatgtaagcattccgattatattcctgataaagtaaataagataaatcgctatcattccatttctaagcagttttagtaaacaacacattacaatattgatttcgattattttttatttattccgttacatttctccattactttattccgattctgaatactgtgtaatgtcctttcaaaaaaaaaaaaaaatactgtgtaataaacgtgtcattaggttttacacacctttgttttggtttgtatctatccatgcctaaagcggctcatgggtgggataataggaaacctttgttatacagtagaacctctatccaagaatacacttgggacaaagaaaataatattctaattgagatattataactaaatagagttacacttgaaaaaaaaatcaaaatatcaaaaaatatccatgtaacaaaaataccaataaacaattcttaatactatattatatta

SEQ ID NO: 378873 - DNA, 5852 bp, Cannabis indica
agtagtctcgtgatccataagaaaaaaaatcgggagttgtgcaatcctacattctttggaaaaaattaagtattataattctgaaattgtgtagatataagactacacagttgaagatgacttaaatggatttattaatgctacttgtatcaacaagatgcatcttcttttcagtagcccatcatgaaaccactctaatattaagcgcgcttgaactaagctaatttcagaatgagtgacctcttgagaagtcttcttaagaaacgagcgaatgaggacaaaacacgctgaaaaaatatcgaagagatgtgtttgggttaccataaaaagtgctacttctgcaataagatcatcatatgtgaaatgaaaatgtttgttagtgaaaactttttactctaagcttgaaatttgataagaacttgctgccaattactcaaattaatagcaaaatctccaaacagaagctagaaatcgtagtagcaatagaacagtagcgatggaatagaaagaaagtgtagtgaactgttgttggaatatagcaaatgtaggcagattatgagacaaaatctcttacaatggtggagagccagagctctccatgatgcagagagactttaatctttggatacagattcttttctataactcagttatttatactattctattctccactaaataaatatcttaatacaatgacaattatacccttccctaccaaccatgatgtttcccattaccggtcgcccaactttcaccttgtcctcaaggtgaaggacaatagcgcatacgcgttgttgaagtgcacatggtagaagagggcagagtgagtaagcttcttatctaattatggtcgtcgagtctttgtactcgaaagtcagtcttcttcccaccaaaaaatgacagtacatcgttcaacactagaataagttctcctcacatagttgcacaattcaaattcggatgcaagattgaatattagaaattgagtttgtcgccctatgtcaaaaaaccaagacaacaaagtgttttttttttttcttggcaattgttgcaaagaatctcagtgaaagtgtatcaagtggaagagccaggccagttaagaaagttgaactatgtgaattgttattgaaatatagtaaatataggcaaattatgagacaaagtagagaatagactagaaagtatagtaaactgttgttaaaatatagcagatataggcagattatgagacagtctctttacaatggtggagagccagagctctccatgatccagagagattttactctaatctttgcataccgatcctattctataactcagttatttatactattctttctccagtcaataaccatcttaatacaatgataattatacatttccctactaatcacggtgtctatcaaattttttggcattatgccttatgcctaaagaagtctactcattgctaggaagactcagctaaggctactattctcctctttgatatgtgcttataacaaatcctcatatttttgcactattattttgcagttgagagttgaaatccagtctttgaagagtggagaaaggaatctggtaagattatttctacaaatgagtgtaagaggccctagttccttccaataaaataatcaatgccaaaaaaatacaatatgtttattttgattccaccagtcataaaaatttacaataggtaatacttaatctttcacaggtttactaaagaaccatcaagcaacaaaagaagagttctacatggctacttttttatcatagaagatgcctttcgtgatttcttgggtgatctatcttcgatgaaaagatgcttgtacttctccagaactctttccttttctgtaactctgcctaaaagctcatatgcatttgctactcttagcactattgatttctccggaggtttacgatcataagcttccagcccctcgaaaagctatcaaaagaaaccatcatcatgttaaacaatcattacggacatcatacactgaactaaaactttgggatgtaagaggagcacattgctagatagaatggaaccccaaattttatccaagttaagcacgggctcaacaaaaatcaaactgttatcactcgtaactgaatttaaaccatttgacttttcaggacatgaaaaagcctacctttaccaagttttccatcatgttgtttcgatagtatatagctatcatacgtctgcacaactgccaagaaactgaatgcaaatctatgccaattttcttctgccaaaacgcatgcgcttcatctactctattatccatatctagagcatttatcaactgtgcatatgtacccattgtagttccctgccccttgcttagcatccacttaataacctagaagagaatacagagaactgtgactacggtctaccaacagaataagaatcgaagccaaaatattgtacctactatgctaaaagaatataagcattctcattttttttttccagaagatatgaaggataatcaattggtgtcattaaacaggaaacaaaatctgaaaagaggaaatggttcaaacaaatggttgtaaaagggagtcaacctagcagaaaattttcaatcataatttcattttacatacacgtaaatatttaaaattttgacacttgaaaaagcccaaaagcttggtaataatgcattgtcaggtgtccgcagtagttcaagtcaaaagaaatttcggaattaatatgctcattttcttctcctatattgttcttataatatgtaaaagatcagtatccacacaagcaataaaaaccagagataatcacccatacctggacaactttatgccattcttcttccttctccagagcaattatcacattttttagtgatgctatcggaaagctttgctcccaagcaacccaggcatcaagagcaccataaacggattccttattgtccagtctgtccttgagatcaattagctgcaaaggttgaggttatcttaatatttttgtaaagtgatcatgaaagggaaaagaaaaacatgatcaaataaaaaataaagaaatcattacagcaacaagatgaattaaatatatgatcaagattatataatgattccttattggcattcgtaaagattcaatgtaatgatcaagtaagaattaaatatggttattaccaaacaagatcaaaatgagacgaagtattgcgcagagtaaattattttatgttcatatacttactgtctttacaagaaattcgcccttctccctcttagaaatattccttgagattcgctgcttttcagcatctctgtcatcttcatcaagacactgaccaggagaatggatgttgtgttgattctagaatataagtagttccaaaactaaatcgtcaatggaaaattcttgacattcatcagaaagaatacaaaactcgatcaaactaaattgtcaatggaaaattcttgacatttatcaaactaaatcgtcaatggaaaattcttgacatttgacatttatcaatgatcaagtaaaagagtatgtcattctatataagaggaaaaataaagtataaactgagtatgaggagagacgaggggaaaaacttgtatcacagaaacaactataaggcaacaactttattttaacatcttgaaatcaagtatagatgagcaacttaaactttaaagctatttcaacagggcaaacaaaatatgcacgagctgacttaaacaacgaatggtatctgtataatcacatgaaactaagaatattaagatgcacaatcaatttaaatctttccaaagatacctccaccaatgcctgagaagtcctttgggtagacatttcagcttgcaccattgtactgtagctataattgaaatttcggaccctatttactccaagccgagataaactgcgaatctgcaaaacatggctagttaacatacattcgtatactgtcaccataacaggtggtcattttttcattcaaatagtcattccaacacataagaaattgtacagcagcaataaaatataaattcaactcaaaggaacaacgattcagtatctgcatactgctgatccaatgcttatagaagaggctttgcttttgagcattgccattaggcatcatatggtggccaacaccataccaatgtggcgggttgcgattagttagcggtttcttatattatttaataaatcaaattatgtgggatccgatattaatttgcaccaataacaacatgccactttttgtggtgcttgtcaccataaggtgcccttagcattgtctttgcttttctccctggataagtattgataaagtggtgaactcacaatataggacatggctggcagatgatgtctagatggacctgaactgatgtattgcaaagagtctgagctgagagaaaggaaaaagaaacacgtaaacataaattaataaacagattaaatcattacatatcgtttacaatccaaaatactaaatattgtgtcccaactaagataaagtaaaatacaaaaccacaccgtaatctactaaaatacaacatgaagtcttccataagaaaattttcaatcactcatcttattcttcgtactacatacaaaaataaataatacattagtagtttagtactcatagtatccaaatattatcaatttttctttcaaacatttaatcaaacaccttaactacaatacaattatttttcactaaaacatttaaccaaatatctgaacaacaccatcaggttcaatagtcaaaatattgtctcacaactaaaattcttgaacaatacaatacatatgagattcagtgaaatcattccgaaaacaatgctattttgaaaataggaataggatagtatacccggtgaagtgaagtggaaatggaaggagctggggaggggcagtcggtggtggtgaggtggcttagtggagtcgggcgggtgtagctttggccgttgccgagagagaaaaggaggggtcctgactgagtctgagtgtgcattcgagagtggctctgctcgatcaagagaagtcacggtacacaaatgtgaaaattttgtcctaaataaaggctcaaaattgtaacagtattatatggtactaggcaacgatacggcccttaggttgtttataaacttttatttatgttatgaaaaataaattttatatttgatgtattaaaagaaaaaaatattagttgattaatatgttaatattctataaaaaaaaataaactcacattgtttaatttaattattattactataattattaattaaaaaccaataacacaaatattgaattttaggaattaaattgtaattaattcattattctttattagtaaataatataaaaaatagagtaaatcaaataaatttaaaataataagagaatagagaactcttatactattttttgaactatgacgtggcaatatgtgctagtgacacgtgtctattattccttacatttggctggaggaccgtactgaacagacttcgagtggtacatctgcacacacaaagggcttgtttggcataacttatacttttacttttagacactagaagaagagaagtaaaagtttaagcttttcatttagtgtttggatttcaatttcaaaagaacttcttttctatttgaagagcttttataagtgtttggtagtagaatataaaagctcttacaaataatatatttatatatatcaaatttaataataataataataataataatataatttcttttacttgtttttaaaaaaacaatcttaaaaaaaaataaaaatatataaacaaaaccaatctttaatttatta

SEQ ID NO: 378874 - DNA, 2242 bp, Cannabis indica
aagtgctatgttttcattcaataaagtgtaatgaacatttcactttgtactctctacttttgttatggtatcagagctacgagatccgtgagctacttgttcatcgtttcttttcttcttctttgttttgcttctctgttatccatggcgagaagaggaagcactcaaactcgaagcaatgttcgaagaacttctgacaattccaatcgattctctgcactcgagcaagatcacaaattatcccccaatactgatccatgtagcccatacttcttatccaatgattataatccatcagctactcttgtgccaaagattcttacaggaccttagaattacagttcatggaggcgttcgatgatggtggctcttctagcaaggaataaagtcaagttcattaatggtaaacttccagctcctgaggaagacgatgaagattatgatgcgtggagtcgttgcaatggattagtgatatcgtggctcctgcattcagtgtctcccacgattgctgatagcatcatgtatatggacgatgcatcatgcatctggtctgaattgtagaagcattttcatcaaaagaatgcaccaagaattttcgaggttaagcgatcgatgcagactatgacttaaggtatgaatgatgttacttcatactacactagactcaaaagactttaggatttgttgcaagaatatagaccataattggtctacacttgtactgctatgaaaactattcaagaataccttgatgaagacaatgttcttgagtttctaattggattgaatgaatcatatataaatgtccgttctcaaatcttactacaagaccctcttccaaatgtcaacaaagcttatgcagttgtgatttaagaagaaaaacaaagaggaatcatcatacctcagactgagaattctagcaattcgaacgagaatgcaggacaatttgttgcacaattttttggaaatggacctggaaataggaaaaacaataacagtagacctgtttgcacacactgtggagtaccttgtcatactgtttcaaaatcttatagagttcatggttacccaccaagccatcatttacatggaagattccctaaagaaattcccaacaagcctagaaatcaacgaaatcgatcttcagcaaacttttctacaggaaagtactagccagaaagtgtttataaggatcaagatttggcttcacaacgtcaaaggatgatggtaatgctaacacagaggttccaatcccaatctcaagcttcatcatctcaatcatctgtctctcccacacaaactgatcagtgtcaaactgaccacaatcaccagcaaccaacagtctccaacatctctggtaatgtcaattctatccctaaaaataattggattatagacacaggtgctgcacaccatttctgttttgaccccttattgtttacttccattcaaaaaaatctaaaatcaattttgttggaatggcaaatggtgttagtgcccaaagtctcttttgttggaactgtccaattgcataacattgtgttggataatgttctttatgtccctaattttcagtttaatctcctatctgtctgtgccctatctgattcatctaattattcattcatcttcttgccaaacaaatgtattgttcaggacattaccaagaacaagtgattgggatggattaacaacctttactacctccatgatcaaattgtttcttctgtgttttctgttgttaattctgaaatatgtgacgaaaccttatgccattataggcttggtcatgcctcatgtgtaaaaaatattctatcaataaaagtttacaatttcaatattctccttgtcaaaactttcattgctccatttgtcattttgctaaataaagaaagctactttttgtgtccaatcataacatctctaaacattattttaattttatacacatagacatttagggaccttatcacacacaaaccactgaaggtttcaaatatttcatcatcatagttgatgattactctaggtacacttggattcacctcattaaaaataaaatctgaggttcaatctgtgataccagctttcattcaacttgtcaaaacttagtatggagctcaaattaagggggtcagatcagataatgctaaagagctccaatttcctaaaatgttctcctctttagggatcatatattatcattcttgtgttcaaagacctcaacatatttctgttgtgg

SEQ ID NO: 378875 - DNA, 5544 bp, Cannabis indica
aaaaaaaaatactgtgtaagttatatactgtgtactgtgttaagtttttactgttatttcacagttgtattgtaattgttttttgtaaaaatatgtgtttcacagtaaaattgtaaatttttgttcaaaattcaatatttctgtaaaatctttttttttatatattgtattgatattgcatgattgttggaccacaaaaagaatttatgagatttatttattatagttttgcttatattagaagaagaaagaagaagattgtttttgagtaatgatggttgttgttattgttgtttttacagttggttagtccaggagcatggctatgtgacttgaccctagaaagatacgaggtccgggagaagaagatcataaaaaaggtacatttcatttcatttctgatttgaattatgtaataatatgaattatatgaatatgatgaatgtgatgatgttgcagagaccaagaggattaaaggcaatgggaaacatggagtcagagtctgagtaaagaaagcctattctattctattctattctaactccacaaattaaagaaaaaggctaaaaaagaaaaggaaatggactctctctaatcactgttttcagcggttgtgttcggttcatttcattccgccttttcaaccatatatatataaatatatatgtgtatctctcaaacttccactggtataaatatatataattttcattttccactatttttcttttctctattacagtacaaataggaatatagtctcttattattattattattaattttttgcttttattttatttgtttgtatgtttgggtccatttctctttttataaaaagaaaatgaaaaggagagaaaatttgaatggctgttatataatacaaagcttatccgaaggttcaaccatgtattgaagccaggactaaattgatttctatctatgcaattgcattattattattattgtttttgtgttgtaatgcatttctttcttatgaatgaacgacaaggttaacttaaattattaacaataataatgacaactttgaatagagagatagagaggttaaggaggatagtcctactaataattgtgtggttggatcaacatgttcagagcaaattacatatgtgaatgaatgaatgaatacaataattatatcaatggcagtactaaacaaccacaattgtgtgaaccttacttaatcttaatccaatctcactaaacacacatgtcacaaggtcattaatcatctttttaataattttgattgatgtttttcatttatattagcctagcccagctgaattgcttaaatcgaaagcaaaattcacgattttaccttagggaaagaatttgagaaattaaaggtaacaaaattacgtatagtgaataaaaaaagaaattaaaatatttactaatgatattcaaaccataaaattaataaaagctagagatccatatgtatctaccaaacattatacaccaccattacactgccatccatgccaatttgagagtaggaatgaatgagttatttttcttattattaattagttttgagatatattcacactattaaaaaaattaagaaaaagaaaaatgtgagataaatttgagttatagagactagattatcattaaatagtaaaagagcgcataatatatgaaccaattaattaaaaatatcaaagttcatcttcgcacttaacatatcaaagtggatgaaaaaatgcagtctatttagccgcaaattaatcattaaggtagtgtttgataacacttttgtttttaaaatttttaatcacaaaaataaaagtaaaatttttgtttaaaaacaaaaaacaaaaatgtattttgtaaatttcattttcatttgttgattttatttaagtcgagtttgagaccgggtcagaccgggggcgggtctaagtttgggtttagatctggttcggttcccaaggtctaaattgggatcgtagtccaaatattgattaaaaaaaaactctataattttaaaagtaatattttttttttgtttttaaaatttaaattcttaattaaaaagttaaaaagtaaaaacaattttataaaatataattttagaaaatatttttaatttttaattttaaaaataaaatactgattagaaaagtgtttactgttttcgtttttctgtcttacactaagtttttttttttgtcatattctttttgaccaatggttggtgttaaccccttgaatgaacaacataattaaccttaaaatattaacaataataatgacaactttgaatagagagagagggagaggttaaggaggataattatactaataattgcgtggttgaatcaacatgttaagagcaaattacagaattacatatatttatgaagttaatttcttgtcaaagatggcaaagtatatatgatgaataaacatgtatttgtgagaaaaagacaaggactttaactccaaagcaagtaaaccagtcactccaccccacccacaaaattgatgaattattaatatcatataatatgatgcctagccacatcattataagtaggctttgttattgggtaatcgatgtaatgaagaatagatgtagatgagtcccttaattagaatacttgaaattgtaattgacatttatatattatattctataaataaataaatgaaaaggaaggaacaaccaaccaagcatgtggagctggaggggtcaattactgagccaactgtttgtgtttctattatgaattatagcaaagaaacacgagcctcttatgctggtggaatgtccatcatcacatcacaatatcattgacaactatactatattggtctttatttgaatacaatactagaaattgaatttggtgctgccaccaatttattatatattataattaaatataaatgtaatgtagatgccatggcgcactacaagacagaataagttccaccttgccactcattatcaaattcccaaatatctttcttaccattcaatattatattttatttaattctaaaatttattagttgagtttgtagagattggtatacaaattaatttgtttgatttgtatacaatgccaattagtgatactattgaagaatgcattattagaaactatcttagtcaaattccactaaacaatcacaatatgtcataatttcattaatcattcgtgttgttcattttagcccaactgaattgcttaatcgaacggaaaattcacgattcacattagaggaagaatttgagaaatgaaaagtaacaaaaaaaacatataatatttactaatgattttcaaaccatagaatagaaagagatcagagatccacaactcacatatctagtaatactagtaatgttcactctgaaccacaaaaaccataacatccatcacaatctaccaaacattataccataaaaatctctaaaatcgaattaaagaaaaaaaaaaaactaaacgaaagccgaactaatacgaacccaaaccgctctacaccaccaccgccgccatccataccaactcatcgaacgaatttaaaaacatcttcaagccctaagtgcgaatccgaagaagagagcgaccagagcagcgagaaatgagggtgagatcgccgaagcaggagaggcagggctgggtgccggtgcgtcagctgcatgagcggctccgatgacggagaggacagtgatgatcactgccacgagaacaatcaaggatgagtttgttgaggctgccattggagaatgcttagcttaagcttctttcgatttagggttttcagagattttttcttttggagcaaaaagatatgaaaattgcgcagacgattttagatgaatgtggtgagagtgtgttatatataggtggagagagagtaaaggtttggggcagaacgggcagctgccctaatgtacaggctggcgtaacagctggttcgttttgtgggtcccacttgtgaatttgttattattttcagtaatatgaggaaaggaaggaaggaacaacagtccacgcgcaagtgaccgctcgctctctcacgagtcaacacgtggtctttttgaaacctgtggaaatcattgtcgacatacgacgccgttttaaccaattcctgtggcgcgtttttctcacgcaatactgttttgctaggcttccagattattctatttgttacacgcgctcttagaggaatgtattcgctaacaacttaaggagccattaatttaatttttttaaataaaaagttttgaggggaaaacaaaatattgcgtgatttttggtgtgggagccgcatgagaatatgagtgtatgaacatgtgaagctcaggtcggaccaatcatagattgacacgtaatacttaatggagatgacagaaatggtatagtattgcagggaatatgacacgtgtatggtagaaatggttttcatttcattatgattttgaaattaattaattcaaatattttagtttccagaacattctttcttcttaaaaaagagaaagtgagatattattgggtgatgaatttacgaaaatagggctgtgagatatttttattgcaattttgatgagtgattgtgacaactgagctgaattttgtgttaggagttgccgtaattggtggtttcattttcacatcttaatttcatattctcatgtatgttattcatcaaacttatattttatttcaaaatataatctaaactaatcgacatgtccatagattttttattttatttctaacactaaaggaggaagatatttaatttattgtatttgtttaatttttagcaacaaaattatataggttgaaaagttgaattttaaatttcagttataacacaaaaatatatgtttattctttatttaaaaaaaaaaattaatggtgaataatatactccattattttacaaatatatgctcaaataaatataaacaatatatgctagctgaaatagttaggtctgtgagattgtatttgtatgggaagacaaaagttcaaatatcttatatatacatacaaacaaacatagattgtatgttgaaggatgtttttggtgtactaatataactttgtatgatataaagttaaattgttaatatagagcgtttcacttagattagagaattattatttcttggtgcctagtaccttttttagtgctctaaagtgtaattaagtataaagacttcatataactttaaaaaataatttttaaaaaatatcgctaattaatctaataacaacacctataaaaaccgtttgaaaaccactattgcgcaatatcaaaactcaagttaaatgtcctttcaagaactttttttagccctttcaaatcgtgtttgtgattctaaggagaaaatataataaatacatttacaccctaggtgaatgtacgtgccgagccacgtattgctagttttatttaagattttagtctttttaagattttgaatgtattttatttttaaagattacaaattttttgtttgaaaaaattaaatatttatatttgaaa

SEQ ID NO: 378876 - DNA, 1883 bp, Cannabis indica
tgtggactcagttctttgcttctagacaaccccttctctctcttaccctttccttatttccaagcaaggagtaaactacggctcaaaccatgagtatataaaactacggattgttgacaattacattctcgtagatagtcatgcattgagatatatacgagatttctttatatcactttcagaaaaacaaattttctttccaattttcatttccagttttccaccactactttttcttccatcttttttctatgttggtcttctttgtagctctccaaaagagggcaaaaaccctttttcagcagcttagagcagtggggttgatccgtggacgtaagaagactaagcggaacaggaaactttggcctagtcttgatgcatcagccacagaagccatggaagtctccagccagtttaagcgagttttcgaggtcatagacgaaaacggtgacggaaaaatatccccatcagagctcagtgaagtgctgttatgtctcggctacaataaatctattgccaccaaggaggccgaaggaatggtcagagaaatggactgtaatggagatgggtttgtagacttggatgagttcttggacgttatgatcaattgcaatcataatagtaataatagaactactgataataattctgatgaaaagcaggataatgatgatgatggtgaggaccatgatcacctcttggatgctttccttgtttttgatacagacaagaacggtaagatttcagccaaggagttaagacgggttctggtcaggcttggatgtgataaatgtagtcttggagagtgtagaagaatgatccaagctgtggataaggatggtgatggcttcgttgattttgaagaatttaggttgatgatgaccaggtctacagattaaacccatctcactctgtttgtttaattgtttgtgttttgttcctttgtaaattttactgagccatgtcatttattaggaattagtttggtttatgagaggattttggggtttaggataagagtatttcctaaacaaatttaggaggtaaagaatgcagatatgtatcacaatatttttgtactacataaataatatgtcttttcttatttcatcatgaaatgagttctagtatgtcaaacctgcatttagagcctaatggcagacatataaataaaaaaagtcacttttttaccactttgttccttggattaatcatttcttatatgataagatagtgcatgttatggtatggtcctctgggtcaccaagatctccctactttcttagaacaaaaatttaaatttaaattataatattttgtatgcacttaagcatataattattgataattcagcttaaagggataagactattttagttaagagtctttgttataaaaatgatatatttccttgttgaaattaaaacataataagacaacaactcatttacgtaggaatcaaaacttagtatatggacaattactcatttatattaagcattttttacgattaatgtacaatctatcatatgattagtgatacatggtttgtttatgaaatgagcactagccactaggtaaactaacttgatttaaagaggttcgtaaattcctttttttatttttgccaactttggtcattagattagaatagaacaacatcaagttctatgaagaacattgctatacaaggtaaaggtattatctcaaaatgtcacatagtgagacatctagtgcatatttggcatcataattaaaaaactgttttttgtttttaaaaacaatttggcttgtttgaccttattttttaaaaacagttttcagaaaacaaaattacaaagaataagaattttgaaaacaacaaaatgttgttttctgtttta

SEQ ID NO: 378877 - DNA, 1442 bp, Cannabis indica
cttggagaaagattcaataaaaggagacacttcctcttctaagcctgaattgtcttctacaaatgaaatgagcatatcactgcttgaggctcgataaggcttttactatatgctcaagacaagcttgatggataacatgaaggtttcttttggctgctgttactaaacgatggctgaaatctatatgaaactatgagctacatgatttttgtgaaccatgtcagccggatatatgtatacatagaactatacaaaagtgattcgtttgtcttagaaaaactagatatagaatgtatatatgcctgttagatgaagcaaatggtatataaataaggaatggaaaaattgaacatcttaccacacacattttcatggtgaattaaatttacaactatatgacagaaaacaagaaacaccaaattccatgattcctaccacctgtcaaattgattcaatgatttggaaacaattataaaaatgttccaaaatttaattactgtgcaggactttctctctttctctcttcattttttttaagggaagggtctactgtatttatataagttcttcagatgaagattatatgtttaaaccttataactgtgtcattgtgctctgcagggttctttctcaaaagcataaacaatcattaggtgtagcattagttaatggatgatttttcttctaatttggttagaagtagaggtaacttggaaacttcttttttcagccccaacaagattattgtcctggaggattaaagcaaagtcataattttttttcttaaaaaaatatggaattcaattaatggtcttatgaaagtgtacaaaaaaatattcactaagcttctaaggaaatgattggtttgagaaaacgcatattaggacgaacaagactgaatctataggatgttgtaccatattacaatgttttggcacaaggataaaaacagataagaggctgtatcatctgatttggattgttgatctataatacatgctctcgttttttcttcttttttaatataaatatttggttttcacctttttatttctagtatattgtatggtatataatgtgaagctcatgtattactcaaagaattaataagaggaaaatgcctgattcatgatgtcggttgactaattttctctcaagaggaggagtagttaaagattgatattacattaggtaccattttttgtaaaaaaaattacatttttacgtttaatgaatatttttttttttacatttttacaatttttcatagaaacaacaagaaaattacataaaagtaacaggaaaataacattcaaataacatcaaaacaacaacaaaaataatatacagataacaaaaaattaacaacaaagtaacaagagtacaacataaaaataccgtatattttgtaaataaaatacataaaaaatgtttaaaaattc

SEQ ID NO: 378878 - DNA, 1553 bp, Cannabis indica
ttgggaggcaagtttcctggcttcgctgagttgagatcggtgtagtaaattcgaccaagaagcttggtcactagagagatgcaaaaaagatcgtatgcgtcagtgaagaatcccattccagcaattactatagcggtgaaatgatagagttgtgtcttggccacatcaagtgcattaagcactcccatttgttctcccgccatggctaagtctcaatagtttccccactcctttcctgtatatattaatgtattaataaacatgagctatacatataggagaattgttaaaaggtgtttaatatcttttttgatgtcatattattattgatgtaattaagtatcaagtttcatatagcttaaaaaaataacttttaaagaatatcgtaactagttgtgaggagccacacctattgaaggtgctaagcagtattagtgtccaatagcaatgctcacatatatatagatatatttagttaaatttttaatattacttggtaactatttaaaagagaacttattagacctccttaaaatactttgttgcataagaaatttcaaagagtgagatagactacgtgcatgtaatttttttttggcacacaaaatgttgaagcaataatttcttaaaattcactttttttaataactaataatatgtgacttttaacaagtaatttatgtgtagaaataaaatatatgtataagtagttataatctataatagatacaaataatttatatatatatatatatttgttactgacctctgtgtatatataatttggattggagatatatgaagttgtaggaggagtatgagatttagcttagagatgttttgaaggagaaaaaagtgaatagatatatatagtatttgatgtaaagcataatacaaaagcatcttagaatatactcttatcctcatattaatcatcatttatttattaagtcaacgttttaacaaagtcaacacctcacaaaatgacaatacagccttttattttcttttttttaataaacgtggtatatattaaaactaacataaataaaatagtttcaaattatattccttcttatatattaacttgttcttattatttcattttatattctcagtggtggccacatttcatgttctttaatatgaataatttttttttattatttttcttttatcaatatcatcaataattaattattaattgaccattagtggcttataaatatgaataatatttcttgtataacatgtaagatgtaacttgagtttgggtgaatgatcaattaataagtacgaacaaaattaatttgatttatcaatgtgtgaagtttggtcaacgcaacttaattacaacataatcaacaataatacaaacatattttggtaataactaattatacgaactatgtatatatagaaatataatttacacatgcataataatagtatgcacatatgttagttttaaactttttatgttttataatagcatcgaaaagtaatgccaaaagattatatattctgatattagtgataaaaaaaaaacttaa

SEQ ID NO: 378879 - DNA, 8006 bp, Cannabis indica
gctaagaaatcatcccaatccagccaaggaacccacggagagcaccaaagatccacccttgaaccattacccaacaaccaacagctctcccttcgaataagatcccgagtggcaaagataccccttgcaccccaagaggcctgaggaggtatcggggccgaccaaaaggagaagtctctcttgcaatacttagttaggaaaagcttacaccacggggaaggattcccactagccaacgcccaacccaatttagcaatgaaggccaaattctgatcacgagccttctttaaaccaagtcccccttcagctttgggtttacaaatcgcatcccaactcaacagggagagataacgatgtttatcactggaaccaatccaccagaatttacgagccagtttgtccaaagagttacatatagaaaccggcagcaggaacaaggacatcgtgtacatcgggatgctgttgataaccgacttaattaaagtagttctcccagcctgagaaagcagtttactccgccacccttctaaccggtttttaaccctctcaagaacaaagctgaaatcacgacatttgcttttagagaaaaacagaggattaccgagaaacttatcttcctttgtcatcaagcggaatccaagaacatcagttatagttttcctgagaaccgcatcagagttcttggaaaaaaccaaagccgacttggaggaattaatcatctgacccgaccatgaacaatagagattcaaacaatcacgtaacgattccacttccctgaccgtggctttacaaaagagaaaggtgtcatccgcaaacattaaatgggaaacagcagggctttgaggacaaaccttaaacccgtggattataccattcgcttccttttgggctaggagccgagccaacacctcactacccagaataaaaaggaacggggagaggggatccccttggcgaagaccccgggagggcttaaactgtttcaaaggacccccattaagaaggaccgagaaactcaccgattgaatacatttagccaccagacgtctgaagacacagtcaaacccgaacgcctctagaaccttatccaagaaacaccactccatacgatcgtaggccttggacatatcaagtttcacgccaacgaaagcttccttgcccgacttcttatgaaaggaatccataatttcatgggccatgataccattctccgctatccacctacccgggacgaaagccgattggaagggggagatcaaacccgggaggatggattttagccgattggcaagaagcttggaaatgaccttgtaaacaaagttacaaagagagataggcctaaagtcatcaaacccaactgcatttatctttttaggaatgagaacgatgaaagttctattcaaactttgtacaaattcacccgtcagaaaaaactccctaaccgtatcgacaactgaatcccccaccgtctcccaatgggtccgataaaagcaacccggcataccatccggtccaggggatttgagaggccccatggaccagaccaccagacgaatttcctccggggaggggatcctagacaagtcagaattaatctcagcagaaatacacggggcaataagttcagagatagcattacccgaatgaggattggacgatcgaaagatttcaccaaaatgattagagaaatagttaccaatctggcttctacccgaaatccaattgatcccatcgtccgaaacagccccaataaaattcctctttcttcttatcaccgtagaagcatgaaaaaatttggtattgcggtcaccatctcttaaccaaagttctcttgatttttggcgccagatagagcattggcgcttggacacttcttcaatttccaagagaatatcggcttccaggaggtcattttccgaggaagggattctagcttggacttcaagaagaagactatcaagtaacttcaatttgctctgacacattccaaagaactccctgttccacttcgctaattttctccgggtacacccaagcttagagaccaattggaaactcttgcacccccccacagtgatattccaagcctctttcacaacctccttacacgaaggatcacgattccaagcttccaagtaacggaaaggcctcgagaaattttcacgcaccattaagagatctaaggagaccggggcatgatccgactcttttatggggagaaccttcacaccagccttcgggaaatccaagatccaatccgaactacagatcaccctgtcaaggcgctctttaatcagacaagagaacttcctcctattggaccaagtaaaaaagtttcccaccgaaccaagatcaatcccaccagaaaccataagaaactcggtaaggtctaaatagtcaccctgagaattttccactcccccaaatttttccatgggattggttaaggcattgagatcccccataagcacccaaggaatcacagacgaacccaccgagatagccaactcctcccaaaaggcctttctatcaggtttataaggggggccataaacaaaaaaccccgtccacttaacacatcttagaatattagagaagttaaccgaaatgaaatattgctgagaattaattacctcaatctcaatacccgccttccaacataagcagaggccacctgccgaacccatagggtcataaacaacagcgttaaagaagcctaatctcctccatatacctcccattttcgagccattcaccttagtctccattaagaacaacacatcaggatcctccctgataaccaaaccccgaagggcgttgactgcccgagcttgacccaagccccggcagttccatgaaaggagcttcatgaggatttggggggcatgataaggcccgcctcctcggccgtctgaaaatcctcattccttattacactataatgagtcaccctccctttctgcacattcgcatctgaaataagggaagtagtatccgagaactccaccactacctcaccagtaacttgatcagacttatgcaagagagaattagcagatgacacccccaccgagacttcaacaagcccatcatcttgttccaatgccagtaagctctccgacttgcccggaggtttcttggtcttcctttggcgtttgatctcttggaatttaaggctctcatcgctctgcctccccgtaacctccacgcctttgtgacccgtctcatcaaggttgggacaaccattttccctccgattcttcgaaaccacaatcgaacttccttccgcaaatgcatccaagacacccgctggctcagtccccgcgccaatagaggacgttttggagttatcacctaagaagcagaggccttcctcacgaagcgaagtcttcttacgttttgttccagcatgctcgattaagttttccacattaaccccaaaaaccggggccttaggaataccacggggacccgtcatcttgagagggccaagcttagtgttattacgggaaagcttgggcccattcaaccgcctgcgcttatccactttcatcctatcctgagccaaaggatccacaatctgggccttaaagtccatcgcttgggccttagaggacggcccattaccaaataacccaactaaattatcttccaaggaggccgaaagggccgaaggcctaacaccagtcgaaggcccactttcatgttgaatgctaaaggaattgtcacccccatgaataaccttcgacggagctacaggagggtcgccggagcccaccgcgggagtatcctcactttccatttgaatacgctcttggagatcctccgctttcagaagatccaacccattctccaagcgagagccagctttaagccacgggccaaacagaggcacactcctaccatcatccaagatcatcatgcgttttttagccgaacaaacatcctctgcgtgaccaataatgccacatttaaagcagaacagggggagccattcatatttcaagtaacaccagaccttctttcccccttcatcttcaagacccacccccgcgaggaggggcttagccaaatccaaactaacccgaaacctcagaaagttacttcgtataatcccattgattctaatcctattcgcttccaggaaagaacccactctgttagcaatcttggtaacattttcttcagtaaaatacctatatgggacacccaaaatcttaacccaaatattaacatggccaaggtcagctgacttccatttcccatccttcggcatctgagtgagaagaagaaatccaccgcaaggggcccaaggacccttattcaccaccttggacgcgtcactttctttcgcaaagcggaaaatgaagatcttggggtgtatttcctgcatactccagccctgagtaacattccacatctccgataagaccgcccggagtctaccattccccaccttacgtttagcaaagtattttcccaccagcgaccggttaatggtctcctttgccgtctcatcatcagcaaccaaatccaacgaaaagtcctccactgaaacattttccaccaggctcatcacctcctccagcggtgacacacttacaccgggtattgtctgggactccataagaccactcacagaaatacacaacagccgcacagaatgattatcacccagaaaaaagcctttcgaaattcctttgacaaaaagggaaatactaggcagactccttgaatgaattaaaaggctatgcctttccggacacagggtaccatacccttgccgtactgacgtaaacccatgccagctatagtccatggcagggactcagaccgccactaccaggcgtacacacccaacgcaccactacccgtacaagcaaaacaccctactgtacggagagcattttttttatattttgatgttttagttagaaataagaaataagtaaatttaggaatcttaatgtacccaaagacttattaaatatatttagaaaggaatggaaactccaaatgctaattattatgattcttattcttcttattattattaaaaataaatgctaactaatttgtattttcacctaaatatgacatgataatttctctctatctcattctcaagtaagaaaatatatgaacataaactacttgagaggctagctcaagtgacaggtgtgtgttgaaggtcctgagttcgagcctcaaattttttcaaattttataattagagcacagtaaaaaaaaaaataaacaaaatacgtatataatagatgaaagttataattgtgagaattctttagcactcatataatatgtgcaatatcaaaaaccatttccatacacaaatatactacatattattgtaagtatataaatatggatcttaacaaaaatattcttattactttaaagaagagaacaactcggatagtagtggaaacataccttactttataaatagtgataattttaatttatctaataaagatgattttatggtaattttagataatgttctttcaagaaaaatacaagacttgagtttctctcattttctccttcaggagggaagatgaatatagagtgactcttatttattagggatctctaccaatatataatcttaaagttaggttattaattttaattatttctaatttagctcttcaataaaaaaaaaatatatcacttattaaggtatttatacatttaattcattacactttaatacctaatgcccacaattactaaaatgatcactttatttggatcaaacttcaaatagcaatacaccaatacatattacatatgaacacatactgagaattttaatctaataatcttccacttgggctacatattttttatagtgtgtaaccttataagctcttaaattttactattataattataggtatttcaaaccaatttcgttcattgattatactaacatatgatcaaagtcatttttgccatatttagtatggctaaatccatcaatgaccatgtatatcaatataaacaaatgagatagatcaatcatgaatgcatagtgttaggtattagtttatgttattttcaaatcatgagtgttttaattagttttagtttcatttaattctattttacgctttagtttgttaatattgttagatttagctaataaagagaaaagtgaatgagttgaaaaaaatggtgcaaaatcaaagattgaattgcaattgtgtagctagcgtgccaaaagaggagttcttgaaataattgagaagtttcggtgcaaccgaagcctttgaagttgaagaataaaagacgttggagtagtgccatggcctaaaaattcaatgccaaggtgttcctatgaaaaaaaatggacaacaaggttgataatggaaagaaataggtgggccatgacatggcattagaaggaagcttgccactgcccagaaattgagcacccgggtcgcggcactgaaaagagcatgttacgacatgctcttttaaaaatggtgtcaacatttagtgattttggacacggaacgcagcacactactacaaaaaagactttttgtttcagttggcgtaaccgacgttataaccgtagacgcaaatactaatttttttgcttcggttatgaaccgacgctaatttattttttgcttcggttatgaatcgaagcaaaaaagaaaggtttttgcttcgattcataaccgaagtaaaaaattagtgcacgttggtttaactccccaatatggtgatcgtaactatcaccaccaacctggtcgatatagtgatggtgttggaaaggaagactccgaagagtcattagaaaacccttcctcaaaagactgtgatgaaaatgaagttttgtttgaggatgaagatgagattgatgctcggagcatttggtgatccttaaagagcaatccaagcaaggtcacacgtaatttgactgtgcaaagagagaagccaaaaggtctctacgtgaccagaagtccccacgcggacttgtggtgcaaatattatcccaaaaattaccttaataacgtggcatagaatgatgtgacatgtggcaagcatagaagaggttagacgaatgtgagatccttggtaaggttctctagaaggagttggtcggtcgtatagatcacactgagctgcccagcatcaggcatgagctagacggagtatgacagccaacattctaaccaactaaaaactcagcacagaaaggatatctgaccaaagaccctggcgagagaaatatccaaattcattccaacaacttatttccttgtaaataggtcaatcaacactcctataatagagggattgcgacaatcatggaagattgaggatttcacgggatgactcaatcaaacattaaattatttattttattaaatataaatgttctacatatttttctctataaatagtagagtacattcactatttaggacctaattctttattctcaaaagagctattacatagttaaattatttgtaaaatttagagataataagaaactcacttcatcaagttcatgtgtcgtttatagttctccaaaaaattcaactaaaagagaagtaggtcattaccgattaagagaccaaacttctataatctttaagtgtcgtttatagttctgtttattttgtatatttaaacagttataattgttgttttattgactccacgttgttaaaaaaaaaaacagaaaaaaagagatcaacaacactgatgcacattttccaaaaaaaaaaatattcaattggattaatattgacttttttgataaataaaggtgtcgtttggtaacacttttgttttttaattttttaatcacaaaatgaatttaaaaatttttgtttttgaaaaacaaaaatgcgttttgtaaccacttttgtttttcaattttaaaaacaaaaaacaaaagtgtgttctgtaaagtttattttcatttttattttttgattttatttaagtcgagtttagat

SEQ ID NO: 378880 - DNA, 6277 bp, Cannabis indica
atgaataaactaagacagaaatctgtcgcaatagtagactaagaagaccgtaatctgacttaaccactatacatctttgtgttcattatatttttgttctattatctgggaagtctcattcgaatacttgctattctaagttaagtccttgatgttattctgttaaatatttatcacttattttctatttggtgttgtccaaatttttccgacaacatttggcgccgtctgtgagaaattttattattgattttggagaaaaatcaacatggctgccaaccagacaaatggaaacaacaacacgggatcttttaatatagaaaccatgaatgttccactcccagtatggaactaatccaactgatacaatcgttgggggtgtgggacgaaccagcatcacccttttcaacctattcttagaaattgctggtcacgttggggaaacatcgacaccagcagccaccgtgggccacttctcgcctatcacgccagtcgtagtctctgaaggcattattcagcttacgacaacacaatacacaaccatgcaggaacaaatacaggcattacaggccgaggtcgatggaagagagagagtcaggacctgacgtccatctcgggtcccaaacaagcgttcaggcaatccttaggtaaccacaactagacaacaaactgagcatcctaacaataatcgtactcgcaaggaacgtgtgactgaacaaggaggccttgatctgaatcaccctacgcataactctacacgaaatagggagccaattgcacttgatgcttgtcgtcaaaatgcaggaagaaaagagagaccgcaggaggaagatcctgaacgacagaacctgcagactcgggctcaaccgcgagtagaggtaaatgaagtgaaatcttattctttttttactaatagtcgttctcctagtatttataccaggtcggggtccgtcaagactcgacgaggaggtaggtaccatgtgcacagaggtgatcttcacgatcatctcaatgagattttcagagcgtgatctcaaacactgaggaatcgcaatgataatgacgagccccatgatccccatgtgggcgattaaggcacgcagaacatgaacaacccgactaatccagtcaacccgccaatcgcaccagttgcgaccatagaagtaatgatccctgccaacatagcagcacttaccgctgtaccaacagtgacacaaaccaatcccatattactaggaggtattgaccaagagagcctcttgcgagcactaaggatgattgagcagcagagaaagcccatttacaaacttcataggacgtagccctttgcagaagaagtgcgacaagccaggcttccaaaaggctttaggctatctgaatcgctcaaatacaaaggtactactaaccccatctattatttagataaatttaatatgattatggaagtaaaccaggtaccacaactggcaaaatgtcagatagtcgccgcgactctggaagataatgctcatgattggtttagccaattacctgaggcctcgatatcaacctaggaaacctttgtagacttattcttaacgcactttcaggccacgatgacgtacaaactatcgtacacaatgttggcaaatattaaacaggaagtcggtgagtctttacaaggttattttaaattttttaatgttgagataaccaaggtcgagaagggcccctgagtcttcgttggtctgtatgttaattataggtgtcttgctaagaaccgaatttcgggaaaaattgtaagcgtgacgacccgagttgttagtggaattctttactatgaaccgcataaaagaattgagaattctttggctaagttggaaagaggaaatgagaagcgcgagtttcctatgcctagatcacattctcgaagcccgaaaggaaagaattctaggggtcaaagccccagaagacgcagtccatctagacgaagaagtccaaagctcgccaagtcccccactaaaaaggaagcatccccaaaaggaaagggggcccacattttgttaattacatcgagttgtctgctccttgcgaccatatatatgcaatagaagaataaaatgacattttcaaaaagccacctccaatctagggtaatcgtgataagaaggaccccaagaaattttgtaagtatcacaaagatattgaccatacaactttagagtgctggttccttcaggacgagattaaggaattaatcagacgaggaaaattcagcaaatataagaagaatggagagaatcatccccaaggggatgataacaatgatacaaatgatgtgagtggttctcgagcccctcgcaatattctaactatcataggagggccgcatgtcggtggagactctagaaaatcgcatgagcactatgtaaaagaagcaaaagaaaaaccctcactcatgtaaataacttgagtgaacgactagaaaagttatttaagaaagaatatgacgacattaccttcatggagagcgacgcaaggtgggtacatcatccacataccgacgccctagtggtagtcactaacgttggaggggataatgtacatcgtgtcctagttgataatgacagttctggcaacctcttaaatttacaagcttttaaacaaatggggttacatgaaaaggacttgcgaccagtgaccttgagtatttatggtttctctagaggtactatcgcattgaagggaatgataaagttactaataactctagggattgcacccatcactgccaaatcaatggttgattttgcagtaatcgatcaacattctgcctataatgcagggataggtcgtcctattctaaaagaaatgaagatagttacgtcaacctatcatttaccatgaaattccccaccctgcgggtgtcggatcagtgcaaggagtccagccgattcgagggaatgctacaatactgcattaaaaattgtagaaaagaagaagtcggtaaatgtcatctattttctcgaagctcctcctcctcgacatgaatgtttcaaaatcaaagaaataccacatactgaaaaactagatctggaggatcctcaactacactaacattacgcaagttacagaagagacaatcgaggtacctatcgattcttatgataatttaaagtgctaaaaattggttctaaactaacgttttagcagccaaaaaagcttgttacttttctcaaacaaaatctggatatttttgcgtgtaaacatttagacatgatcgaaataccgcccgaggtcatgtgtcaccgtttgaacatcgaccccaatgcgcgaggagtatgacaaaagcaccgcaaaatagaccgcgcgtgttaccaagtccttaaggaggaagtggatcgcttactggcatgtggcttcataaagaattcattttatccaaactggtcatgaactcctcagctttatggatgcatactttgaatataatcaaatcccgatgtacgagccagactaggagcacgcctccttcatcattgatcgaggtttgtactgttataaaataattccttttgggttaataaatgcaggtgggacgtaccaaagattggttaacatgatgtttgtagatttgctagggaagacaatggaagtgtatgttgagaatatgctcgtatgttgaggatatgctcatagaatctcaacatgggaaagaccatgtcactcacttagattctatgtttagaatcctacgccactacaaaatgcaacttaatccattaaagtgcatttttagagtgagatcagagaaatttcttagttttatggtgaaccaacgagggattgaggcgaacccagctaaaataaaagccttggtggagatgcaatcccccaccaagcctaaagaggtccaaagcctgataggtaaagtcagagctttaaacagttttgtatctcactcttttgataaatgtaaagatttttttttcagatattaaagggtaacaaaaagtttcaatggactgacaaatacaaagaagcagttcaggcattaaaaacgcacctggggtaacccccgatactttccaagtcgatgcctagaaaagttctatcaatctacctagcagtgtctgaatacgcgattagcttgatgttaatctgcaaagaccaaggtagacaacatccggtatactatgtaagcaaacgcttactcgatgccgagactcgctaccgacaaatggagcgacttgcatttgcatcggtggtcgcttctcggaagttgcaaccttattttcaagcacacattattgaagtactgacaaactttcctttatgacaagtattggctaaacctgatgcatcggggcgattactcaaatagtcaattgaattaagtcaactcgacataaggtacaagccacgatcagctatcaaaggctaagcccttgctgattttattctttaattccccaaggaataggtggctatcatcacagaagattgagttgatcctgaggcactgccaggcgcaggttggaccttgtacgtagatggagcatcaaacagtgagggttcgggtggtggaattatattgataagtcctaacaaatttaaagtacacactgctttaagatttgaattcaccgcctcaaacaatgaagtcgagtacgaggttctaatcgcatgattaaaactcaccctagagatgaaagtcgagtacctcgaagcatttaacgattctcaaatcgtggttttttaggtcaatggcgatatttggctcgagggggacgtttggcaaagtacctttcttacacttgtgagttgttgtctaaatttaaaaagttattgtcagtagaataccttgtgcttataactctcattgtagatgccttgacctgtttggcctttactagagaagtaaaattactcgatgtaattcctatggatgtgttggtccatccaacaattgatcgcgatgaagttatgcaaattgatgttattgaacaagccacttgaatgacctccatcattgcttatttgaaaacttgtgaactcccaagtgataaacttgaagccaaaagattacgttatcgagctgctcgatatgtgatctatgacgataagttatattgcagaacttttagtcaaccacttctcaagtgtatcgatggggatgaatgtgattatatcctccacgaagtgcatgggggcatttgcagttaccataccagcagaaattcttcagctctgaaggttacgtgacaaggctattattggccaactttacgagcagatgcgatcaattttgctaaaaaatgcaacaaatgccagtgaattgccacctatgttaatagaccaccaaactgtttaaattctatcaccagttcgtggccatttgcgatctggggcatatatttaataggcaaattgccaaaggaaaaaggaggagtgaaatacgcagtagtcgcagtggattactttaccaagtgggttgaggctgaggctttagcaacaataacaacaacgaaactacacaagttcatctatcgagcaattatttgcaggtttggtattccttactagttaatttttgataatggaaaacaatttgattgtaatgaaatgcgaacactatgtgatgatctggggatccaaaaagctttttcagcagtcgcatatcctcaaagtaacggtcaaaccaaagtggtcaataaaatcattaagtataccataaagggtaagctcgaagaatgaaaaggtatttgaccagaagaactaccgcaagttttatggtcatacaacacaactcctccctccacgactgccgaaacgcacatcctgctatttcaactccaatattaaagaaaaacgtttgtgggtaggagacttggtattgcgaaaagtcatgcccaacacacgcaactctgtgcatggggtattcgacgacaatttggaaggtccttacctaatcgctgaaaaaaatcagaaacacaacttatcgattatctaatctcaaatgactcaatcttcgatagagcctagaaaatggagtacacttgaaagtactactatcaatagtacctgcatgtatatacttggttaatttatttatactttaaattatctaagtatggggggtataaccatacactgtaccattgtactatggattatccaatgaattattaattttcaaaacttatgaattttgaaatttttcatacttctcgcatttacctacttagaaaattttgtggaattttttacttttgaatatgaacatcaaaatgttcat

SEQ ID NO: 378881 - DNA, 5853 bp, Cannabis indica
aaaaaaaaaaaaggaaatacaaaacaaaaatgctttcttccctcacagctcatatttccaaatcccatcatctcatttgatctttttctctcccactttctcagatcccaaacagcccccctctcctccgtcacccttactatgatctccactttatagcgcttcaacgtaaatctaaagtttcttcagatcttctcattcttggaaaatttaatttagaagagaaattcagggaagcaatgaacgattttgaggggcttttggccaccgatttcgggtttaaaccctcaaacaaagcaactccaatggctgcggcctctactactgccgcttctaccaaaggctctgctaatctcgtcaacaatttcgatctcggatctcgtggacctccacgatcctctcacgtttccaattcctttagtgggtctcttgccgatgatcgcgattcgatctttggccagtccaacgctcagaggtctcaggatttttctggcctcggcgatattatgggtggctcggctaggtttactaccaaatctgacagtccaagggccaattcagccttcaattttgattctatgtttcctagctcaactgagaccggttcaaaatcgtcggagccggtttatgacaaaccggtttacgatgatgacgacgacattttcaatggtgtcccggggttgacgagttccacatccaaggttaagttcgaagacgttttttcgtcggtctcttcttcgcctcctaaacgaaacagcccctttgacgaccttcttggtgggtttggtaaagccgaaccccaatggaagagcactggtgctattagaccggagaaaactgataggagtgcgtctaatttcgatgatttgctacccggttttggagctactagtccaccaagtgaaaggtattatttttatttttgtttgtcgctgcttatgctttcttgtagtcatgttgttatgttcagtcgataaattttattgctcaagttcgaaccaatcatgttgagctactataaatgtcatatatgtcgcacccatttcgccattttgtggtagtggaagacttggagcagattcataattctgactgaagaaaatctggaataaggcatttgcatgtatttaccgggatctcaggcgtttgtaatgcttctgtttggcgtgtgggtgggttggttggttgggggaagatgctggggactgtaaaatatgtgcttctttcattacagtgggtgtgtgtgtttgtgacatgtgaggggggattaacaaggtgaagatcttttaaatttgtcaaatttatggtgaggatttgctaatggaaggcaaacaaggtttcaagactgatcgttggtgtatggactgacttgtagccctggcctttttttgattaatgttgaatttgaaagagatgaaccaatagtaattgctcattttattcatggggatgttcattttttagggttttagtctaagaagaaggggggggggacaaatggtatatatgcagtatcgatgtcccttttccatttggatggaagtctaatgttctttaaatagttttaacttgtctatgcatgtgtgttttctttttcaagtggctcaacacgtctctttcaattagaattctagctgtcttacgaacttcaagacaccttacttgcctattgatattctacccttcagtaataaagggtccacaaaagcttagtgatggtgtctaatctggtaggagaggaaaacacttattttttataaaataaagaatgaatttgttttattgttggatctgtatgagatcaatggcaaaaaagttcaaaaagaactccattttcatttgattgttcatggtgggagagcttcttggtaaaagcttacaaagtgttgcattacatacgggaagctaatttttacattagagaatatatttagtttttcaaatattgattttgtcattgtgttgccattttgtttatttatgcattaatatcatatattttctttaacaggtcagcttcagggacaaattggcactctgaaacttctgttaatgcaacaaaaacaagctccaaggtagtggaagatccctttgtagtgccaggacagtttggtgatccattggaagaaattagtaagccttctaattctggaagtatgaaaagcgattcagttggtaatgggaaagtatacgatgatgtggatccatttgacggccttgtaagatctgccacatcttttacctctgagagagataacaggggaaaggaagcaagtactttaagggcagattcaagtagcagcaggaccaaaatgtttcctaataatgaaaagtttgagaagctctctgtgagaagtccagacaacgaaacacagaagaaagtacctattgaaaatgactgggattttgagatgcctacagcttcctccaatcctcatacatctggacaaactatgcccccttcattttatgccagtactagttccaaggaagcaaatactcaagtggatagatctccaacatctgtagaaaatttggattcatctgaagatatttggcttactgtttcagaggttcctctgtttactcaacctactagtgctccaccaccttcaagaccaccacctccaaaaccagtatcaaaggccggagttaattcttctgccactacaaatgcaagaagaaagaataacgagttctcatcttttacaaactcaactcaaaactatcaggtccctaattcatctccaattgatcaacttgaagattttgccagggttaagagtcgagataatgttgatgagaatgtcaatggttcttatggcgaagaattggaaatgaattcagctgctgctgctatgaaggaagctatggatagggcagaggctaaattcaggcaggctaaggaagtgagggagagagagagtacaaaggctgcgagaaataaagaagcacaggtagaaagagatgaaaaatcagcacaggatgacagagcacgcgaaaagcaggagaggtttgagcgtcaacgtttgcagagggaaagggaagaagaaatggaacaaagagactgagaaagaaagggaagagtgaggagttgagagggagcgggaggaaaaagagagagagcaaaggagacttgagagggaaagagagagagcaagggagattgagaaggaaagggtaaaagctagacaagctgtggaaagagctactagggaagcacgtgaaagagcatctgctgatgctcgccaaagagctgagagggctgctgttgacaaggcaactgcagaagctcgagaacgtgctgaaagagctgcagttcagagagctcaagctgaagctcgtgaaagggcagcggctgatgcaaaggaaagagcagagaaggcagctgcagaagcccgggaaagagcaaattcagaagttaaggaaagggaagcacgtgatagggctactacaaccagagctgatgctgaggcacgaaacagagtagcagagcgagctgctgttagtaaggctgctgctgaggctcgggaaagggcagccaatgctgctagggtaaaccaacagaagaatgaaaatgatctcgaatccttcttcaataatactcgacctaatagtgcgccaaggcccaggaattcatcagtgaggccctcttaattttgcaaactgttttgagaaacttagtatttgagttttgaacgtaacttgtgattttgtgttgcaggatcccatgtttgatactcaatttcagaacaggcaagagtctgagacaacaaagtcaaccagtggatttcaatctaacataaagaaggcaaactctactacgaatattgttgaagaccttacatcaatatttaatggtagttccttgccataattcattatttaacagatgacaaatacattagttagttctccatattttacatctgctgaactttcttttcttgtgaagttactacagcatcacctgggcagttccaggatgttgaaggagaaagtgaggaaagacgaagagctcgattagaacgtcaacagaggacccaggagagacaagtatgtattttcttgccaataaaataataaataaaaaaaatataaaaaagaaaaaagtaataattcgttgatttttttttttgagaggagtggaagtgtatgttccacttaatttaccctgtagttaaatatacataatgtgcacccacacatccagttacaaaggtttatcaatttggtgctatgaagatctaataattaaccttatttttccaggcaaaagcactagaagagaagaatcagcgggaccttcaataccagagggagcaagctgagagacatgtaaaatttctgttcttttgcagttcattttttattagtgtttcttttcttggagctgagtacatatgtgatgacatgttgcttgagtcaattgacacccaggtgaagaattagagtattgggccctatcatgggtctgttcgacaacttcttctaaaacagctttcctttttgatttttcagatagaaaagaagaaatcttatattttatagcaattaatagtttattaaaaaaatactaaacaaaacaaccaatcttatattatcatatgaatctgaataaatacctaaagtggggcatcaaaccaccatcatagaaactaaattattacatgaagaattttcaaatgaaagttacataaaaaaattccaataaaggattgtatttgaattccttcacattgtgcagccaagtgccacccactggctgatcttttctcataatctagagtaaaaaattctattgcacaactggaacaaatggtagtttatagttacttaactgagatttgcaattacagtgtttgggtatttatgaagccatatttttaacagtacagtcaattttttcaattgtttttttttaaaccctaaaagacagcttgttgctaatgtcaacattatcttcactgttgtaagaatgtgctgaagttttgtttgttgcaatcaagttacttttacctacttatttgttgcagtcaactttataatgtgcatttatgtgtgtatatatattttctgaacatcgtatatatgtgtatatatatatcttttatggatgtatatatttatggggtccctcctgatacttgaagtactcttttttattttcctactagttcatatatattagtcatcaagtttctttttctttttctgatgccagagaattgctgaaacgctagatgttgaaatcaaacgttgggctgcaggaaaagaggggaatttgcgtgctctattatcaaccatgcaatatgtaagtcatttatactctatcaccttttttctttgattagtagttccagtcggttaatggtattatttcgtactcgtggttaaaatttattaaatgtttctgcttacgtttttccacttgttcttcacattttttttctacttattttatagatcgcacttcaaattatatttaatactttttggctgattcttttatttcagcaaattgttaaaatccatttttcctttattgcttgggattggaaacgtaaaatctatggatgaaactaaaattgaaatgtttataatactggagatgtttaaataaagaccttggtatccaataattgaattgtgactttaacttgtgatgagtagggagtcttagtaaatgtttgattcttgccttcccatgatttattaaatgaccagtaaaaaatatgaaatacagctgttaattacatctgtattccttggaaaagtacagtattatctttgatgaaacttgtaattttaactttttttagtattttttaatagtaaagttttttttttttt

SEQ ID NO: 378882 - DNA, 1373 bp, Cannabis indica
tattaggcctttttaatttgtggatcctgtgtattagcactcattgcacaagtaaatgtccggccctgataattgatatataaatgacaaataattaaaataagagtgattaatctagtatcaaaataatatatttccaagatttaagaactaaaaatttcaaaaatactaattgaagattattaccattcttataaacataattacaccacactaaataatagtctcaaaatataatatatttttttttatgtatttgaaaattttaaatatcattaatataaatttgaaattgtttaaataattgatttttttttttttgaggaaataagaactataaattttattttgctactaattagtttttacttttttttttgaaaaaaaaaccattattttaattctagagctgaattagtccatatcacaatctctatcaaaatgctacttgagtttttacttattaaaattaaataataaaaatcaactcaagaagtgatataataatatgaacatgcatatatgtcatagtgattgaaatggtgaattaatcaacaagatatgacctccccatcgttgaaatattgtttgtatccatcttctacaactacattattataatttatataattactattatttttcttattatcttaaaataggtttaatataatataatattaatattaatattaatattaatattattactattcattattaatattagaaaaaaaaaaaggaaaatgaagattgggggttgagacgagggcatgcaagtgggattgccactaagatgtcgaccacttcttttattttattttattttatttttgtaatttaagaagagtcaatttttttgacgaaaaaaacgtagttcaattaatttagacatgaaaaaattaattcaatctatacaatttctctttgaccaaattagaacttatgaacatttcatcatcgcatataatatatcatataacatcactatatatataaatgcatcttgatatatgaagccaactacagagcgtgaccaacctaacctaacccacttgtaataataataataataataataataataataataataataataataatttgtaatttataatgtatatatccatatattaaatttaagaacatataataacaacagatccactaccaaaaagaataaccttataaacctctcccaacaatatcaataattcataatactatctccagagcgatcacagacataagcggattagatttatacttagggcctatttattttaagagtccaaataaaaataattattttttaaaaatatacatatttttataataatttttaaaaatattatttatctttatagtaa

SEQ ID NO: 378883 - DNA, 651 bp, Cannabis indica
tttttttttttgtattattgtgcgacattagtaatttcttgtgcgatatattatgctaattttttcctatttttttcgtatttgtttgtagtttttgggacaaattctactgtatttgtgcatgtactggattatggcatttgggctatagagagtttcaactgggtattcgattccctaaaaagtaaggcgttgatgtttgacattgactctacatagaaaaaggtgtgtgaagttttgtatgaggagctggatgtggacccattggtgtatgaactaaaattagaagtttgttacaagtacattaaaggtcctaagtttccgcctgaggttttagagaaagatagtcaactacgagtgttcttgagcatgaaggcaaaaatgagtgtggacaacttgttgccactatttgtgactaaggtgagaaagaatgtgaatttggagcctactcctcgaaatgtaatgcctagaagtgttgttgggacattttttccaaaaactgatctgaggattggtttgaatgaccaacttggtactaatatagatgatgacagagtccatatcgcatttgatcattcaaattagttcgatactccattttacaacaatggtcttatggtagatttgggtggggatgatgatgtggctaca

SEQ ID NO: 378884 - DNA, 3682 bp, Cannabis indica
aattactattctaataattacacgacttaagcttagtaattacatagtgatctccaaacacgcccctggagatttgtgttattatattattttctaagtttctttatattatattttttttatacaattactaaatattttaccaaataagataaataagataatgagaatttatatagataattatcaatttatatttaaatatacattatattttaaaatataatataattattaattactatccaaataattatgcaacttaaatttatattgttcctaaattcctttatattatattagattttttttttgaaaaaaaaagtttatattggagcttgatctcaacagacaatgttgtaagaaaaaaagaaaaaaaagtttgtgaaaacaatattattatataaatgcatagcataaaaaatatatattattaattaataaaaaataaaggcaagagagacgagacggaaatgagagagggataagagaaaaccctcacaaatctggacagacactgtggagaaacaacgaagacaccgaaacgctagggtttaatcaatcgactcttctctgtttctatctctatctctgattctgattctttcacgaacctagggtttccctcttttctacttcttcttctccccaggatagcagtgcgagggtttttctcaagaaaggggccaagatgaggattatgatcaagggtggtgtttggaagaacaccgaggatgagatccttaaagccgcggttatgaaatatggcaagaaccagtgggctcgaatctcttcgcttttagttcgtaaatccgccaagcagtgtaaagctcgctggtacgagtggcttgatccttccatcaaaaaggtattttatttcttcctctacttctgtaaaaatggttgagtagagttgaaaatgaacgcttaagctttgaattgatgtagttagattggtttagccgcctctttttggactcaaaatttagcatttcctactgttctgcactttttagatttgagctaagagttagctttttaattttttttattattgtattgcataatttctggcagaaacatatatttgttaacattgaaagcaagcacaccatgaccagtttgttttttcaaaaattataataaaagcatttagaagatcagagtgttttctccttgcatattctatgatcaatccaatgggttacaattttatttagtgttatgttatttccttggaaatagttactttctacgctctcatctaaaagagctattctgaaccaattatcttgtctttatttctggaatactcaccagctcccgataatcatttttgagtgcaattcaagtgatgttttgatttcatttatttttgtagactgagtggacgagggaagaggatgagaaactgcttcatcttgccaagctcatgcccacgcagtggagaactattgctccaattgttggccgtactccatcccagtgccttgagcggtatgagaagcttcttgatgctgcctgtgttaaggatgacaactatgaacctggtgatgacccacggaagttacgtcccggagagattgatccgaaccctgaatcaaagcctgcacggccagatcctgttgatatggatgaggatgagaaggaaatgctttcagaggcacgagctcggttagcaaacacaaggggtaagaaggcaaaaaggaaagccagggagaaacagcttgaagaggcaagaaggcttgcttctttacagaaaaggagagaactgaaggctgctgggattgacactaggcagcggaagaggaaaaggaagggaatagactacaatgcggaaattccctttgaaaagaagcctcctccaggtttctatgatgttactgatgaagagagaactgttgaacaacccagtttcccaaccactatagaggaacttgaaggaaaaagaagaattgatgtggaagcacagttgagaaagcaagacattgcgaagaataaaattgcagaaaggcaggatgccccgtcggctatattgcaagcgaacaaattgaatgatcctgaagcagttaggaagaggtcaaagttgatgcttcctgctccccagatttcagatcatgaactagaagagattgcaaagattggttatgctagtgatcttcttgctggtggcgaggatctcactgatggaaatggtgcaacacgtgcacttcttgcaaattatggtcagacaccccgacagggagttactcctttacggactccacaaagaacacctgctggtaagggtgatgctatcatgatggaggcagaaaacttggcaaggttgagggagtctcaaacaccattgttaggtggagaaaatcctgagttgcacccttcagatttttcaggggtcacgcctaagaagaaggagatccaaacgccaaacccaatgctaacaccatctgcaacacctggagcggcaggccttactcctagaattggtatgacgccaaccagagacggctattcttttggtatgacaccaaagggtactccgattagagatgagctccgcattaatgaagaaatggagatccatgatagtagaaaagttgagctgcgaagacaggctgatatgagaaggaacttaatttcaggctttagcaatctatcccaacctaagaatgagtatcaggtagttgtgcagcctggtccagatgaaaatgaagaaccagaacaaaatattgaagaagatatgtctgacaggttggctagagaaaaggctgctgaagaagcaagactgcaagcattacttaggaaaagatccaaagtgcttcaaagggagcttcctagacctcctgctgcttcactggaattaattaaaaattccttgatgagagctgatggagacaagagttcttttgtgcctcctacagtaatagaacaggctgatgagatgataagaagagagcttctgacattgctggagcatgataatgctaagtatccactgaatgaaaaggtgaacaaagagaaaaagaaaggtgctaagcgttctgcaaatggttccgttgctcccatccccgagatagaagattttgaagaatatgagctgaaagaggtatctttacattcttgtgctctgttgtagatcatctaatcatgacatgctctctttctctctctctttcctatatatatgtatatcattcaatatgcacctgcatttgaactttaaaacatgaagaagatatggatttctccgaagctttctttaaaggcgttgttgggtagtaaaattttgaaattgacccgcttattatttctaatttcacattttgaaatggtcaattctgaatccattttctgatttttcccaataaattgacttatttgaatgtatatctcatataattatagcgatattctaatagtgtgtctgtttgaagcaaatagtcttaagatttatgggcatgagtatgtgctctattagaaccaatgtgagagcaagccagcttcctattcttctcctctttttcttccagttatattttgaaaatagtctttacttcggtatattgctgcttcacatgaacctctagagctttatagtgagaactatcaatttgcaatattgtaatcaatgtttaaaaaggcatttttgaggcgcgcctctcaagctgaggcgtttaaagat

SEQ ID NO: 378885 - DNA, 1145 bp, Cannabis indica
ttaatccaaatcaagaaactccatcctttttctcatggtccctttaagatcactagcctccctttcagctttctgtgcctgcagaatcacacaccatcaaccactgtaaccacaaaactccaatcatatatgttcaattataaaaacgccactcttgatctagtgataattcttaaaagccaaaaatgacaagctttcatgcaatgctgtacaaccagacatacagtacttggagatttaaacagcatgagcatggccactaaatcaccaatatgattacgaaaccacatttttttttaataaaacggagatttgatctagccaaccacttgagctcgccccaagtggcaaactataaaattataaaaccagtattaatagcattatctctactgtcaataaatttgatcacataatcaacttatcaggaagatacaacatcgagtgtttttttattttatttttaaactaggctttcccaccctcaatggtacatttaggactaagagaaactatagtaatgaaaccaacaagagacttgaacttcaaacttcgtaagaacaaaccacatatttgaccatttgagctacagcctacagctacagatcttgtatgtatcatacaatacttaaaattttattttgacattttaaaagccttattttcattgaatggtgcacctttgagataataagtatgacctagtgataactaataaagaatctcctacacatgatatgatacagtggaatcaaaatcaatttatgggaacatgacaatttaaggcttttctccaataatcaagataaaactatttttaattcaggaaaatcaaacactccaaaccattcaggaaaaggacacgattctagatatatgacatactacataattttaaaataaaacaaacaaacaaacatattatcaaccaaattataatgaaggaatataaaatagtatcactttacccttttaatttctgctggtgaaacacgtgtcatgtgtggaggaagttcttccctctccaagtcctacaagtgcaaaggtcgaagtgtaaatctaagcacaacacaaatatgcataccattctttatttttatttttagtttaaaaataaaaaatgagaaaagaaaatgaaaatgaaa

SEQ ID NO: 378886 - DNA, 1119 bp, Cannabis indica
gagacaaaaaatttcccagtcttcagtttctctgagtttgctatttgaagatttttgtcaagcctctcaaggtactcactttgaaatcgaaccctgaagacatgatgatgttccctcgcaagagtttggaagctgggttttgcataggaaagcgttactaaagaactagaaccaaaggagtccaaagaagatatttccaaggtacgtttatgtggaatcacaatgctttgctgttgaggtaccaaaaaaccaactatatgtgactctgtttcgtatgtggttgtgcctgtaaatagtgatagggccgacaccatcgcggtatatgatgatttatgtaattgagtttttcagattttaatgattgaagttggttttcgggtcattgagtataatagagaatctgttttgatttagaaattgttaggtattttcatgtttttgtttgcatttatctagttgtttcgcaatattgttgaatacctcaacttataaaaaggtccaatcattcttctcacttttgatataaaagaggttgtttagtaaaggaacttaaaaccaatgacaccctaaaagaaaaccctcaaacctaaaccatgacttcattcattcccgtcttctttccaaactcacttcttagatattcggagcactgctaattgcaatatcctgttacaatctctttctcaaccttcacttaaaaaaatataagagagcatttttttttctgggttttttaagggctgtgtttttgttatagttacaacatcattgtaaatttttaaaaagctccgtgttttattaacaaaatgataaactgctcactattttgaatattgttttgtcgttgccttgtagttgagcttcctccaatggctcaaggaagccttaacaaggccacactcagtggaaactcggctaatgacaatcgaaaagttgatacttttgctaggtaaacttccaaatacccactactctgttactctgccacggacttacttttcttttataataatgcaggagacaaaaattgttacagcatagaaagtctcttcctattgttagagattttataacaatggaagaaaatcaagatattacaactctattgtaatacaatac

SEQ ID NO: 378887 - DNA, 3836 bp, Cannabis indica
ttgaaacttttgtaagtacctgattaaattaattgccacgtggcaatccctgattggtctaaatcattaaattttcattatttaaaaaaaattagttcaaatataccaataagaaaatgacacgtgatataatcactacacatttaacggttaggtattaccgcgaaaaattaaacttaggtatttatttgtaactgagagttaaacttatttatgccgcaaattactctatataattatttataagtttcttaaaatatttttacttttaattttttgtatttaaaaataagaattgtttaataagtaccaaaacaccgataatttagatttttttttgttgaaagggataatttgctagattgattatcttatttataatgttggtcacgatcatatatatgatatattttactataatgggatttttttttattaattttgaattccctttaatattttaatgattctcgatatttttggtattaattatatttctaaaaataaatttgataaagtttacaatatttaatgaactaaattatattttcttttttttttttttttttgtagataaactaaattatatttcttttaacaaatcaattatattatattaaatgtactatattttttaaaacaaataaaatctgaaacatataatttaatactttagggtataatgactttttttctttttcttttttactaaattattttaatcacataattttttttaatcctatttcgatcagaaataaggtattatctttttttttttttatcagaaataagatattatgtttttgttttctatttaaaggttggaaagcagcataacgataataattcatatgttttacaaatatttacaggaaagcaactaatacttcaattttcaccatcttctctgttctattctcaattaacacaattttccatccccactttctcgggaaccaaacaaagtgaacccgactaacataaattcttattctctaagattttggaaaaccctgacgaataaaataaaaaaaaatacaatctttctgagattgatttcgaatttctcctgcaaattcgaaaattgtgcttgcgagtttccatatgaagaagacaccctttgaattagacccacactcagtctacttccaatctcaccaaataaatcccaaatctttgctgttcgaaccctaattctcattgaccgccatggatccccatcagctgcttttggcagtatcccctttcggctccgcgaaccaaaccctctctcctcctccgtcatctgacgatggaagcggcggtttcgatgattacggagcgtggtatgggaatatccagtacttgattaacatttcggcgattggggcattcttctgcgtcttcatattcgtcttcttaaagcttcgcagcgaccaccaccgcatgcctgggccttctgcactactgacaaagcttctagctgtgtggcatgccactggccgtgaaattgctcgccactgcggtgccgatgcctcacaattcctgctgatcgagggcggtagctgcggattgcttctgtcccttgctgtactgtcggtatttgtaatgcttcctcttaatctctatgctgggaaagctgttttagccgatgaattttcgaagacgacgattaatcacatcgaaaaaggttcgcctttgctttgggtgcattttctttttgtggttgtggttgttggtttggttcactttggtatttctgctattgaggaacggttaaaaatcactaggttcagggatgggtatgggaatttgagtgacccaactgcaaattctactgcaatattcactataatggttcagggtatacctaaaactctaggttcggatagaacagtgctgctagaatactttcagcacaagtaccctggaaaggttttcagggtagttttgccaatggatttgtgtgctttggatgatttagcttcggaaatagtgaaggttagggatgacataacgtggttagtagctagaattgactctcggctcttgccggaagatgggcaaggtgaagattctaatggtttttggggtcgtttacgttacctatggaagaaattgtgtgattcgtggcatcggataatgtctagcttaggttacacgtatgaagataagctaagaagattgcaggaattgcgagctgaattggaaactgaactggaagctttcaaagaaggccgggcacttggtgctggagttgcatttgtagtatttaaggatgtgtacacagccaataaagcagtacaggattttcggaatgagaagaagaagaggatagggaaattcttctccctcatggaactgcgtttacagaggacccaatggaaagttgagagggcacctttggcaactgatatttattggaatcacttgggatcgtccaagctttcactgaggttgcgtagagtgtttgtcaacacatgtttactgttgatgcttttgttctttagctctcctcttgctgttatcagtgctgtgaagagtgccggtcggataataaatgctgaagctatggataatgcgcagtcatggttagctttggtgttgagctcaagttggcttggaagcctcatctttcagttcttgcccaatgtcattgtatttgttagtatgtatatagtgatcccttctgctctttcctatctttcgaagtttgaacgacatcttactgtgtctggggagcaaagagctgcacttttgaagatggtgtgcttcttcctcgtgaatcttattctccttagggctctagttgaatcatcattggagggaactctcctacgaatgggacgatgttatctggatggtgaggattgcaagaggattgagcaatacatgagtgcatcattcttgtcaaggtcttgcctttcttctctagcatttctgatcacaagtactttcttgggaatatcttatgatctccttgctccaataccatggataaaaaggagactgcaaaaatttcggaagaatgacatgcttcaactagtcccagaacaaacagaagaataccaacttgagaatcaggaaacagatgatcttcgaagacccttggtagctaatgacacgtatgattctccaagggaaattcatatcgattttcagggacatgatctttctgtatatccaatcaacagaacctcaactgccccgaagcagacatttgatttcgctcaatactacgcattcaatttgacaatatttgccctgacaatgatatattcttcattctccccgcttgtagttcctgttggtgcagtttattttgggtatagatatgttgttgataagtacaacttcctctttgtttatagagtaagaggctttcctgctgggaatgatgggaagttgatggacacagtactgtgcatcatgcggttcagtgttgatatgttcctgatttcgatgctcttgttcttttcggttcaaggcgattcaacgaagctccaagctatttttacactcgggttgttggtagtgtataaactgttgccttctagtggtgatggatttcaaccagctcttatgggaggaatgcaaactgttgacagcatagtcgatggtcccattgattatgagatcttttcacaacctaagtttgactgggatgtatattatcaatgatttaaattgtattgttcctcccaattgtttattcaaccctcttaaagtataaactgaattaatgacaaacacgaaaaattgataattcttcccttgatctccatttttgcttactttcttcgcaattattttcatcttattatttaagaataattatataaggcacaattttt

SEQ ID NO: 378888 - DNA, 2971 bp, Cannabis indica
aaaaaaaaaaaaaacttttaatgagtctgggaaaacactttgcgaaacacttgagagatattattagtaaaaaatctgtttctgtattctgtatattttatactcagattaataatattagttgccgcttgtgaagtaggcgaattgccgaaccacgtaattatgtgtgttttattgtttaccgctttgatataaatcaactcgttcacatattcatgtcttagactaatatgattagactttaaataataattaagtgtatgatgataaatagcaatggttgaaagaaatatactatcaagaacaaggatcaaatcgagtctcacaaaatattaaaacaaaactaccgtacttaattggtgaggaaaaaggcaagcaagagtcgagagttgactattccaacaccctcccatggacagagaaaaacgttttgcttaccacggtttgtaattaaagctcataaatgatgatgggtcatgttttttcttttaaaaaaaacagaacttatgttgattaagtcaaatctccaaagagaaaccaatatgtatatatatttgtcctcgtcttcgcctcttctctcaaatactctttcctcatcatctgtttcatcttattgagaggtatatatcctagctataataatggggttactttcaaacaggattgaacgaagcgagctcaagaaaggggatcacatttactgctacaggaaagctcacacgttctctcaccatggtaataattaatgtgtaattaattaccacttaaaaataatattaataatgacttaaattgtaattaattaatacactatttttatgattattattgcaggaatatacgtgggaaatgaccgagttatccatttccgcaaatcaaagaagaaacacaaccccatacgcaccgttttggggagaaataagtcgtgtggagaatgcggttataaccgaattgaggagaaaggtatagtgaagacctgtgtggactgctttctaaagcaccacagactctttcggtttgaatacaaagttggggtaactgaggctatggttaaaaggtcgggtacttgcagcgccgcctctcccgacttggctgaggtggtgattcaacgcgccaatgatgagctaaagaataataaagagtttggagggtatgactttgtggagaacaactgcgagtgctttgctttctactgcactactggcattcctaggagcacgcaagcaaatgcattcaaagatgcaattcagaatgttcgtaaaactttccccactggggaacatcattctcccaaacccattttcgagtctcttttgaaaggctatctagatgataagatccgcagattcaacgaggagagtcttataaataagaaaaatgatgatgatgatgatgatgatgatgatgggtcagaccaagacgaatgatgattagagcagatgatggatcagactatatactatttacataaattaatgtatatgtgatttttatttttgtttttgtgtgcttgttattgggtttcagatacatatatatgtaaaataaagaagtttgggttttattttctaagtatgtattaatgagtcttataatttcaattaataaaagttttacttgatttggtatcaagtatatatcactagtacactctcatccgttggaggtggcggtcgtttcggtcggaggtgggggtcgtctggtggtaggaggtgggggtcgcgcgattcggttagggcgaagtgggtagagagagtttgtttagaaattatgaggagggtattttaggggtttttgtaaaagtgtcctatttttaaaattaccctaattattggttctcctaaccaattatcccttataaaaggcataaaaattcaaatttccctttaatatttcctagttcaaatttttttatattttttttaaaaaagaagaaaagtaaggcttgtaggtgtgaccattaattggttgcacacctttcttaatttctaaagagaatttaatttaatagtctattctctcttcattttattatcgtttaaaaagaaatttcattcaaacaacaatgtgattgataactcatataactatgaaaattagagttattttactctttttctttttctgcattaaattcgttttgtattaatgagaattaattaattattatttattataaaataaggttggactttaaaatatacatatatggtgacatataaaagtttataatatttgttattttgtgttattaatttttttctattcattatgttatagaaccggttctattataatttatatatgagatatctaattctagacttttctgacgacgatgacaatttcaatgatttttctagtattgataacttttctgataactgttttggtaccgatgacttctgcggtgatttttctggcgataattgttattataaattttaccaattttatttatggatcttttgtttagtttctcatatattaattattatttattttatgttcttatatttttttgtattatttatttctaccatacaaaagtaagctccattagttttttccatatttatgaaaaatttccacaatattatttgtttttgaaaactaataaatgagggatttatattaaatgttaatgataaaattattctatatgaaatgtttaataagaggattaattttaataatttatgtggatgtgaaatttatactttaaattgtaatgataaaaatggatatcataattcatatgattaattattatttctaagtagaaatatttatttgtcttattattttgcaataattaaaataataaataccatataaaattagttgtgcaattgcgcgatggtcataattatattgtgtctcataaatgagttataatcattaaaaaatcaaatcaaatataatttatgattattttattttatatttttttattttagaaattcatata

SEQ ID NO: 378889 - DNA, 1332 bp, Cannabis indica
atgatggtatatagttgcaagtgcttttctgtttgtttccataatacacatcatatcatatgttgaatttgtttttatttacttttattagattttattaattaagttttgttttttaataagagaacgctgcacatcaagacaacaagtataatattgaaggtattagtagttggttgtatagcaaaaggcaacgaatactataaaagaaaataattgagagagagaaaatggaaggtttaagaaatgttgaagattagagtgctttgctcttggtgtttggtggttgtgatattttccttaaaaaaaagtaaaaagaaatgttgaagatctttgttgtgagttttgggtttgaggtggttcaagactcaagtatggttttcctctgccagaggagcaagcgtgggtgtggctcttcctttcttaattccactcattactcttcaaattttgaccatcaaaaccccacttcaatgtttatatgtttttgtttgaatttacaataatatatacatatttatataaatgtataaggactttatatgtttttgctttccacattttggagaaattataacaattttatatgtatatgtgtttattgtggttgtgagagacattttagtggtgtaaattttaaataatttaagattttaaaaataaaatttaaaatagttaattacctgtgtatataataaaaaagactcatgtacaactaattatttgaaatcttatactccataccaaaaataattcagaattttttgacaactagctaaatacttactataattataatgtttattatcactatttccaaaaataaaatagtagttgaccaaagtgatgtctatttttaaaaaaaatcttgaataaatatatatacatgatattattctacaattggcacattataaattaatttgagtagtcatggtaattttctcatgaattttctatataatttagttttatttggattatgaagtaaatgtaatatgatttgattaattttagactatacttgtgttctaatttttatttaaaatattagtaaatttctttttattaatgagatggaaacttaacctacagggacggacatcgtaagtaagacaaggattccttgtctaaaatatgaaagatagcagggatgcgaataactttccattccctttaaacaaggtcaaaattgcatttttcactctgaggaatctggtttaactgtttttttattattatttattttgtgatattattatctctatgtgctaacccattgtcttacctgataattcaagtatgtggagattccaaatctccgagtattcc

SEQ ID NO: 378890 - DNA, 1996 bp, Cannabis indica
ctctcgtactgttactcacacgtcacagttctctacctgttttattattactttggtgtagtttatattggtgtataatatagtactgatcctaattccgatatgtataatcttgttgtgtataagtatattacagatttttcatacgtacccttgtattcaacatcagccacagcttctctgaaagtgaaagatataatgctcgcaatcctcaagctctctaatacaacctgatccatcaaatcatcatcaattaatgtcctttcagctactctctctctctctctaaaacatatatcaatgtttgcccttctcctcttctttttttaacggtactatatgtatacataaaaatatctaattcatatatatatataaatatatatataccttgtaagtaaggggcatatttctagtctgcgtccaagtcaaccgctgtttattttcttcattgagtctgcgaatttctttctgttcagcctgcataatatgtataggaatttacacattcaatgtgtagctaggactaactactaacttaattacattgcatatatatatatggtctgacataaaaaaatatatatattattacctaaacatgaattgccctagtaccgattttcgtatattttatattatattaaaatatatatatatgtatatataccaagaagtactgtaccatatgtctgttgacttttaaaatgtcatttaatattatttctctagaaacatatatattagtttgttttttcaactttgaactttgaaatttgaacttttgggagagagcgcagacaagctatactgtttaaatatttttctccagaactacgtagacgttggagtaataattgagctatagctagcctaaagaattaaaattgaatgtaaattacaatatggaaaatatgtaactaaaatagtgaaggctaaagaatatgcaaacatcgatgctctctctctctctctctctctctctctctctgtatatatatgtaaataataccttgacagcctctagaagcttgggttcatcatgtagaaacttgagaatccaggtcatgacgctagctgtagtgtcttgagcagcaaaaagcactcctattatgttatcagcaatctgatcattgcttaaaacctctcctttctcgtctttagaattcaaaaagcaatccactagatcatcattttttatatttaccactttcttctctttcctctcccaaataatatcactcaaaatcttacttagctttttccttgcctgtattatatatatcaacaaaattaataataaaatcaatatacacaataacatataattattgaaattaattaattaccaacagggctttcttgtaagaagttcctggaatattgttagggaaggagttgtagcctttgtctactatactgtaattctctttaagctcttttgtcacacgtgcctccagatgaccaaatattgatagtataccaacatcgaaagataactacaacaaatatacatagagagatatacattacacgtatacccaagtcacgagaaaggtataataattaatttttcagatgttattaaacgtgaaagttttattttaattatttatatatgccatataggcatacacatacgttacctttttcatttcgtgaaaggtgtttataacttgaccgttgacccatgaagtggaagcagagacagctgcggcttcaatatcagcaaccaaatttttaatggcgtcgagggaaagagagctctgaacaagcttccttaagcgaacatggtaatcgccttggtggaagaacaaggccgatggcccaattaaacgttccttgcttttggggtaagtgggcttgaataggtgagcttctgtcaccaacacgaactttgctgcctctggactcgccagcatcacacttgggcaccccagaatatgggtcttaaaaatatccccgtacctaaatatacacatatattatatatatt

SEQ ID NO: 378891 - DNA, 4074 bp, Cannabis indica
ttctccccctaataggtcagggtcagcaatgaaaagatataaaatcagaatcttaccaccttacacaatttactacaataatgtgcagaaacatataatccagaagtgtggcaaatgaagaaaaaaagtcaccgattattaaagacattataaattttctaataaattttatgtggaaaggtacccacttccaaatatagaacaacatccacaatatgctccaacacacgaggtccggctatttctccagattttgttacatgtccaatctgcaatgttcagaggatgacaagcagaaaaaattgaggtgtcatacatactcgctcagacaaaatccaagttatgagctctaattgaaagtcataaaaaccagtccaattgatgagttgattaaacatgctaaccaaaagtacaggcacattagtcttctttgcataccggagcaaggctgatgtgcattccttgacctgatatatgataaaaagcattggaataagcaaagttcataaattatcagtacttacaaaaaaaaaaaaaagtgtggcaggaacttaattctcttgacgtttttagtttgtcccacttagcacaacaacacattcagtttgtcattgttacaaagaaaaatcaatagtttttccagagtgggttgcattcaggtgtaaaataaaagaaatgcctgtttataaccaagaagaaaaaagttatctactagaaaattataaaacctgtgttatccctccagcacttccagtcacatcactcaaataaactgtttgaattgagtcaataattaatgcccggggagagagaagctgagctttattcactatgtcctgaaagaagcaaactcaccacttaaatttacctcattgagaagaatggtctaccactactagtagattcaatattaatctagaagtcttaacatgaatggcagaggagcaatcttcaagtacgattcaaaaatgatgcacctgaatatcagtgctagagtataagaaaagttcttcagttccaatccccatacggtcagctctgtttccaatttgatccacactctacaattagagagcaaatgaataattactgacaccaccttatgagaaaaataaagaaaattttacacaaaatgtcatttttggcataattttacgaagtcttaaacaacatgaaaagacaacgtgaatcaatagtccgtactctagtaaaaaaaacacttgtaatccgtaaaaatgtttaaaactctgtacaaacatatttttgtaatttttttctctttttttggttaattatgaaaagttcccaaaaataatactcttaccaccaataaaaattcaaaactaatatcaccttacaatttctggaaagcacacaacaacacaagctccacaaacacacaaatgaagagaataaaaaacccagccctagtgcaatgccttgtaactaactagaaagccatgcccctacctaattaaacttaacactatcacttcaattaatctatttcctgaaagaatagttcaacaaacacatgttttaccacttaatagtataataagaaatagaaagaagttctcacaaatctggaataatttcattttccagaccctggttacttaataagaaaagcataaacgactgcagtatttgattgaaggagcccaagtataccctacaagaattattaactactaacctcttcaccagagacatatagaactggggctgctctgccaagctctcccccttcagctattaaggcagcaatcttcctcaattcatattcaaaattatcatattacatgagaataaactcaaaaaaacataaatacaaatgaaataacaagaagtagttaactttcataataaattataatcagagaaacgatatggataaaagttattgaaacaataaagatcagatcaaaccctacagtacaattctacctgcaagatgagtgtactcttgccaataccaggatcaccaccaaccaaaaccaaagaaccttcgagcacaaaaaagataaaacattgttaattacgatcaccacctaccaaaaccaaacctcattatcagaaatcaaatgtagcaaagaaaataacatcatatcaaagccggacatgcttttcaaagtttaaccataactagctcacaaattattttgatcagtgctaccttttgccactgaagaaacatgttatctaataagtacatcatatttaaggtcaaaaaaacatgaaacctcagatattgattgttgaaaaatatcataaatttacataatataaactattaacgtagaactgacctggcacaagaccaccaccaagaaccatagaaacttcttcgcccaaaagtccaggcctgagtatcatgaacttagattaaaaacatgaaacatcgtaatgaataccaaaataacttggtatagagtatagaaagtaagtaacggaaataacaacttacaaggaaatccgccaacctggatgactaataccacgtttcacatctttaagccgcatagggagcacttgatcctccgactgtggtagccaagccccagttttctctgtcatccccaacccaggaatctcagccccaccggcaaaggcatcaccttcagaaaactccgtcatcgtgccttgagctttacatgaccggcacataccccaccactgcccatcggtatatccacaactcgaacagacccaacaaatcttgttcttcttcttcttcttgttccccacaatgcccctcaaattaatcttctcaatacctcctgacttggcatttttcacagacccataagttctctgttccaataactcctccagcccatcttccgaactcgataaagacttttcggtttcatctcccgactcttcttcgccgctgcctttctgaactttctccgtaacgagcctacccgataaaggctcgtaaactgtccatactttggaaggcttcctttctggtttagggtcgttttggccgtttggaacttcaaaactgaggctcgacgcttgggagccgaaacgacggtgaatttggcgggaaaaagtagagtaatgtgaagagaaatgaaatgggttgtaagttaatttgcgattgtagagagtgagaaggtgtttgtgaatagagacagctcggagggctctcatgtccaaaacttgcatgagaagaagattgggatggaaccctgaaactagagagagtgaagtggagtcaagactcagaacagttgtagtatttgcatatggtcttcttcctcttcgtcccgatcctgaaaaagtttgaacccggcaacttcaaaagacgaacggtaagaaagtaagtccttttgggtttgagatatatgacattaccctctaaatatgacaaattagccctaattccttccctctatttttaatgggtaaatagtggcataagtacccaaaagttttatgtttgtaagagacataaacccaatgttaatttttagtagcataagtactcaatgtttgcaaaactgtaatttttctctaattttgtcagtacagactaagatattgtcttaaacaggacacatataaaagggtgttcgcggtgcgggttgtgcggtttttaaccattttttcaaaccaacccgcacatgcggtttttctaattttccaaaccgcacccgcaccgcgatactaaaaaaccgcaaaaaccgcaccgcaaaaaatgatgcggtgcggtgcggtttttgcggtttatgcggtttgaactatcacaatttttttttttgaaataatcataaaataattaaactatcattaatataattattccaaaacacttaagaaaatacaacaaacttgagactaataaaagttataacaacaacaataaatcaataatctttttaaagtttcaacaacacacttaaatcaaaataacaaacttgaaactaattaagttctaacaacaatataaatgtacaactaacatacttacatcaatagattaaaaataaaacaaacacaaacttccaactccaaattttaatacacatgtatggacttgggtttgttgctaagaagaga

SEQ ID NO: 378892 - DNA, 3144 bp, Cannabis indica
aaggttattgatgactgtcgttttattgattttgggtcgaataaaacagaattgatgtggtgtaacaagtgtgaatcaaatctggttttttgaaagattgaatcgtggtttatgcacagaggactggcttaggacgtttgatggggtagacattactatttaagattggatagggtctaatcataaggctcttgtggtggatataccagttagggatagtagtgatacatgtggacaaactaaacgcaacaaccacttccactttgaagaagcttgggggtagatcttgagtgtagtactattgtggaccaacactggcaagatcaaccgattatgttgataactgggggttttagacaacacgcttctaactgtggaatgtacttcaaaagtggaataaaagaagaaaaagagacttactcgaggagattttttaagtgaagaaagtcattcatgagttgtcttcaaggaaccatcaaggagtttggatggagcttaaaaaacaagagaaaaaattaaatggactccttgacaaagaggagaaatactagaagcaacgtagtagagcgatgtggttacagtgtggagataaaaatataaaatatttcaatcacaatgcctcacttcgacgaaagaaaaataacatcaagggaatgatggaccacttggggctgtggaaagatgataaactagttgttcaaaactttgtcgagaattattttacaaccgtattctcctccttggatctgcgggaagatgttcttgatactattttggcagctattccactaaaagttacagcaaccatgaatgaagatttggaaagcccttttcaagagaatgagatagttgttgttgtcaaagatatggatcctaccaaagcaccaagtagtgatggtctcctgacactttttttatcaaaaattctggtccaaacttaaaaatgatattgtggcggtttgtctgaatattctgaataatggtgctaacattgtcggattgaatggtacaattattatattgattccgaaagtcgataagccaaagaaagttgaagaatttagacccatcaatctttgtaatgttatttacataatagttttaaagtgcttagctaatcggctacggtatacattgggagaggtcatttcaaattctcaaagtgtgtttgttaagggaagactcattcatgataattctatcatcgagtgtatttgttaagggaagactcattcatgataatgctatcatcgggtttgagggccttcacactataagaaagaaccagttcaggaatggatccaaattggctcttaagctggttatggcaaaggcgtatgatagggtggagtagagatttattgatgctatgatgagacgcttggggtattcaaatgtttgggtgaaaaagataatggcatgtgtcacctcggttagtgtttcttttcttattaatggggaagttatggggaaggtgactctgcaacgaggaataagacaaggggatcctttattccccatcctgtttctattttgtgccaaagtattttctagtttaatttataaggctgaggaagagggaaaacttcgggggctggcttttggtcgaaggggatttaaggtctctcatctatattttgccaatgataggtattttttaaagccacagaaacagagtgtcactattttcaagatttgctgaatatatattctattgcctctgaacaagttgtcaactaccataagtcggagatgtgttttgagcgtatggttggggaggatttgaaggaaagactagcagggatgatgcaagtaaaggttgttgataattacgaaaaatatttgagactcccatctttagccaatcaagttttgttatccaaagttaatgctatgtagattggggttaccccctaatgttcgtcctgctcttcggtgatgagccattttctttgtaattgttttagttgaatgaatttcatttcataaaaaaaaacacacattaatacaatcctttatttttaattgattacataattatttcttctttttttaaactttcaaaaataaaaataaaaattcacaaggtaaatattgtaaaagtaaaaaaaattacattacttttatcaaaaaaaaaaaaacattacaaaatctcattggagagggagagaaaagggttttactttgctgcttctttagtttatcgctactctctcttctccggccccgtttccgtgatcaggtacgtttctccattcttcgattattggcgtatgtatgcaaatatatatacatatctctttttgaaatgttgatgattgattttactgctgacaccaaatattgaagcttgattcgaacaataaatagtttttcctttttgtgaatttgtttcatctcctttggctctaatttctagttgcatagatcgtctttgtaagcttatagatattagttctacgatttgggtttgagaaattagttatcttggttgcctataacctgtttgataaaatgtctaacaagggaaatgttcacattggtttctaatatatattaacattggattggtttcatagttggacattgaaaaaaccaatcttgaagggtcactcaagagggattttactgctgaggtatgaattgtttttgagaacttaaactgtgtttgaagctttcttataatagtcaaaacttcctatacacattatgtgtttcttgaaatttataggtggaaaaggaggttgagtaacaaacatggtgatttccagttcaaatcctcacagtaaggagatatccattcgaaagcggattgctagcatgtaaacttctcactttccttctctatgctgtgttatgtttgctttcatacttatatttcatgtaaaaattttaaacccagaacatttttaatgcctttgaacccttcaatatcgacattacttgtttgtctggtattttccgaaattaaaattgaatctaatgtgtgattttattgtatttcaagtttatgaaatgaggttttgttctagactgacaggcttaggaatctgcaactacaatgattatgatgtgttgtaattgattactaattttggaagaagtcatggaaattggaaaataagaatgaaatagaataaaatt

SEQ ID NO: 378893 - DNA, 2008 bp, Cannabis indica
ttttttcttttttttttgaattgggcctgtctactctttttgtgcaaaaatatatacaaaataacaatatcagtcaaccccatgtaaatagtttgtaggtcgaattgtcaatttgcacatgggtttttaactatttacgaaattgccattagctaagagtagagcctgtctcatctccattatttcctaaaaataagtaatcaaagaaaatcttaagcagccattcattttttttttatgttgtcaggcaaagcagccattcaattatattatcgttgaaatcactcttttgagattcttcaataattgaaactagtagtttttcatttacaaagtttagtaatattataaatagcgatttgtatattatatatgtatatataaaattgcattcaaacaactactaactccactcatccatggacaaaatagattaattaaaaagaaaaaaaatccaaaataaaagttgtagcaagcaaggtgttgagcaccaccaacaactctatgactaaataacacctctcaagtttttcaagtttcaactatcatacatcaaagcaatcacattcacaattggtcaaacaatattattctaaaattccccacaaaaaaaaaaaaataatcaccccgttacagaattagctggttacatttatgtttcacatgattcatgactaaatcaaagtcatttgaatattaacataagctttaaagtaatataacaatttttataaaagaattaaactcaataagttagtggttgcccatattgatttttttaaatgtcaaagtaaaccccatcaagagtagtagtggcaatctcgtaaataagttgcaaaacccatgtcattttgttagcccataccacttataagtcctcaaaccatagctgtttgtcttagttgtcttgtccagtaagagaaagaggagagagagagagaaagagagagctgaagagaagaaagaagaacacgaaagagagaaggccttttcaatttcaagtctgaagaaattcaaagacgaaagagaaagaaaaaataaaagtaaacaaaaggtcatcaatctcgataacaatggcgaggttttggtcagtgggtatcatcgtgatctgcgccctaataatggtggtgacctcgttgtcggctactgttgaagccggcggaggaggcgaattcatcgggtgggttcgatcgaagggaggctgtgatgggtcaatagccgagtgcttagctgaggaagaggagtttgagttggactcggagagcaacaggcgcatcttagccaccaaaaagtacgtcagctacggtgcgctgcagaggaacactgtcccttgctctcgccgtggagcttcatactacaattgcaagcctggggcgcaatccaatccttacaaccgtcaatgctcctccatttcgaggtgcaggagttaattctctttctctttatttcaaacaaaaaaaaattaataattatttttttctttttgggttatggaaatgggtttgattgttatactttaacaaacgaaaaaaagaaagaggagagtgttaatgggggagggggcattgttgttattgttcatgcaaatactcttatagttaatatttcgaattttctgtaaaagcttattgtgatttcttttttctcgtatttattttattttgtttttcttggtgttatgagttaagatgtagaaatttcttcatgaaaaaaaagtatatttttttaggtttaggaggaaagatctgaggcttggttctatattagtacatgttacttcaaaaacacaataaaagaaaatcgtgagatcagatttcagtgttttgtttgggtatggtgaaaatgggattacctttcttttctttgggggaaattattcgtgttaggattgtatatggaaaagtgattacttctatacgctgaaattcaataaaatctcattttttttttttttttttaattttattagttttaatttgttatttttagttattttttagttattttt

SEQ ID NO: 378894 - DNA, 1949 bp, Cannabis indica
gaccctaattccttgacatacattcctttcacgggtctccaaagtcctgccattgtatgcgctcatggaatcaaaatcaatagctcgtgcattcaaaaactgcccaacaatgaaccaccgatcatccacaattatttcctcctcaaacccattatcaaactctactacacactcctcctcatcatccgattgaacctgagcacattggtcctctaaatcatctaaactgcgattgctagaagccatatcgaaaatagacaaaggcaatacttaaataacaaacctccaagatgaaaaaacccaacaaagaatcacacacctccaacccctcaacgaaaaaccaatcacacaccccaacttgcaacgaaagaatcaatcacacgacaagagaccaaaaaagaatcgaagaccactgtaatatttgaatcacacgtctcccacccttgaaatacccgaatcgcagatctcccacccctacaaaatctgaatcgcgcagaagaaagctaggaatgcttgaatccaccccacaagacctgagccgccggactccaaccaacaagaactgaaccgcaaaccaccaaaccttcgaaaaccttgaacgcacggcacccacatgacttgaaaaacatgacactctaaaccctagaattttaacctcacatctggaaatcacaagacttgaatctcacgacactttaaaccctagaacttgaaatacacgtctgaacaatcacagggaaaactctaacacatgtcaaaagacaagaccaataaaatttgaaagtagcaccaacgtaaaattataatcacattaatcatcatcaattaaataactttgtagcgcttcgtttgtatgtcaatgcatggaaaagtcatagagtcaaagtacatatagaattgaattgaagtggagagaagaagaaaataatggcgaagtatagtgtttggttcacgtctcgtgtttggttctcgtaagcccttacaacttattgataagaatgtctttttttttcggcacatacaataaattataattttttttacaagtgaatactatagttacttataatttttcattattctttttttttaatgaacttttgtataattcatagtacaaaaaataaattttaaaataatttatttttacgcgcctataaaacagtcttggaaacagttgatttcagatttttaacgctataaatatttaaagtttcttaaaaatttgtgtgaatttattataattaaattgcttatatatatatagatatataaaaaagggatataattaatccatgtaccaaaaatcttaaaacaagtagttttaaagctttaaactataggcccctaaaacgatcgagttatattttaaatctattttagcaccatatatgtatttaatttttttttttaaaaaaaaatcaatagattctccaaataactataatatatacttggtgggtgggatcaaaagcataatataaaaaagcaaaattatgaacacttattaaaattaagaataaatgaaaatgataggcaattgggaagtgcggtggtggagactggagactgacatttagatcgtggttaaggctagctataccctatgtcttccacctttcaaccgtttgctagtgcattattgtttaaacaatattctgtgtgttttgttacttgatttgctacagagtaattcattgtctggctagagcttcgtgtcacatgtctagctacaactttggtgttacattattcggcagatttattgtagcttttggtgatattaattttaatgaaagttcatctcttttgtttttaaaataaaaatgaaaatatgataatatgtattttttttttcttttttaataatgtattggttcctctatattatatttgtgtttattttgtattttctttcaattgttaaatattttagggaataaattgac

SEQ ID NO: 378895 - DNA, 11612 bp, Cannabis indica
aatatatacatatataaatatatatgtgatattgtttttaaagataaatatatgtcatattgatgtatatgctatcaagtatttaattaaaaaaaaatgaattaaaatctttctatagaattttatcattaatttaggatatattaaatttaagtataaatatataaaaccaaagtatataacaacatctggaggacacgcaacgaattggtacacaataactctccccagatgtgttgaaatgtgttaacaatatttgtacttcttttgcagagttgcatgataaaactgaattgtgatgttagagtgggcttagagagcatgtgcattgctggtgttgctagggattatttgggcaaggtgattcgggttgacacttctcgactggagaactcagatgcgctatgtggagaagctgcggcctgctgtttagctgtttcgatggcaatggatctaggatatatatattattgtggagagtgactcgaggctagctatcaatgcgcttaatgggaaggtatctcattgggctcttgagaactatgtcttattttgtatttagtcttctcgtgctttttattagtttgtaatttttctcatgttagtaggtcttgtaactttgctgctcataatgtggctaagtgggatttttcccaccaactgtatggctctatttcgatttcctcaattccgaggaatctattttgtaacgaccgtgaggtttaagtggtttattgcttaatgaatattatcacgcttattataaaaaaaaaatatataacaagatttatatttaaatacgaaaataaattgaaggcacatataaaaaaatatattttaatagattaataatgcttgaccatgaaatatatttatatatataaatagtgagatttattttgaacaattaatttacacaatacaatatgtaactaatcttaatcacatatatatatatatatattaagtagggttgaccaaattatatttaattgtgtagttgagattatttatatattatagtgtataaattaagagtgtgtgactatcattactaaatttgagtacaagattgaataattacattttaaaatatttctaaacatatctaaattaaaaggctaaaatagaaaaaagcttatagacatatatgtctactatccacatgtcatgcactatattttctagaattgttagcattgttgatgtgaaacaccaatgaattaggtataacatgggctcccataccactaattcttttagaatgtatttatatatatttttaatatatttatatgtatatttaaatttatagaaagagaaatggcccatcacatgggatattattatgaggatagagagatctcaccattgaatttgtatgaatattattgtaggtcccaattaaacttaggaatagcaaaaagatatagttggacggattagattagagctttaatctgacgtattagccattaagggtaatctgaaataattcgagcgagattctgattgttgacccgtcctgtcctaatttagtaccaatacatggagattggatcaagatctgccccaagaggattgtctactgattcagatcgagtcgaattataatctgatcagatttgactcgatccgtttgcactcctaattaaactcactagtttgatataaactatacaaggttggtcagacagatcctattaaacaatctttgtaggtgtttgaccaactcaatgtaatcacgtggcttgagatggcggataacgtataaaatttaatgtaatttacattgttaataccaaattaataaaatatgttctacgtaagtattaaataattttttaagtgaataatattaaattttattaatacttcactcatgcatggtattgttctgtcaaaaaaaaaagtgggaattcaagtacaatttttaagtaaggaaaattgatttaacaaagatttcaaatttaatgataattgtagactttatacttttttatattgtcctcttttatgtttattttttttaaaaaaaaaaattcatttttaccattttttttttaatattatacctattttacctctgttacttttcaaatgctttccatgtgactcctttatctcaagatattttaggtacaaaaaatatgtttcaattaaatataaatgaaaggtgatttagttaattgataaataaaagaagtattttctaatttaccccatttgacttaatattattacataaaaaacaaaaaaaaataaataaataaaagccaaatttgtaggtaaggcataattatttaagataataaaatggtagtgcaaaatgaaaaagaagtagaaagagaacttctattaagaattttgagattttatgctcaatttttttatttaattaaaaaaaaattaaaaaaaaattatttttacattatttgctctaaaattgttccatggagtgagagagataataaagttgaatcattcattacacatccaaatccaactattttcaaactcttaacaatggcagaataaatttaaaagaaccatatttgatattttatatataaaacaagaaaaagaattataattttgacatgaaagaatgcattcctaataataacaacactatcattcctaaatcctcttttttttttactgagacctcttcccgcggttcgtttagtcgaaaaataaagaatttacggtcaaaattgagaagtaaaaaacatctggtaagatcaagatgagggaagattacccaaatttgttaaggaaaaaatgtaaaaaaaaaaatcgctaatcttcttcggcttccatagtaggagtcttcgtgcagctctcgtctccatgaagttccaatagcttcgcttcgggattacatagccctacattaataacacaaatggtatgagaaagtgtaaatcttttctatacaagtaaatttccccattgaagataatataattcttattatgtttgaccaagaagattgaatttgataacacatttgttatgcaaggccggtcttgagctgaggcagactaggcttgcacgtaaagcccacccaatccagaggtccaaaaaagatatttcacttttaaaatatacatatatatttttttaataaaggacccgataatttttcatttttcttaacgcccacccaatctcagggccggccctgttgttatggctatgcatgggattataaccattgcaaatttgcaataaggccaatcaatctctaacctaactaacttcaattactacagaaattataaacagttttgtctgttttcggatcaaaatccaaggtaaaagttatcttgcttagatgttctccagatacttcatagaagacaagatatctcgagtttcgtacaagtacttggaataatttggtaacgatgtgttgcagtgagaagaaacactaacccgaacatttgggaatatcccacacggcaatagatgtcgatgtacaatctcgtgagcagagtgcttgattgttttcgtggttgacattcattgcaagcatccatgcaccaattgtaacatcttcattgctaaacatgcgaaaactgcattcaaataaagaacagtcagattaaaacctttttttacagtgatcaagacaatagtgatgatgggtggtaccataaaaatttaacacaatatatataattataaataaacgaattcgtgtaggtacttcttaaacttagaatgctaaagagaggaccgaacatagagaaggtcgtaaaggaaacaagcttgcctgttatttctaagagcaaccaagcttgaaacaacatcagcagaaagagcatatattggaccataagcatgaagaaagtactccttcccgagcaaatgggctagcggttcatacctgcaaatatttaccattatgatcatcggcaaattcttaatagttttttttctagagatctacatgattatctaaggatccaactttccattttaacttctaccccgattgagtctcattgtgatatagccacaattatgattcttcatggtttttataaccaaaggaaggacttctagtagtaagtaccgaactagtatagcacattggtaagataaatatgaacaggaaaaaaaatcactaaccatttcagctttggatcagtaaagaccgggcctttcttcatgcatccaaggtatgtctgcgagtgagagcgttctttagcaagaagcagtgaaaggcgatctgaaaatattgggaaaagattggattggttaaattccatgttcaaagcaaagaattaacatttatacggaagatggtaaagcttcaacttctcacctggccttaaatatatgtcatcatcggctttaacataaaactcggaatcatatagggcataggcagctttaaagaatgccaacctgtagtaaagcatagaatatttacaaagaactaaaatataaacgataattgctgatcacaagctagcactaacgttttgtatggaagcttactatactcctcttcaatatccaatagcaaaaaatcatcataagtagcaatctccttcttcagttcagacatctttgatttatcattggttttaccaatgacaaacctgaaagcaagaccggtggcttcttctaatctgcactcgaaattacaattcatttaatatacaatcgaattagtcacaatatgaatgcgaaaatagaagtaccaaacaactattttaagatttcaaaatcgatcgaaacaactaaggaatgcagggttggaaagtttcaggtgcagcttcaggcatagtagcaaccataagaacgcaagcagagtttggaaaaatggagggactagattgtattaatcgactacaaacaaacatatacaacaatacacgtgactaatacagaaaatgaacaccgattgacactctaaaaattaaaagagctgaacaatgagaaatgcagtgacaataattacaaattacaatggaccatgaagtaatggaatccatgtttacaccgataacttgtatgtggttatagagaggaaatctctaataaaaggaaaaaatctatcgaaactaatgaaacaaaattaccaagctcatcagattcacccctgctcctattgttcacataaagattaaccggtacagtatttttctttttaaagcatatgattgctacattcatgaaatctgtatatctctgaaggtatacgatttgttgtcaaattcccgcggtgttagtctccccaccatgaactatacaagaagatggcataaacatttggataaatgacatttaaccacacgatttcttagaccaaaggcattcaatcaacttcttctagtaaccgataagactccaagaatgcttacaagaaattcaaaccattccacattattccctcctcctagtcctactcattacttaatgttcaacaagcctacattaacattcgagtcaaatccgaatcttacaatcctacttcaaaaagctaatccatctctagcaaacaaaacataatcttggttcttggtgccactttacagttcatagtctctgatatcagcttaagttgtcaagtttcctttttctttttcccaatttacaatttagctttttctataattagtaaataatacatcataaaggaaagatctccaaactagcctgccatcgaccctgagtgcacgaactgctaatttatatgcgacaataatagtcgaacaacgaacataaatcagatatgcctcaaaaaattcagacaacaaactagcaaaatactctaacaaagagatcctatttcattacaaaaagataatctaatcaaagatgcagaaaccaaagctaagctaaacagtcaagagtcaaaagaactaataagcaacccaagtgccaatccaatacattacaaccattaaagctaatttacaatatagctttgaatcctccacattcctaggaaatccatttttagtaacatcttctttctcaaagatcaaatcccatcactcttactaaaccaaaatctctaagctaagcctcaaatccccaaatcaactattaatctctactaatttagtcacattgattgaattcaaatacccaaaaagagaaaaacacaaagatcaaatctttaccgttgaaggccttgatgatcagacggcatccaagtcatcctcaaagatcgtctcctaccaaccgatccaaaaccagtttgaatccccacaaagcccataactttatgtcgtttcttcccatccccagaacccaaaacaccaccaaatccatcaatgttactaccaccactagtatctctctcccaaacaactcgaaccgatttgggttcagaatgggggcaattattaaccggcctgagaattgcgacgaatccgaagagaaatccggcgatcccgatgactaagcaagtagaaagtaagagagtagtggtggatctgcgagttgaaaggttctgttgacgagcgtggaagaattttggggaagaaggcattgttggtgatgaaccctagatgaaattaaaattgggggttttgtgaaagtgttgggaaaggatcatagggagtgaaaggagagaaatttggaagttgaattgagttgggaagtaagaaagttggtagctttggctttggttgagagagtgattgattgaagtgactctcttcttctttgcttcttcttcaattcaactcccaaactattttcactcattacactatgtgtgctctttcctcaatttggtttttttttttttatataaaatatttgtactatattcaaatttgattagtataatgatttgagatatacatgtgagaaatgttatagggtatagatcattattcattgggcaccatttggcctagtgtttttagatgggacattttatgattagttaatttttttaaaaaagttatattaaattacatgagattttatatttagttgtatcaataataatataatattaaggagagtgctataaatcagtgacttttaatatttaccgaattgtagtgttggacatcatgtaaggagcattgttattgaacaccaacactactgtgaggtgataacttgtgaatggtaaatatcttatcattgttattaaattaagagcattgttattgagtatctactacctttagacatatcgtcttgcgattggctaacaatatttcttaaaagttattatattaaactatatggaactcgatatttagttatgaatatataggaaaatattaagtaccctgatgttctagcatttataatttattaatgcgaccatcaatttctactaccaaacacaatgacaaatatatctcttttagttgtattttatttattttttgaaataatttattaaatgtggccctagtcacatatagtttatgacattaaaagtgttgttgtttaaacttctgttggcatctctttgttatgttaattacaattataattcataaattagtttagcatattctttagttagacaataactcaatcaatctcctcctttgtaactcagttaggtgtaaacaatcatatttctcatatttctaataatcatcataaaataccctataattgaaaaatcaatataaaatgatacttagaataacaaaatgaggatatattttcaaataaaaacaacaaaaatagtccaaaaaagggaggactaatactaaataagacaaacatgttttatcattttacacaaattttggtgaactattatggttcaaattacctattggtacaaagaaatgaaccgatagtaacatgtgttcctcatttagtaacaaatcaatgcaagtttacaccactagtaaacactaaaccaacaactcttaaagatccttacccaaaacccatatcacagtcattcatatatattgaattgaataacaaaagtagatatataaataagatatggaacaagatatttaaacagagttttgagtctaaaaaggaaaaaaactcatgttgttgggtacaatacaaccagaagtatctcaacataatgtgttcagcaaaatagagaccaaaacaaactctctcttttctatcttaatattgtaacagagcctaaaaacaacataggatgccatttttgcttatctacagctaaaattgcccaggcatatttggtttttttaattaagatgaatagttcctaccgggcacatttcccatgtctcggccaggtgtgtagctgttctgattgtctgcattaggtacattaccagaccatccaccgttattaccctgatgctgcattcctcccatgttcggtggtggaccgctgttgttatggttgggtggagatcctccgtagttattcggtggcatgccaccccagttgttgtttggtggtggtggtggcattccaccaccgtagttattgggtggacccatgttgttcggggggtatcctcccatgttgttggggggattagggggataaccttggcccatgttgttgggaggataaccgcccatgttgggaggtggcggacccatgttgggtggtggtggcgagcccatgtgaggcggtggtgggcccatgtgaggaggtggtggacctctgttgggtggtggaggccccatgttgggggaaggtggacccatgttgggcggtggtggacccatgtttggcccagcattgggaggaggtggtcccctctgaaaatctcggctttgcacattttcccgtctcctctcaaagttccttgatctatcaaaattacgaggtctgtcattacgcctatttctctcatttgctctagcattgttccttatccattcctcatggtacttggggtcatatggaaccgcttggccgttaataaaaggttcccctgccaataaaaaacaataagcaaaagaaaaagagaaagagaaacccgaatgctaacaaactcatgcaatcttcagaagacagatgcaaaatttgaagtttaacagtgaaaaaagtaaataaactactgacaaaattattggcaacccaaacatccaatgatgtaggatttgcttagataaaggctaagcattgggtgtctaattataaatcatcaacaataaggactcgggtgcattctttctcaacggttcgtgtaattggtagttgcgatcgtaatgggacagcttttgttacccaaaaaaaatcatccttatctcttttatgatgttttaaaatggaactaatatgcaactaaatagtttcaaaatgtccatcatattcttacctccataatccttgttcttcacatccaagtacgaatcaggtaggacccaacgcactttaggcaattctgaagaaattaaaacacaatcatgagaaatacaaacggataacactattaacattcaattcaaacttgagggattaaaaaagatgatgtacccttgagtttgtaagaaagttcttcagacacaagagccccaaaagcaaaatagcatctagtagaaactgagtatatcttcattcttgcttcttcctcactgtttgttcaaaaaaagtagcccaaaaaatgaaaaatcaactacataagactgaattgtaatcgcagtaaaataaaaacaattatcaaaggtaccacaatcccaattctaatgattaaatcaatccaactaaaataagcacatacaaaatacaatacatatcaaggatacctatacaaaaatctcttcaggtttcattacagaactcaaaaattaataactcacatgaatgcagacaactcccatttctagtgtagcaatcttaaaattaaaagtacatttcaaacttccaaaactcaaaaataaaataacaaaacaaagcaaaccgaacatcatttgggaaagagttatttgcagcataaataattctggaacctgtagctacttgttagtttacgaaaatacaacttaggtatctacgccgcaaattaagtaccacacgaattttacaaaacaactcatcaactgagaaaaaaatactactaaaaaacgaatcaaaaattacaactttcaaaataaacagaacactttattagagttcagaataacccactaaaaaccactactccacacaaataaaaagctcaaaacttattaaaaaaaaaacaaacagaagaaattaatcaactccactattcaagattgcaactttaagcacatcaaattaaattggtaaaactaaatttcaaatgaaaaataaaataaaaaaacaactaaaggaacatgaattcataacactctcacttttagtttagtaatcttaatagtacgtttcaaacttcaaaaccctaaaaaataactaaactgaacaccatttgggaaatacctaaattcaaaagtactcaaaacaactcatcaaaagctcaaactttcaaaacaaacagaatgattcaatcaaccccattaagcaagattaaagctttaacacattaattaaattggtaacacaaaaaataaaaaattaaataaataaaggaagaggaagaagagtcacctgccaacgaccatagctagggttttaatataactatcaatgatatcatctctggtaggatcaccttcagggggttccataacaacaagccagtgttcaaaatcacacccatcgagaagaatcgtctccttcgggggtcgattagaccagttagggttaggatccttgagagaagacgacgtcgtattggatgagaaacatcggagattggaggaggggagagaaacgttgtggtgggttaggaatgctccggcgagagggcggagtcggtggaggagagagagggaggagcgagagtggactgtggaaatggaggatgaagttgatatggagcgggaaatgaaagaggctagggttagggttttgggaagagaacgtgatacagtggttgtagccatggctgaagagagagagagagaagagaactgtttctgtcaaaaaccctaagaaagggttaagagagaagatgggaatcaaagatgagggttttgggagccttttatatacactccataattcccaaattgcccttgcatttcaaaactaattccattttattaagagaggagtactaccgagtgattggcaaaacggatcagacacgataatataatttgaaacttgcacgaaagttaatgagtttgtatttgtcttaaatgggtccaggtcatgtttgagttgactagtctaactcgtttaataaacgggtcgtatttgggttgatacgaaactaacatgttaatgacataattaaagttattttagtactataatatgttataattgggtcataaatgtgttattggttgatacgtttaaataaatatgcttataaacgggtcgtgtttggatttcattttttgacacgtttattaaacgagtcatgtttgggtcgagcatatacctattatcataggtctcaacaagacacgaatacgacctgcaaacacgaattattacccccaactattgtcaacttcctattacaatctcttagtcaacctctgtgcccaaaaacacataacgaaatattttttttttcacaatagtgttcgtgacactcttaacatcatcctttttttttttt

SEQ ID NO: 378896 - DNA, 4800 bp, Cannabis indica
aactcaaactcaaactcctaagttcaatctattgatttcattctcccaaagtaaaaaacctcacacaagtatgaaataaaccaaagcttgctccttttggttcttgcccaaaaaccccacatatggtgtgattaaatttaagtgatcatgtaatagaaaggaaaaaagaaaaatagggtcaaaaataaatattggagaagaaaaatgagcgtttcgttgactgtaatgaccttcaatcttcatgaggatcagccacctgaaagccccaattcatgggataagagaaaggagttgtgtttaagagtgatcactagttattacccaatgattctttgcacccaacaaggtatttttcagttaccttttatttataactttgcttatttgtatatggatcttgtttatggttaaaaaatgatcgatttgattgatctgggtcttctttgatatatgtttttgatgtgggtttttgttctatttcgatgtagttgagttttactcttgtaatgtcttctctatgggctaggattttggtcactggtgttttttgggttggaataatgtttgcttcactttgattatatatatattggaagaattggttttgttattgggttgctagtttcttattgagatgtttacaattttgtagtttctcctattgtgttctttcctttgttggctcattcttttaatcacttattattaatatttttctataatgagcttcatttgtgctcaggagtgaagtctcagttggattatcttcaacaaggcttaccaggtattgagttattactattttaacttgtgaagcttaccactgatagctttgctggatagttaatatgatctctataaagatttttctctgtattgggggtacataaatggctctagttttaattaaattcataggtatgagatgatgtcttgagcaatggttatagatgaaaaatattatcaatttcttgtgtttgatgtgggtagtgcatataggcaacggtccagtgcattgttcttattatctccagattggcttatagctgtttcgcctgctcttcggtaccatgttatgaatctcaagtcttaatgcttcaaggaagttgctaattttctcatattgacatccttgctaatgattaaatatgtaaatgtatgaatggaaaggaactaatcatgttagtacaaaattttacagttaaccttgctaattggcgtccggtttgacaaactaaatttagtgatatgctcatgtgcttgctgaactcgttctaagtcttatcctacatatagaagttactttctgttggccttatgttcattaggttatgatcaattcggagtatctagaaaaggaccggaggacacttcagatgaatactgcacgatcttctatgacaaagaaagggtatcagattaagttctttaaaccatctagcatactttcactttcttctattcctttcggaaaaataagaaggggaaattagcatatttcctgtttattgtcatttcattaaaatttgatatcgactggccctttctccattgttgtttatcgaataaaggtggagtttctagaaggtggaacgttttggttatctgaatcaccctctgtccctggaagcatgtcatggggatcaacagttccatgcattgcaacgtgggcgatatccttatcattttacttgctttcatttgcatgtttttcgtattgtgttgttctattattatagagaatccatatcatttgtactctttgacatgatgtccacacattccaactgaaaggagttgagccacccggattttcattcgagatagtaaatacaaacatggatgaatttagtccacgtgctcgtagacgaagtgctttactcacctggcagcacattgcttccttgcctcctagcttgccagttgtgtattgtggaggatttaacacacaaaaggagtcaactactggacggttcctgctcgggaggtcaaggtatatccgaaacttacaaatcttgcttgttttttatgtgccaaatttgttatttccaattttgttgtgttcatatatcgatgattgcggagaatggtaatgattatttagcattgttaaatatatggatgattttggtaggtatacgttggagctaatgagatgataaattttttgtattttcccaccactttgatgacaaaacactagtaccttcagtcatttattcaagacaacttccattacaatggatggttttaacggttagctaagagtaacacatatttcattccgcgcagctgttgaactgattaactggttagatatttctctactttatgtattttctggtaaacatttgttttcctgcttgaccacagagagcatggtgtagttggagatttgagagatgcatggccgaacgcacgggtgaggaaaaatctttctcttattcgcacttatcatgggtttaaaggtaacgctacactacattttgatacaactcacttttatatgataatgtccatagcctaatttttgaatattgtctggcaatttcaggtgacaaacaaggagcagttgaatttctcaagttgattttcagagccctctgcctttgctgggatcgtcaaactcaagatctgcacatagattggattcttttcagaggtagatctctgattcccgtttcatgcgaagtagtcaatgataactccgaaggttcttatccctcctctcattttcctttgtttgctgaatttatgcttcctcgtaccgtgagaatgctcgaaccacccacacaagaggaaaactgaaaatccaattgttttggagccgagctcctaaggccaattgctcatcctttcatctctatgagtattatttatttaggttgttagtttaaaagcagtcattttttgtatatatttatattatatattatgatctttattcttcaagtggtgttgatgctatttagtaaagattatggatgtagttgcattttaagtggttgtatatctatgtcactatgggctgtgaatcttatttggaggaaattttttattcacatttatgaaattgcacttttactcttcaataacttagacttcaagattgtcattactattattttcttcctctgattttgtgttactcaattcatgcaaatcccacttagagggagtagaaaatttaagagaaaagtaaaagaaaaagagaaccagggacagagacaagaaatggatgaccattttcccgagcctccagcatcgatatcggtacctttcgcaccataagattgtgcagcctgtcttgattggaatcgaaagggaactagtactagtccatacaacttcagaggttcccatgaatgttaacttaccttgggaaattgattcttctgatttctccatttccataaaattcatccattctttaggaaatgtcaaaactagaaacttcatttatagcatagatggcagttaaaaaattgatgtcatgtttggtatcccatttgtttttctagttattcattcttattagtacattagaaaagaagggtattgatgattttggtgaaattttcatattttaatagcaccttacatttcatcaattgtagtaatgtagaagaggtttaaaaactataaatgttcatttttttggaaactgaaaatgtcttgtcaataaaacttccatttattccaaatctagatctatattttcttttaataaagtttcatgagaaaataaagaaccccgcaaccaaaggcattcaatcagttcatttttttttttagaaaataaaggcatttcatagtctctatgtgcaacttttgaaccactagtagacatgtcaaaaagattcatttagttggagcgggttggagctccgatctgatggatcacttctgatccgaaacattcgggtatttattggatctaggatcaaatccgctccgcctcgcctaatttttttttttttggatcgcatctgatctgacccgatttcaatttatttaaaaaaaacttaattcaagactcggaccgtagactcggatcccttgggacctggacccgaacccagacccagaccgggaccggtaccaggactgggacccggacccagaccggtaccaggactgggacccagacccagacttggacccgaacccgatccgaactcggacccgacttggcctcgaacttggactgagacccgggaccgaacctaggacccaagaccaagactgaacctgggacccgagaccaggaccgggaccgggacccggaccgactgggacccgggacctgggacccggaccttgactcgggacccggacccggacccgggactcagacgcagacccagacccgggacctggacctagactcagaccgggaccctaacccggactgagactcgggattgggactgggaccagactcgaacccggacccggaccgagacccagacccggatctttacacaatctattaatacatgtcaacaccaaacatagtattgtatttaataatactaatacaaaattaaaatggatataaaattataagttaatattaaaattcttaacagaaaaatagtcgggttggaatcgatccgatccgagtatctgatctagcggagcagatccttacatgattgggatcaagtcggatcatatctggatcagatccgacccgacccatttacactcctaaccactagtagcagagtctgctgattttgtagctattcttcggggaacgctattacgtgtaaggtgttgtgttttatgccctaa

SEQ ID NO: 378897 - DNA, 4555 bp, Cannabis indica
tttggcattgttttttgttttttgtttcaaattgtgttttcaaaaataagaacaaaaaatagtttttgaagtggtgagagtgaaaatgaggagaaagtgatgagagagaaaatgaggagaaagtgatgagagagaaaatgaagagagaagaagagatgtgggctttatcaataatagtatgagtttactggagagaaagaaaccagcccagatcatttacgaattttttgaagggcgactaatatgtattaggcctaaaaattgagaaaaattgagggatgcaatcataaacttctggcagaattttgaggatcagaaaaaggagaaaggagttacggtactatacaactcagaggagaacgagcctaaaaaagagacgaccattgaccaacaattgaaggtttacacaagaaagaggaggcccatatgtccaagcaaggagaaagaagccattagatcagtggggaatttacaacttgacgatatggaggaggaagaagatatgaaagaggaggaaattagagaactttttttcagatagcaatgcatctgaggtagattgtgaggagagccttgaggaggacagcgaagggtgtgaaaatatactgtgcaacattaaagaactgtggcctgaaacaaatagtgtgagacgagggggtttgaaggaaaaggaatgccttttagtagaggaaatggggatcacaaaggctggaaaaaatagtcatgaggaatcttcatcaacattgtggtctaatatagttgactctttggctgagatgggggtggagttaacttgcgacgaagaaatagtggagaaaagagaagtcataatagtggcagcaaggaaaaagtgcacggaactgaaaaaattgacttttaacatcaactatgagaaaattttaagaaaatcagggatggagaaaatgtcacaataaagatactgtcctggaatattagaggcagtgggataggagaaaagaagagctatcaaggcaacaatatgtaagaccactccgaacatagaaattctacaagaagtcagcagatagaaattttgttggaagtttatggagatctcactttaaagcatgaattcttttaccttcctattggtagagcggatgacatcttggtgatttgggatactagaagcattacaattttggattcaatgatcggtgaattttctatttcagttttgatttaagctgaagggaatgataagcctaaaacttatcttgtgtaccacaaaatgattaaatgaaatacttagtcttttatgtacatggactgagttgtcttaatgttttaattctattggtccaattgtaatcctaggtggcctaagtctttttaagaccaatgcttatacatagagagggagcaacctcatttagcttaatggttctcggcgatctatgaatcgtgctcttataaagcaagatcagatttctgggatgaattagttggccatgattcaacatgtggagaatcgtggtgcctaaggggtgattttaatgttgtaaggcgagtccaagaaaaaatgaaccacaaatgcaccaaaagtataaagatatttgatgagctagttcgcaaattatgtttaccaaactaaacaatggaagattgacctagtcaaacttcagagaaacgaccatttgtagcaaattggacagattcttgttcaccggtaagtcgaatatggcctatcaatttgttaggcaagagatgctcgtcaagttagtctctgatcataacctaattattcttgattctaatccaccaaaatggggtcctagtccgttcagatataataaccaatggttggaacataatttttttccccataatttgggaccgtggtggagagaggaagtataattgggtcggcctcaaactaaattcatgagtaaattgaagaaagtacagtagaatattgtggtattgagcaagaaaacttttggcaacaatcgtttgactaattcactagaaagaagattggaggtccttgataaaatggaaggaagcaatgagtggaactaagtactggttgaagagaggaggaatattaaaaaggaatggcaggagttggtatttgaagaggaaagaaatgtgtggttgaaatcaaaatggaagtgggccaattccagatttttttcataatctattgaacgcaaaaaggccaaaaatacaatttccgaaatagagaaagacgatggaactctcattgataaagaagaagaaatatctgcagcgctgaccaacttttacacacaattgtacatatctgagagaagacacaacctggggattgaagacattaattgggaaaaaatatcaaaagatcgtgcaaaattcatggaaagaccatttgcaaaggaggaaatgaggaaagttgtgtttgattgcaagggtaataaagcgccaggtccaaacggtttcaacttggcagtttttcaatccaactgagaggtagttaaagaagatttgttggctatttttaaggagtttaaagccaaggggagaatcctaggcagcattaatgaaacactcatctgcctcatacccaaaaaagttgatggccgcaaagtcaaagattataggtcgattagtcgtatcactagtgtctacaagataattgcaaaagttcttgctacgagaatttgagaggcgctagaatacaacatttcggagactcaatctacttttatggaaggtaaccaaattttggacttggtattggttgcaaacgaggttgtggtagactacagaagcagaggtaggggagtttggtgttcaagattgactttgaaaaagcataaggtagggtggagtgagacttcttggagttaataatggcatgtacgggttttggagaaaaatggaggaaatagattagaggatgttcttcgtcaacatcatttctatattcatcaacggcaaaccaagaggaaagttcaaagggtccagaggacttagacaaggcgaccctctttcgcatttcttattcacattagtcgtagatgtgctagggaggatgttcgacaaggctgtggactccgataaattatctggtgtcctagttggtaaggagaagattcagctgatgacacattttttgtgaatgataaaaacttgctgcatagattggttgggttggtggaaggcttctattgcaatatcaggctagaaaatcaatatgggcaaaagccagctcctggggctttgtttggatgagagtgtggtggtttggtgtgctttgtcgattggatgtgaagtaggtagttggccaatgaagtatcttggatgccaatcctagacaagtgtgcaatgcttgtccttgttaagagggggaagactaactctcattcgaccagttctctcttcttttccaacttactttctctctctctctctctctttagagccccgaaatcactcacaaacttattggagaaaatgatgagactacttttgggaaggtgatctttcagggggagactacttggttggctgggaggaggttgtagaccaagattgaaaggtgtttgggtattggaagacataggctatgaagatatgagaaacaaaagaatgttaataaaatggctatggagattcttccttgagcctaattcactttggcatagggtgatcaaaagttgatatggtatggataccaaaaggaaggagggattatattctaccctttgaaaggaatttcagatctttatgatgagtatttggagttgctgaagtttaaagaagggaatggagccagaattcatttttgggaagatgcgtggttgggtgaatcctccttgtcaagttcattcccggaattagcagtgttggccagatccaagaatgcgtgcataagtgatttggcagtagtagaggagggtgattatatatctaatggacagagaagttcctaacctaattgaaatgttacgtatctatggggtatctttacatgcaaatcagcttttcactattttacctcgaaccagagcacagtcgaaatggtatggaccaaagtgttatggaatgaaactatagaacatttgttcctggaatgcaattatactcataaactctcgtctttgttatacaaggaattttagttagcttgggtgttgcccaactctgccccaacttatgttggacaaagttggttgggagtaaaagaaaaataaaactttggaggactgcaatcttagccataatgtgggcagtttagattgaaagaaataacagaattttcaaaggtaacgagaccttagcaaagtatcttttgggagaaggtcaggttttggtcagctatttgggtctttaagactaaacacttcaaggatttttcatttctaaacttatgtagagagtggaagttgctgatgcactaatcgttatgatagctttggctgttgatttttatttcctggtttttctatgattaagctagagttattgttaccatggttttcctccgccacaaatgacgggggagtctaagacaagtaccttctttctttatatttaaaaaaaaaaaaac

SEQ ID NO: 378898 - DNA, 1736 bp, Cannabis indica
acatatataaatatatatagatacatgtgtgtgagtgtatgtgaaagaataataaaaatgtagaatccatacatcagaatttccataacttccggctgtctgaccatccaattcacgttcaagtctgcaaacaacataaaatcagcattagtatgattaaaattaagaaagttaattagttgggagcttctgaagaaggtatatattatctaaacttggggataaagaatacagagcactgctcacttcaagcttcccaaattaatactcttcctcccctaaatctcttttttctccaaggaaaagaacaagaagaatattggtagaagaataatctttgtgttaacataccttggtaattctttaaggactggcactggaagtccatctgacccttttaacttttttgttaggccttgctcctccatttgctcaaaagttcttcagtacatgaaaaattcaccagaagctcactgtcactacagaaaacataaatttcttcttaaagctactaatttactgtttctcccaacaataaattgactaaaacaaaggaaggagctaaagaaggggaaaatgaaattgttaagaaccaatatgcttcataaagtaatatcttcacgaatccaaaatctaaaccaaaagtagaggcttatatattcattacgaaatcataaatatatattatgagcgggcaaggatgtcaaacttttgtatcaagttacaaactttccatcccaaaagtgattgtaggttcatgcaagagtaccaaagctttgggttttaattctcaaaattcattcagcttcagttatgatgttttttttaacataaaaacttcaaaattgatcataaaagaattgcagaagaactggagaactaccacttgagtaaactcatctccacaaggagcttaaccctagagctattaataaaggttagtaattgatcattgcttgatctcaaatcttaaataattcaaccttagacccttctgtaaaagtcaaagctggccttttaggagagtaaatcattgcatacatgcatacccaccattggtgtttcctcaaaatttatggaaaatcagtattctccctaacatagtcgatttcttaacacacattcaatgaaaaaattctaagttttatcagaataaaccctcaatttcgacagttcttcaagcttcgattcatttcagaatgtctatagccaaaattctaatacctcaaaatcaatttctaggaaaaaataataataaaaaaaataatttctattattcaccctcaaacatcaataaattcaaaatcagatcgagccacagtttcaaacatacctaaaaaaaaattggaatcacattcgaaagagcacagaaaccgtaatcctagctcaattttcgtaaaaaaaaaaaaaattgattcagctgtggactgccccgaccgacgagaaggagagaaggccgattcaggcggcggcgcgtgggtggagggaagaggaaagggatttttgtttgtttgtttgtatggtatgatatgttataagctgattggctcagatttggtagttctggttgtccacgtgtcgagatttggtggggttggactacaattaggggaataagctcatcattacccgatctttcctcctcacgcggcttcggttgggcccaaacaactaacccacgtgtaaatgtaaattggaggctaagttgaaaaatacttttttttttttatttattt

SEQ ID NO: 378899 - DNA, 1833 bp, Cannabis indica
aaaaaaaaaaaaaaataagcttgatcaagggctttgtgacttaattaaagaagaacaagttgctcaggaagactatacattacaactcacaagaattatgtctagttcatgaaaacaccaaactgttccgtgcaagtctgaaatataaaaatcattaaaacacaatttattcaattacagatcaagaaggcacaaggagagacaatcaagaaggtgtcactaaagcctttcttgatttctacaactctttgttgggttctaaagctcatcatagaataagagttcacaaaagtattgttggggaaggtaatttggtgagtcagagtcaagtcgattggttaacttgtgactacaaagaagatgaagttgtagttgccttgaagtcaattccagatgaaaaagcctcggagccgaattgttttaatagtgccatttttaaggatacttgggagattacaggaattgaagttgaaaataccatcctatcttttctgaactctggcaagttattgaaagaaatcaactccaccataattactttgatcccgaagtcgatttgtcgaaaacctatttgtgactattgatccattgcttgctacaatgtggtctataaaatagtcactaaaatgacttgtaatagactaagtgagattcttcctgatattctttttcagaactaaagtgacttcgtaaaagaaaggcaaattgctcacaatatcatgatttgtcatgatatggttcgtggctatgatagaaagactgcaaagttagcttgcttattcaagattgatatttagaaagcctatgacactcttgattgggacttttcttaaagaaatgatggaagctcttaatttctctaaaagaaaattgttgatcttataatgagtcatgtgacaactccaagatttttttagcattaatggagctcttcatggttatcttcaggctaaaagggaattgaggcaaggagatcctatgtctcctcttttgtttggtataggaatggagtacttgttaagaattttgaagaaacttgcaagcaaagagaactttaagtatcatctgagatgtaaaagattgaatcttactcatctttgctttgcagatgatctgttaatattttgcaaaggagactatatctcaacaactctcttacttagaggttacaaactcttctccaattcttcagggctttgtgctaatcttaaaaaattacttgtttatggacaaggtatgatacttattttttggatagaagtattgctatttcttgtttccaaaggagtttgctgccttttaggtaccttggtatgtagatttgttaaaaaaaaatctctaagcttaaggcagattgtgagtgcttggttgataaaatggtaatcaaattcatatttggattagtaggaatttatcttatgcatgtcgtattgtctcgataaatccagttctcttgttaagaaattcctattggtctcaaatcgttattctctccgaggctgtcatccaaaaaattaatcaaatttatcatgcctatctttggaaaggcattgagatgctaaactaccatggtcatgtggcttggcaggacatctgtagtgataaaaaagtgggtggtgttggcttcaaagatattgccttatagaatcttttgtttgggctatcacactaagaagaaagataacttttggattacgtggattaactcgtttacttaaaagaagagaattggtgggactatgaagttccacttgatgctagttagtattgaagaagaatagtgaaaacaaaggaaaaaaataagtgcatgtttggcatcgtaactaaaaaact

SEQ ID NO: 378900 - DNA, 896 bp, Cannabis indica
attttattatcagcaatatcttacaacattcaattacaattttacttaacttgtaggttttttatttacttaggttaaaaaaaatacacatataattactaaatcaaactatttactaaatatagtagttgttaacttaatgacaatatataattttaaataactttaatgtaccaaatattgccacccaaaacccaacttacataacagttttattttgtatgaatcaggaaagttttgattgctcaaatctaatttttacaaacaaataacacccctactggcctataaacaatactatctatacatttatgtacactgcttacttaaatctcatacatacaattcgaatgcttggttacaagctttgaaaccagcttgtatcctctgtactgacttttttaggccaacataagctaattctttgtgtaacagtctgctttaaacccttgattaacacttttggttctgcttttatattttcccacaaactgacatttcgagcttcccatagtgtatacaccaagcaagagagagcagctgcaaacaccttcttcctgaacttactaagttttgatcttccaatccatctggtgagggtgatcaaggtggtaggtgttgcatgccattgtaaccagtgttttgtatcctggagacaagcagttgcaacagggcatttgaagaagtgctttgatgtattttctttatgcaagaagctaatcccattttaagtaacatgtctttagttttgagcctcggctggattgccaaccatgtgagaaagttgtgctttggggtgttcatgttgggttttatgccctaaataaaactcatttaaatataatcagatttacttattaatatagatcagaaataacatttaatgttgcatggtt

SEQ ID NO: 378901 - DNA, 17149 bp, Cannabis indica
ctgctggttttaccagctaataatttgggagtatagttgacaaaataagagcacttcagttctcttacaaaatgagatgttaatttttggaaatattgactaattaatcattatattttccgtcattattgatttatgtcactgttttgatattttatagtcatagaatactctcttgcattaccagaattaattgtttcgataattaattattaatttaataatattatacgaaattccacaaaaacacatgcacgctatacgtccaaattatataaatctatatgtaacaagaatactataaactattggactatagaaaaattcaaataattattccacccttgattataatcatatattatgcaatcatataattattataaataaacttttaaaaaagtacaataactgattgaagaacacagtttgactacaccaaatcaaaaaacagaattccaatcatcataaaaaatatccaaagactaataatgtgtaacctaaaactttgactgaatatttaaaactaaattgttatccatttgaaatgccttagctagaatatcagcagggatatcaggattagatccaaacacagcatttgcaatagtaacaatcccagggttttggctactcaaagaagaaatagccagtcccttaccatgcccaatatttctctggaagtgaaccaaaccctttgggaaagcaaacacatctccctcttgaagtatctttgtaatgagacgattttctgggtttgatgtaacaaaaccaacttggaatgtgccttttataactgtaaacagctcagtggctcgaggatgtgtgtgaggtgggttaagacccaaaggttcatagtccacacgtgccactgagacgcccaatgtattcagcccaggaatcttttcaacgtttactagagtcactttcgaaccaattacgtttgatgtatttcctggcttgttaagcccactgaagaagaaatcattggcatcaaccagctttggatccttacatgcaaacccattcactagcactgaaataataagggttgaatcacacatgttttgagtatatcaaactatatattatatatattcaccaaaaatatcctgtagtatatatatattttactctactcacctgggctgttggaatctctgacacaaaaatcttgaaggagattaggatcagaagccaaggaaatggaacaagttatggcaaataatgccaacatgataagaaaattgtgattatttgaagccattagaggaagaattatatatggtatagcttgaaagctagtaataattcttgtttttcttgaaaattatttgtgacttttgttgagttatgcttaagtgaaacatgcaattaataattctgtatttatagaagaatcgattaaagagctgtttcgtgttgtaattaataatattgaaaaagtcaggtgatatggtccaaattaagtacatactaagaagaccaagtatatgcaactgaaagatatagtgctgtgtactgcataaatcataatcgattccatccgtgacaaccgacagatttaataataattaaccgttaaatattaaatactcaatttgattaaaatccaaattagttgttatttttaaaaatctaataacatttaatatcctattaaactaattagtgttttcatttagttgagtgattaggttttatattattatatgtaatatatatgtatatatgaaaattaattttattatttttttcttagattagatatcgatacatactcgatctaaaatattagatgtatctaattcgatccaaaaaatactacatctaaaatattcgatatacccaaaataaataaataaatatatatatgaaatatatctaattagtaaaactgatccaatctaatatttaatgaatgttagatcatgactaaaattacttaaatcagattaaataataaaatttaatatctaatatataatttaatatataattaagtacatttaactagacctaaaaatgttaaatgtgtggtccaatacaataattacttggtccactgaaatattctccggaaatatttaattgatgaaattgtcaattttgggtaaccaattaaaagatgtattatcctttccaataatagaaaatacaaaataaataaaaagatgtgcctttagcttataacttgtagttataaggacagcctgccggcaattttttgtacttgccaaccaatataattacagtttcctgcttaattaattggtcagataaagccaataatactaatgtatacgtatgttaattttaaattgtatacttttacctcttcttaagctcaagcagcatgtcttttatcattcaatatatttaggacttggtaatcagttatataaatatataaggtggtatgatgataaggtcagctgtgtgtgaagttgagcaattgctattacattatagaatgttattagtttaccacacaatttttattatttacttattaatttcaattaacttaccgtataaacaacgattggcagaatattaatttatgaatagaagaatataatattaacaaacatagctaaactttgctatgtttggagtgaataataaaaaaaaaaatgtatgtatatatataattgtgtttgtctattactcatatatgagtaatgtagacaggttatattacacttaggagatactaaatcactcgattgtttgacaggttataatatttttagacggcgtcaattaaattttgttctgctagggtttttgcaatttcactagtttgctcggcgttctactggtgccatggcaggtagatcgaagaagaaacgggagagccctaagaagcggcctacgtctactgataaaccaagaaaggtgaagctgttggatgtgattcttggtgtagaggcagcagtgttttctgatgatgtgattgttcactacaagaaatgagacttttgctagcgcatttttatgctggcaaaacagaatttacatttgccagcatatttttgcgctggcaaaagaggttggcaaatccttgttggtattggaacttttgccagcacaaaacaaaaagcgctagcaaaatgacttttcctagcacgtaaatacgctggtaaaagctagacttttcccagcgctaatgtgtgctaggaaaagtcttacttttaccagcgcataaacacgttgggaaaagtctaacttttcccagtaaaaatgtgcgcggggaaaagtctcacttttaccagcgcattaacacgctggtaaaagtctaccttttgctagcaaaaatttacgctgggaaaatctcacttttggcagtgcattaatgcgctgagaaaagtgtaacttttgccaacaaaaatatacgctgggaaaagtcttactaaaattttgtaatttaatttaatttaaaaaatttatcaattatttatatatgaaaataaattaaaaaaaataaacatgaaaattaaaaacataattttaaattattttaattatatatgattatagttataattgtctaaaagttagtgaacaaacatgtctttaaaatactaagataagcataattttctcacctaaaataaagtgaatactactacgtatcggttgcatcatcatcaatatcatcattgccttcgccaccattatctcccacctctgcccgactagatccaacatcatcaaactgcagtggagggaggtctaactgaaatcctggaatactcacactcaatttttgcaccaatgcccgcatcatttggtcttgattgacttgattttgcttaagagtctgatttttcttcttaatggcttgattttcctgggaaatagcctccacatcgatcgattgggaccctaacatggaagatgaagatgtcggtgcacgctttcctcttattgccataagcctagggaatgacccaaatcctttcgtacagaaagtgaacgtggtggaccaagaacttctgcaattatatccatatcgggtgggtactagctcgaatccccggcaatgcacgaagcagcaaatgatgcatttgtagatgtagaaccagatgcagacgtagatgagatgatttttttttgtgtcatctcttcctacaaagaagaaattaaatcatcaataatgtaaacaaatataactttaaaatttcgttataatttaagtatcaaataataaacttttaatgtaattacatatttttcttttgcagcgtcactaaaccattggctcttgtcattctttttcttgtggagttgttcaaacgtgtctatagcacttggataggctccaatacgttgttgggttaatctaaaaaaaaaaaaattgaataaaagaaatacaaattaaaggtaagatgatttatgaaacttttcttacttcatcatggagatgtcccacaaggatcttcgaaccgtgcgcccttaatataggcattttggaccatgccactttgtttctctcagaaatcgccttcaaaagtaaaaaagaattcatattatgtcgaatagaaaaaaattcaaaaaaaattaagcaaaaagaatcaagaattttgtatagcttttgcttatctgtattctaataatcacagagtacccacaattcaagattaatatttttataggatatttctttgccttttcattgtccatctctcctccactcttaacccaatgagctttcatgttgcaccgtcattcgctcacatacccttgcatattcacatccatgttattgagaacaattggatcttccattggacaaataaatttatcctacaatcaaaatttcaaaaataaattataatgtcaaatatacaaattttaattaacatttcttctcaagaaattaaaattaccgctgactttcgacaaatgactgatatatcattcttgcctacatcattccaactaagagtagttggagatatgttatctcgcacaaggtatgctgtatagttgttaaacatctttccatattttccaactgactaccgctagtttcatgaaacttcactagaagttgagatagtttctttgatgccagctctatttcaacattacccccgtaataggacccacgacccctcttcttttcgcccaaatactctcagttctttcttgttccattctttatattggtttagcacatttgatataagattaaaatattaatacatgttagtttaacaataataaatatacgtaaatttttttaaataaaataaaaaacaaacaaacattaaattattcttcataaaacaaaaatctttttttaaaattttgttttccaattacaacacatcatcatcatcattgactacaaaatgatcaccactatcgctatcactatcgaccacaatattttcttcatcatcatcgtactcggctaaagtgtcgtcaggaatttcatcattgtcatcatcaacaacaaaacgattagaacttttgctgagtaattcatcaacattggatacttcagttggatatataaacatctgtacgatcatattgaatagtatcgaacatcagaagttcaacccataactggaatccagaagaatttacttcttgaagtatttatacatcactagtagtgttagtattatcaatatttgtacctgagaaatcacacacatttctcagaatataaacatggacgactctccaatcaaccccatttttgacatatgaaagataatataccaatttagctaaggatgcaagtataaagggatcatccttgtaacattcatccttgacaaatacacttgtaaaattgccatcttccttagtttcactagtgttgaaccattaacacttgattagtataacactataacccatcaaatacttgaattcaataatttgttttagttctccataataattttctccttcctcacttggaaccattaaatcactattttgagtcttcaacttttcatcacgttcatggacgataaatttgaccccattaacaatcatcactagatagtaaaatactgtagaactaagtttgttggcaagagcatacaatttgtctcacgcaaatgattgttgttggcaagagcatacaatgtcaatgtacttaagttagattaagagcgagtacaaatgatgtgttatgtaattaaatttaagtgttttatggattcatactcgagttttaaaccattgaggtaattttcttgtctatgctaaagatttgaactatcactttgtcttttcaactcatccatgtgctcactatgattaaaaggacaaatcaattaaaaataaaaacatgaatgataaataaaagttgaaggtaggaaattaatattaagcatgtacgtaaggtagttggattcagcacagttgttcaaaatgtaccgctctgctctttgcttcagttgtaaaggtaaaagattagttgtttttttcccaagtagacgaacaacgaccttgaacactaaaaactcccgactaggttcaactcgatcatcattcattttaagtggattaaactgggtttcaacaccccgaaagtacattgagcaaaatgttaatgcctcattcaccacgtaagcttcagcaatcgaaccttcaggataagaacaatttctaacactttgtttgtgaccgccatacaacgttcaataggatacatccatctaaagtgcactagaccatcaaatattgccttgttcggaagatggataatcaaatccaccataatatcaaaaaatgcatgaggaaaaatcatttccaacttgcacaaaatagttatgatgtctttttgcatcttctcaagatctttcacatttaaagttcaggagcgaatttgcttgaaaaagaagcatagctcagtaagtgtatttcgaacatctgtccccaaaactgatctaatatttgccagcatattttaatactggtaattaaaagttttaataataaaaatatatatttttgataaattcattttaaaagtttccactaaaatataaattataatatttattttaataaatatacttcaaagctattttattttgttaatattatgagaaaaattagaatgtatttatactaataataataaaatattacaaaatttaaaaaaaaaacctaaaaaaattatgatatttttactagcacagttcgtaaatatgttggtaaaagtaacttttgccagcgcattacactattaagctggcaaaagtaatttttaccaacgtaattttttgctagtaaaaaatattaaagggaagggtttttatacagcttgttatgccaccacaaatataagttgcgctagtaaaaatatgttttgccagtgtaaatctgtgttggtaaaactgtcacctttttaccagcgcagttcacgagatgcgctggtaaaagtaacttttgccattgcattagtgaattgcgctggcaaaagtaacatttcttgaagtctcaagagagacagagatttatcacattttgattctctgttagaattgcaaagggtggatcaaattcgttctgaattttctcatttgctggaaaaaacaagctcttgaagaggtaattcttctagtcactcaatatctagggtaccagacattaatactgatgctatgccaacaaatttgaatagtatatttgaagaattaggttcgggatcgagagccattaaagatcatattaaaatttattttgaagatatcgaggaggaggttgaattctggaactcttctaggatatgtgttgggttctaatcctccattatctgtaatggatggcttctgtaggagaatatggaaagatattgggtagataaggttgggattatctctcatgggctcttcattataagattcttgactatggaacagagaaatagtgttcttagaaagggtgtggtgttttttgataaaaaaatctcttattttgaaaccatggaatgctttagatgactatagcaaagaaagggaaaaatagattctatgtgggtgtaagtgtctaatcttgagttaaagtattcgggggagaggtctctttttaagatcataggacaagtagggaagacaattaggctttatccagtaacaaagaataaagaaaagttgaattttgcaagaataatgattgaagtgtctattgatcaagactttcctagtgtcatcacctttgtcaatgagaaggatcaagaggtggatttaatgattcattattagtggaaaccaattacatattttgtttgtaaagggataggacatgcagctgtcacttgtaagaaacagatggggaaacaagtttgggttccaaaatcaaaagttaatttgaaaaaaaaaaaaaaataggagaagaaactactagttaatagtgaaggctttcaagttgtttctaataagggtcataaactttctaatcctgttattcatgtgatgccacctgagaagttgaggaatggttttaatgatggaggtaggaggattcatgttatcactgtaggagggggagctcctccttcagtgaatggataaggtgttttcttggaatgtgagggggcttaacaagacggataagcaagctgaggttaaaagaattattttttctaagcaagttggtcttgtgggtctctttgaaacatgcattaaagctcaaaaaatgggagctttattcctaaacatgttttagaattggtgctttacgagtaatagtgcttggcattcgaatggtaaaattgtgttagcttggaatcctaatgtgtttcatgtggatatccgttatttttctagccaactaatttattgttgggtggaaacttgtcatggaaatgggaagttcttttgtacttttgtctatgcctttaatgaggagcatagaagcactgacttgtggaaggatttgtgtatgttgaaattagtggaggcttggttattgttggggattttaatgcagtcattaataatgataaaagaattggagatcgagtaaggcaactacattctgaagatttttgaagttgtctgcatgattgtgaggtgatggacatcaaataaagttgttgtttttatacttggaataataaggaggatcgtccgcatcgcatttatgccaagtttgatagggtacttcgtggtaattctaagtggcttgatatgtttgagtttgataaggcttggtttcttcctgaaagtttatttgatcattctccggttgtggtgtcttttacaaataaaattttttcaagaaagaagccattttgttatttcaaaatgtggtagattttttatggctacactcaaaatagtggaggatgcttgaaagagctcggcccaaggttcccctatgtttgttgttgtgaccaaggttaagaaagtgaaggctcatctcaagtagctgaacagagatagagtgggtgatattgggtttgcttattctaatttggagacccaattacaaaaaattctgcagtgtgtcaatggagacccttccaacttgtaatttttcaacgaagaagcgattgttcgaggggattttgtaaagttgcagcatgcttacttggatttccttaagcaaaaagctaaggtgaagtgggttaagcatggagatgcaaacacttgtgtttttcatagcagtctttgagctcaaagaatccaaattaaacactgagtgtaggattacagatgagaatgggatttctagagaaacttctgagggagtgagtgcaactttccttggttactatcaaaatattttagggacttgccttcatgattgagaatagttgaagcttgtgttatgagggagaggcctatcctttcagctgaagctattcttctactccaaaggccttttgataaacaatatgtgaaaaatacagtttttcacattcctggggagaaggcgtctgggcctgaaggcttcagtagttatttcttttagcatcattgggatttaatcggtgatgagatcacagtggcagttctctcttttcttgaaaatggtcgcatgctaaaagagatcaacacaacaacaattactctcattcctaaggtgaattgtcctggaaatgctagtgatttctgccctatctcttgttataatgttatatacaagatagttgcaaaacttttatgttggcagttaagatgtgtgcttccagacttaatttctgaaagtcaatgtggtttcatccaaggttgctccattgctcataacatcatggtatgtcaagatttggttcatcattatattagaagtggagctcggccaaactgcatgattaaaatggatatttgaaaggcctatgacacaattgaatgggatttccttgaggaaatgttaactgcctttggttttcccaatcattttaagagcttactcatgatgtgtgtgctgacacctaagttctctctgatgatcaatggctcgctgcatggtttcttctcatcaaaaaggggtcttagacaaggtgaccctatgtctcccatcttgtttgtgcttggtatgaaatatttatctagaatcctcaaaaaactgctcaaaagacagatttcaaatatcatgggaggtgtgcggaccttggcctcacacatttgtgctttgctgatgatgttattttttttttcatggtgattttaaatctgtttatgccttactaaggggttttaaacttttctctcacacttcagggttggaagcaaataaggctaaatctgaaatcatttgtagtggcatgagcgattaggaggtgcaagggcttgtagtaatgactggcttccacaaaggtgatacaccatggataactaacagaagaagattatcgagctttccaaaaaaaattcaactgcagagaagcgtgccaccgatgcagagaaccaagtgtcagacttagaagaagctattaatatctagtcttcaaggcgagtggctaacaatgcaaaagctccaaagaatagcttgaagaaagatctagctattgctcgataaaagacttgttaggttgaaactctttttcttagtcacttgatgaaaagactctaagcattgctcagttagataaccaagttcaacacctcgggagctaggtgactgagtgttgctactaatattgccttttatgatgacttatgttttgatgccatttatcatacatggtcgtccaatggaagtgcacaatcattcaacaggacgaccttctctcaggataaagtcccattctttatagagctttctaagcaacattttaatgttaacactcttcaaaggactgattttgacctgaatggtgttgaaccagtggtcgaagaagctgcaagggttgaaggctacaaccctgagcgttctgatattcctcctcctgttgatgtgccgccaacaaagaataatgaacatattaaagctatatatttaggacatagataaatttttggctttgcaggacatcttttcttttttagctttagtgtgttagttggtcgtcctgagcgaccttttagtgtggataagccttagtaaaatgttatcagattggttttaattaaattagaaaatattctaacttaacaaaaactttattctgatgtttgttttttttactttatccattaccactttaccttttaaaacatgcacagtattctatgtcttaagaaactcggtcattgggagtaacatcaatatttcttaatgttttctttatcatgaaagtacttacgcatgagtgaatttttttttttttatgctcaggtaacatatggctctcatataccataacataatctatgtgcccccaattgatcaaagaagtgccttcattggtcactttccatatcgaatctcattggcctttcttgatcctgactattagggaattgttgcatgtgtgagcactcattcgcttatctagagactcgtgggttggtagtgttgaactaactaaagaaacaaccaaagttatctcaagaccaactcgtgggttccttttccttggagatactcggtttctcctttgaccggatcttgtgatttaattcaaaggttcgaagagaacccatcaatttttctactttcatagtactgaaatccttagcctcttccatagtcgtgagcttaacattgaacctatcaggaagtactcgtactatctttctcaccaagacagaatcattaagtttctcactgagggtaaaatattcattagaaatgtcaggtaacctttcatagaatttagatagtgtttcagactcagtcattcttagatcatcaaacctagtttgtaacatgataaattcagatcttttaacatcttcagttccttcaaactgggtttgaagaatagtccatgcatctttagcaattatacaagtagaaacaagtttgatgaaactttcaccaataccattaaatatagtatgaagagctttactgttataactagataacttctcttcttcagtagtccataaaaattatgattttacctttgtgctaccattctttgagagtggagaccatccagacaaaattgctttccatgctttttcatcttgaactttaatgaaagctctcatcctcactttccagtatgggtagtttgtgtcattgagtagcggaggaagagatacagaacttctttctgtaaagaaagacatttcacacaaggaacaaattaaacagaaatgaaacacaagatctcactaagagtttagtgaaccaatctgatactaaatgaaattccatttttaataattaccaagttaaattatcaagcaatttaaataaagcggaactgtagtaaaattgtttgaacaaaatttatctctttatatcagacatagaatctgacaaaacagaaatatactgcagaaagtaaaatgcagaaaatttaaatgacacacaacattttatacgtggtatcaacaattttttcaaattgctcctagtccacggagtcacgcacaaagaaagaaatttattagatgaatctcaagtgtttacaaaactaaattaacttatacaaataaagactccaaaattaaccaaattactttccactgtggtgacattactataattgttaataactatatgttctggatttaacaaaaattgtatattaaaactataaacatgaaaactatgtacaaacaacttctaaccttctattgatagtatataagattatattaaaatgagttttatttaaggcataaaatcccaacaatgacttcaatgttgggcaaccaatgcacgaacaactcgtaaaaattgatcgtaaccttgaaaaagataatgtcgaatacattagaaatgatattaatgagggaatgttggtcaattgtgattcaacaaaagataaacgaaaaaaaaaagaaaacgtgtctaattggtagatttgtcaaactcagtattagatcacttgtatttatgtttgtttatgtagttactccattatagctaacttgtatatatgtatatttatgtatttactctgttatagctaacttgtttttatgtttgtttatgttgtagatatgtcaaacacaagttcatgttcagactcataattagacccagtagcagagtgtcctagggtgatacctaagcgtggtcgaatagagatcaataatataagtaagctgattgaccaaggaataatatttcccctcgtagtcaattatagaagacagtactctggcaaaaactcgcgccagttgatatcaacattatgagttagatgtcgtaggtggattgggatttcctatgaagacttgaggaaggtcagctctgcattgaaaaataaaatttagaatgatataaaggtaagaatttatttgttagtattttgattaatttagatgtaactctgacaattttgtttacattataactaggcaggttttatagtttgggaagattacaaaagagaatgcttgaaaatcatcaggaagttattaaaggattttaagaatagaatgacgcacgacatcataaatcccattgtagaaggaaatgacatgcaacagttggccagtatccctgaaatgtatcatgaaatagatcaagaagattggctaaaattcaactcccctaactcctgaattttaggtactaattttatatgttaagataaacttttaaatacaaatactagtaggtaacctattatgttttcattgtaggaaattaataaagtccaaagagaacgatcaacaaaaattcaatctagacactgtagtagtcggagcgttatggtcaacatcaagaagttgtagtaagcaattgatatataattaataaaataaagttctagaaatttacaacaatatgtgtaatagtactcatttaagttatgttacaaaatacataaaaatgagcttgaggttcaagcttccccattccataatattaggatcaaatctcgtcaaaagaatatgaaacttgtcactaattttgacaaggaaattttcgctaagatagtaagtagtaatcgttgataacgtaataatgagttaatttatataaattatatactaattgcttgatgatgtgcactatgttaaactgcaggataaacttagtcaaggacaagtttaggtccatggccaaagtgacataatgacgcaaacatttgggacactagagcatcctagacatgtcaaggatgctgggtatgctaattaaaaatcaatgcttagaagagtttgaatatcttaaatattcatccgtagtaaagtaggttctgcgaatacatgtactgcaaccaaatgggtaacaaatttttgtattgttagttatttggattaatttatgttgttttggattatgttttattattatttaggtttaaatatttgagaatgttcaaatatagtcattaggctgtcgaaattttggttgagttaggacacaaaataaatattcattaacttcatttattaattaatttgcaagtttactgcaaaggcatctaaaatttgtggtagaaagaaaaagaaagtctatgacattgtggctcagaaacaaagagagatagacaggctaaaagtagaaatcagatcccttaaaaagaagaaaagtgttgtcgaacgagagcaggatgatgatgagtatgttccataagaacatgcttagtaggatgttcaaaaaaaattatgctcaagagtttgttccattgtatgagctatctcccatgtacaattctgctgaacaaatgactattgagacaatatttctctacttggaccatattagaaacatagtggtcgtagcttatttgtttgaaaaagaagatgtgattacaaatcataacatgccctatggtaatttgcatacacgcattaggtatctttagatgcaaaattcccagtatcaattgaggggttacactatgttagggaaacagcgaacatgttcctcctttggcctaaatatttaattttaacatcggaagtaaaatttctttattagaaatcatcattacaaatcatatatactaatttttgtctattatgttattttgtatagtgtactctccttgcttaactaccatcgcaacgtgttatgtcgaaggaaaaaggtcttatgccttgtcaaaaatctagtagtgatcatgctgacctattattcactccaaagatcatggaacaaatccccaggaagatcagatacatgattgaagaattttttagaataaaaatgaaaaatggtatagtccaaattctggtaccacgtggattcatagcgactcatactgaaatcacgataattgtggaagatgtacaacaagtggcgttgtgtgacttcattggaaactaaagaattctttttggaatgaagttctttttggaataaagtacactatatttaacctaattatctttatatatcaaattcagttgaaattattataaaactttaacagtgaacaatttaatgcaagttcatttagaaatggttaaatgatatgagatggtttttcaagttttacaacccgaagcttcttgtagtgcactataaaaccgatatcgtgaaggaacagaagttaagcaagcgacaaaaagattggcttgttggttattattgatgaaaagccaatgcaaaatgttcttcattccccagaataccgggtatatactacttaagagataatttaaaattgttttctttatttttacttcaaattatttttacacttatgtatatatattttagtaaatattgaatgctagtggtcattacgccaggaaagattatacatctaccctataaatggccgtaaaattcttgaacaaattgatgcaatgttgagaaagtaatgatttaattacgctttatataacaaatgtttcaattagctaaattatacatgttaattaattacaatattaatataatttttaaaacaatggcatatgagacgttaggagtgtcaaatgcattcagtggggcatattcagaaattttaatagcaaaatacccaaaacaaacctataaatcaagaatgtagtttttatgtattgaaatacgtcaatgatattgtcgcacgtgcaaatcctagcagatacttaaccgacgtaaaagttgtaagttttaactattaataatcttatttattatattaataaatattctaatatatatatatatactaataaaatatttacttctttttatagtttaaggagaagagatacaatgcaaaaattgagttgttaccgttacagtgacagtggatagaataattatttgtgatgattctttaagacttgcagtgattcacgaaagcttgcaatgatgctgaattgtataaaaaagaatttcctctatttctttatgtttaattagataccttgtaaacttttttccccttatttttctatgtttagttagataataacttgtaaataattggactaattttaaaatatttgtgtaatagatttatttagaataatgtatatatatatgggtgcactcttaatgggttcatgggtaatattagaaaatttttagtttttttaattaatttttctatttaattagaaaaatttctcatttttacattatatgggctgagattggtccatcagctgaaaaaaaaaattaataaaaaaaagttttttgacaaaaa

SEQ ID NO: 378902 - DNA, 3720 bp, Cannabis indica
aaaaaaaaaaaaagttaataaagctacataaaaaacaatggaaaagtcattcaaatgaaatgagatgttaatactttacaatggaactaaacaaaggaattgaatgaaaattgatatttttctattttattctattctatttcattatttctaaccaaacacaaccttagaaaatgttttgttgggtggaatggaaataaagaaataggaagacaaaggaattgaatgaaaattgatatttttctatttattctattctatttcattatttctaaccaaacacaaccttagagaatgtttggttgggtggaatgaaaatgtgtaagataaattattattattattattttaatcttgcattgaaataattttcttaaaatggaatagtcattctattaaaatgttagaaaagttattcaatcagaatgacatttcgatactttaaaataaaaaataaataaataaacaaaaagttgattttttctatttcatttcattatcaccaaccaaactagtattatcattagtaagactattgtatagtaaagtctctgagggggaatttcttcagattaagtatattcattatctatcaaaattcaaaactgcatagttgagttgtccaagaaatgtacactgctacaagagtaaagcttataactagaaatgtacatgagcattaaaattttcttgatcatttgtcaatctgtgtacgagtccttcctcgacatttacatgggacttgctaattcctataattttctggtctccaaacattataagattaagcatagagcctactttaaaaaaaataaaaataaataacaatctggactggtgttgacggcttctatcttttcatactaaagtaaaaaactaaaacttttgaagattctctgctgatgttgttatacatgatgtcacttgcctaatgttccatcgctcttcattttattttccctttctcacaaacttgttttcattttaattatctagtaaaagccttttgccaatttgattcatttaagcatgtgtatgatttgattccttacaatattgaatatatgcttctcaggttggtgatttgggactatccaaagtgaaatgtcagacactaatctccggtagcgttcgaggaacacttccttggatggcaccagagcttctgaatggtagcaattgtttggtttctgagaaggtttgtgtttggagactgccaatgaaactactctcgtcttcattattcactgtatgacctctgatgatgggtatatgtttatctatgccaggttgatgtgttttcatttggcattgtgttatgggagctcctcactggagaagaaccatatgcagatttgcactatggggccatcattggtaatcttcatctttcacttcaacttcagtatttgtatcaccctttaccgcttgcttgttcagttgcctaacctaatgagagatttgaaattggaaatgcttttaatcagtttccaaacatattgcaggaggtattgtcagcaacaccttgaggccactggtgcctgaatcatgtgaccctgaatggaagtcgttgatggagagatcctggtcggcagagccatctgagagaccaagcttcaccgaaattgcgaacttattgcgggcaatggcaggaaagcttccttccaaaggacaaagcccgcaacagcagcagcagtagcccctccttgtataaaaaaatatagcttatattttttattatttattattataattatgatcattttcttttttagatagaaaaaatagcatagatagggaagattgcttacactgttctccacagaaaaaattacagaagagtgggtgttaggcttttttacggaagatatttatttagagttacataatatgattgtaaaatggtgattaaattttgcttacaatttttgtgttgggattttcgaattcttttcaacagtaatgggtgattgtataaagtataaactgtattttaggtcaatgctatatattcttaattttggtgccaacatagctctcatcaatgagttcgtccttgttctcatcccattttaggcttatcagtctctgtaccaccatttataaattttagccttattagtctctgttccaccatttatagtcgtgttactaagacggttggtaataggtttaaacatatccttaatgaccttatttcccatagtgttttttttcacaatcgcatcactttgataatattattactgccaatgaagtcattcttgctattactaacaaaatatttggcaaggcaaattgggttgggatgctctaaagttagatatagaaaaagcttttgataaagttagataggagtttgttcgtcaaatttttaattattttggcttccccactcacttgatttctcttatacacagttgcatctcctttgtttctttcaaacttcgcataaataataatctctcttccaccattcagccttcttgtggaattagacaagaggatcctctctcaccttacattttccttcttgttgttaaaggcctttatgcaattatcagtcataaaactctcaagaaccaatttaagggtatatttatctgtcgttctgctccttctatttcccatctcctctttgtagacaacagtttgctttttactcaggttaatgctcaaaattgtgaagccaataaggacatccttcatcttcctaataaggccaccgaccagactgttaatttagctaaatcctccattcttttttcccctaatactaaccctttagataggtctttttttcttaactaccttaatatggaggataaaccgtttatcgacaaatgccttggtgtaccccaatgcctttctcattctgagagatcttcttttcttttccttctccaaaaagccagcagtaagttatctgtctagaaccaaaaactcttctctaaagctggcaaagagattttgcttaagtctgtgatccaagctattccctcctatgttatgtcttgttataggcttcctgtctctatctataagcattttggtaggcttatggccaatttctggtggggatcttcgggaaataatcatagtaaagttcattggaaaaattgggcccaactttgtaattccaaattttatggagatttgggttttcgtgatataattcatcataatcaggctatgctgaccaaacaagctcggcgcattataccaaccccgaatcccttgttgcttctctcttaaaagctaaatacttcaagcacaatgactttttccatgcacctattggacattatccatctttttgctagagaagtttcctttgggaaagagatcttctttctaagggtcttgtttggaaaattagagatggtaagtcggttgaaatcactagttcaaattggttgcctgttccaggagtatctcttttcacaatggttcttatccacatgagaacactgtgtcttattttattagggaggatggcctgtggaatgttgacaagctcaatgttagcccaagatatgtttccaagaggggggtgaattggaaatttatactaatttcggtaaatcaaaacttttaacacaaaattaagcaattagccacttaatcaaataaaagcaagtaatatggcaagcaatatattatgacaaataatcaaacttgtaaagtaaagagtttaaggattagaaaatgcaaactctc

SEQ ID NO: 378903 - DNA, 1851 bp, Cannabis indica
cgaaaaataaaaaatatatatacatatgtataatcaagagtgttcaaatagtcatatatgacattgacaatacgctttttacaaataaaattttaaacttttgagacaaataaaaattaaataaaatattttagttgtaaaaattattttaacttgaacaaataataacataagaatattgaacagtacaaataaaattcttaaataaaattatttatatatatatatgttgagataaatatactgatatgaaactctcataaaatttaaaagtagagagaaaaataaaaatgcttttttattttcctttattgaggtaaaaaggaagaatacttatttttatctctaatttgaccatttaaataattaaatttaacaaaaaaaaaaaaaacaacaacaaaattgctaaaataaaaaataaatcaatttgtacaaataattaaacatacttctttcttaatttttggtgagcattgtatgcccttaatgtgtgctctgtggcagttagtcccctgttttttctttttaattattttcacatcagttttttttttttgaattgtaactgttcccgcttgaacttgttcttcccccggtcttcttctgctcttctcctttaatctgctcttcattctatttcctcattttactgttcatgtattgctttccttacttaatcagtagcctccatggactcttttctccctgatatattcaaagctctatctgccagagaaagagaggttatctctttaactggtgttacaatccctcctcaacgccctatttcacatcacttgatttgcagggtctactctcagaaaggttttaaacctaaaaaacttgtaaacttcttcatgactcattggaagggtagattcaatgtctctatctctccttacgaattggattcctatatgatgtcttttgggtgtgaaggtgatcttttaagagtgttgtcaaaggaaccatggcactttcataatctacatctaatcttgtgccccctagttccctgcaaaattcctcaatcagttcatttaccaccactcctttatgggttcaagtattccaattaccctttcttagcaaattggaatctcttgttagggtcattggaaatttaattggtgccttcgttgaagttcatgatgactcccttaatgaaggatggggacccttccaacgaattcgagttggtattgatgtctcaaaacccttacttcatggacaaacagttacttttccttggatggatgatgaattatggcttgattatcgctatgaaaggcttctcgatttttattatgagtgtagtattattggacatgtctttgacaaatgcccctcttttttggaaaaattggataaagggaaagaactggatctcacttatggaccttggcttgaagagtcttcactgccaagatcaagttacgaccgctatagacaagacttttccaagccaggtttgtggccttttattacccgtcttgcccgaaataccattgctccaatcatctcccatttaaagcctttccctgcactgctgccattggttactgatcgtgaaaaagggaaatccattacagttgatacaagatatcatgttgcagatgtaagtaggggtgttcatccgattcaatcctcacttatttggtcaaacaacatccaatccgcactaagtgcggatttcatattttggatccaatctggtccgcatgatagtttaaatctaatccaatccaattcgcactgtggatttcatattttggatccaatccgatctgcataatagtttaaatccaatccaatctaatccacaatagtgcggattggatcagttatttt

SEQ ID NO: 378904 - DNA, 1959 bp, Cannabis indica
ataataattaattaattaatataatagagatgtaataataattatatatcaattaagacttcttccacctatagctaatttcattaaccacacacacttctcctcacctttagccttctttaatttattagatcttgactcagccaatgcatttttgtaaatatatatttatgaaacaaaaaataatcaattattagttaattctgaaaaaaaaaatactcatattgtaataacataattgttatgtatggacaatcggaaaaggttaaaatttatatatggtggtaacatttaataacataataatataataccttgtagagataactaataataactatattcttaattaaaagttaaaagtcaaaaatgaacatttcatgcgcccatcatcactactctacttgtattatattaaggaaaatttacatggtattttaatttttgttatttttttacaaactattgtcagataatattttttacttttttattatgttttttataagtttcatttggcagtatactgtgttaaattttcactggtgttttactgttattttgagttgttcagctttgtgttttattggtgttttataaaaatacaatatttttgaaaatatttccgcgtgataatatttttgtaaaaattaactcaaattttagtatttttataaatttttcttatattaaccacacgtgttaagaggcaagaaatgcccatttggaaaaatctccaccatccgggagattgggccaagattaggggttaaatgttgcacctagtttagcccctagggtattgaaagagtcattacagtttaattcaggattgatcattttataggcttctagtcccagattaggatcaactggagcctaaatatactcacgaatgaggtgccaaggagcccttctaagtctgggatgtatacacagtcgcgaacaacattgcacctagtttagccgcaagggccttgcttcttaactcgagaaacttctggggagaaaatcccagctgacaaaagataatcttgaatcaactacaagtctacaacaacgagaaaggggggaaacactgtagcatgtctcattcgtacccaatatatcaaaaccaataccttataaagtagtataaacatatataagaatctgcacacccactactctgatacagactttaattcccatgcatttgattggtggtttattaattttatgcaccaatcacatcattacacaagaaaagataagtcaacttacctaccacctgcattgggttgccccatcgatcccatattaagagtaatgcctactctttttcacttgtaatcactccactagtgacttaaccacaattaacactaatctagcctacttgcatggttacctataaatacaactcattcacctactgtaaaagggttcaattttagttttctaagcaaaaatattattgaattgaaaggaactttcattgtcgtaagcttgaacaacattaatataatgactcatggaggataaattaattgaaaattttggggttccatctcaaacccatgttcttatatatagcttaatatttttacatttgatcaatgtgggacaatattgtccatacttataacttctctaatcactcttcaatctttataatttcttcttaaatttgttcaagatatctaattttaaaaaataaataacatccacaaataaataagcacagcacagtctaaaatacacatagcatacacatatatcatttatgtataaatatatatatatctttatatattaaaagtgtctatttaacggcatttcttggtttaacagaatatactttaaaaataaaagaatattctgttaaatttaacgatgttaataggtttgatctcccgttaacaaataaacccaataattaaatcaaaaaattaaacaattttttttaaattaaaaaaa

SEQ ID NO: 378905 - DNA, 3028 bp, Cannabis indica
ataggcacgaccaataatatcaagacacgtatgcataattttttgtccacaattgcatgtctattaattatatcagagaatcttatatatcttagtgacttactttgttttgacattgctattttgggtttcgccaactggtttgcaacaaagtggccaactatgtaatcctatttataaatttttttaaaaaaaaataaaatttccttaacattattgtctttgaattggtcccccacttgtacgatcgaagcccagaaggccaggccccctctcctctagttagtactgatacgtgtgtaagaaatattttctttgcttcaaataaaaaaggtgagtttttataggttaaaatattataattttttttcctaagggcgctgttctaggtcatatatatgtatgtgttgtgactaaattaattattgatgattagagatatatcattgttaattttttccttcagtcttgaattatgagtcttcttgagtttgctcctttttcttgtgaatacaatgtacgtaatttcaatacataggaaaagttctcatgtcaactcaaattaaatggcatcctatcctatatatcgaagtgggggcaatacgaagataatccacattttcagtcaatatatgtggggggagatgtgtttttatttttattttatatatacatacattaatttatgtttgaatgtaatatataatatatatatatataatgcatagtcctttcaatgatggcattacacaatatagattcatccttcctgtcaagaaatatggaagaaaacaaaattgggaaataataaaaacgaaaaatactccatcaccatatatatgtagataactagtaattatgatttattggaagagggggaatattgagtaaagagaaaaaggaattgacaaagtaaagcgaatatttgaattttgaattttgatttagcatatctgttataattatattcttgtcccttagatagggagaggttgagtctaacgatcgtacaacaaaatagctaggcttgatcaaagtctattctttatatctatatatatttccataaacgtttaacaaaaatatataaaattaaaagaaaaaactgactgttatagtagatgtaatgaatgtatctataaacgtgccgccgttgagaacgaaaataaggacagggtcttagggaaatgccaatttaaaaaatgtattgaaaagcaatatatgtatacaatgcttctttctactctcattatatattttttaatgaacaaaatatatttacacatagatatgatgctatctagctcctcattctcaacttgcttggatacttacttctttgtctccatcatcgatagtgaatgtcattttcaccattgaaaagaataaaaatatagaaaaaacaaaacaaaaaggttcgtagttttggtaaatagtattgacattataattctttctttcaaaagttacttgggcactttggctctcctgaaaacaacatcctttttcttcatcttcctccaaattcatcatatatattttatttagagtgttgatgttgttgggagtgggatattttcatactttgatatggtgtctttctttaaaggtcaagctttagtagggtattcttatctcgtacaacagaaagaaataggtgcccaataaagaagtggggtatgtgattcggactcacttgctatatgtgttgtacaatatatgtattaattattattattatttaagtataaataagggcagatagagttgacgggtgcagtttaaatataataataattaaataacaaacaaacaaacaaggtcgtcgtcgtcgtcgtctatctattatgcaacacggtcttctgcaacgacttcaaagcaaacgtagtggcccaaacacgacctcttccatgctctccacgtgtcatgatagtgatggcttgatggacattgtgttcttttttttttaatgttctttctgtactattttattagagtacttgatgataatatgtaagaacataatctgtagaaacataatacttataacagaagcccatatttttttttaatcaatttctaattctaatattcttcttcaatctaatatatggtgcaagaatagaccaaaattattttgttatgatctaattctgattggtaatatagatacaaagatttgcaatatttgattgatcattgtttttatttattataaaataagtttcctttccttagagaaatgtttcgaacaaaagtagtttgttcaagcatatttggtttccaaattaatctggaaactagagataacagaatatgtaagagatttatatacaacaatttttttttttaaatcagcaattctacactgcaaaactattattgaatgaaattcggatgaatgcattttctcttccatcctaagcattttttttttaatttcacatctatattcatgaaaattttctttttattctcatcaaataaaatatagcattgagggaatcacatgaaattttacttaattaattctgttatcttaaattttgtccacctgacgtggcatgtctacgtaaatcaaaactaaagatacgtgaaatacaactttgtcaatagtaatttaaagtttccttacaagatataagaaaactgtcgaacaacaagcaaaatgagttaagcaaaccgtcaagaagttgtacaaccatatctggccagccaaggggagtacataggccgacctggaaaagtttgtatggcaggacaggatttaagcacaagctggccagccaaatggtaactgtcaaaccaaaaagggcctgttcgactaagaaagcctgatctttacaaggaaagttgtacaaaagctggccaacacttgccaaagctggcaggaacatcccgaggctgcaggagcaatacctggctggccataggagtacatgttgggttttgtaccataaacaaaattcatttcaaatataatcagatttactaattaataaaagatcagaaatcacttttatgttgc

SEQ ID NO: 378906 - DNA, 3092 bp, Cannabis indica
tagtacaaaaacttcaaaaacataacccaattgacatcactcatttataataataatcataactgagattgaaagcctgaaaaatgaatcattggcaaccactgatcaaatggtagacatgttaccattttacagtgaatcactggcaaccattgatgaaagggtcataaattgcttggcccatgtctaagagaccgttgtaagtcaaacctttcgaaacaatatcaaagactataatttttgaaataatatcattgtaaatatcccctctagttatattctgctcattatttcagacaatttgttgatctattactaacctgtaaatctggctcaattcaaaaattcagacaaaaaaataaatatataaataacagcctaatgatgaattatgcgaatatgcacatgcattcttaaagaaaatgtttttatgtgttaacgataatgaactaaatttcaaataacttaaagtagttaaatagactctcatgctgcaagtaactcaaggcctaataagcaaattgttttttttttgaaaaaaaagagcagaatataattgaatggggatatttgcagggggacaaaaaaaaaatagggccaaaactctacaagccacaagagtcataattcaaaggaaaaaatcctttttattcaaaaaaaaaatctagcaaatgacatattttaggaacaacatatgaagccagagatctttgaaaatttatccctcttcaatttattttgtataattgaagacgagaaatataacagtaagaaaaacaagaaagattaattagtgtatacagtcttcaagtgttaggtgtaaaatttaaagactagataagcgctaaaacaaaacaattataatacaataaagataaatgtggttacatagtattcaagtgcaatatgcacaaaatattaggagacaaatcaaaaagtgaagcaatttattcaaatttctgaaatgcaatcaacagtactagactgtgaccctagaacaacagctgggctgaaaaaatgccagcttgaatcatggaaagcaccataataatcatctgaaactgtcttaattttgaactcatctgtgactttactaaccaaaaagatatgccttgataatgcaacaactgagttcttaaattgcgatgcatactgttcatagttgtcaaagctattcccaaacaatactatgtttttcaaaagcccaactctcaaattctcctctaaaagattgtcatacaactctgcttcacagtgtggcatgaaaaacatggttggcttttgcgcctttcgccgaccttgctcatcaatagataagactgagcaacccagaacttccaaaacttgtgattctgtggaagaaagaactggatcaaatacctcaatgcctccaatccaggtgaactttctttttagcagaagtgcaagactcaattgcaatcgagggttttcataggattcgatgctgccgataccataaattaccatctgcatgcttgaatcagaacctaaaaccttttgcaaattatttgaaatttcttgagactcaatttgatccaataaagtaagaaaaaactgagaagtctcgagtttcttcatgcagagttccatcttctgcatcaattttgattctctaagagaattaacttcaaaatctgttggagaccaagggatcggtttctggggcagtggttctcgagtttgaactaagggattggttctttttctaccgcgacctcgacggggtacaactactgtccaatcttcattcacagagccattcctggctgacacagttttggcagaagcttccattgccaaaagaagaatcttcctgtctcttttacctcaaaaaccttctcttttgtgggttgcaatacaaacaaaatctactttctcttaattccctacacaataaacttagctataattctttctaaacataaagcaccacacagatgcacataatggctcaattatgaacacacaaaaaaagggactatgaaatttaatccaaataaaataactaattcaaagtgaaatcttacatcacatcaccaaaacgagcatggttgaatatttcattagctaatagggatgaacacagtaacaaagggaagaaaaagaaaaggcaaatactgaaatggtgaaattaaaacgcaattatgaaaatcactaatcaattgtatgaaagtgaaaacttgaccccaaagtgggtcgtcacacatcgcggaaagggcgatctgtggagaatcccatagtgggtcgccatggatgtcgcgaagaggaaaatgaaggcgccgtatactaatttttgggagagaaattgaccaaagtggtctaataagacctgatcaaataaatctacaatgttggtgtcctagaattcaattgaatcaacaatttatttttggtttgcagaatgttcaaattcttgaacggcatagcgattgaaaaactaattaattccaatctgttttttttacgtaaagaattatgaacaaacagattcaaataaataattatcatagaaattgtacaagcaccaacctgataggaattagaagatggcgactgcagccggtatcggaagagatgaagtgggcgattgtgatggggcagcatcccctatccccaatccccttcttcttcttcaagagggtattaggtattagtggagaggttagggttgcctaatggcctcaagcccaatcatctctcttaggcctatttacttcaaactaataagagattatttcacaaatacacaacaacgacaacaacaacaacaaaattataaaaacaaagaagtacaaaattttcaatatttttataattttttttaatttatttacagaaaatacggattttttttatgttgtatacttgttaattttttattgattttttattatatgtatgttattttttgttattgtttgaatgttatttttcagttacttttatgtaggtttttgttgttttcgtattgtttttataaaaaacagtaaaaatataaaaatctttggtggcgtttggtaacacttttggtttttaattttaaaaacagaaaaatgaaagtagattttttg

SEQ ID NO: 378907 - DNA, 1761 bp, Cannabis indica
tgttgaaaatttgagtttgttgatggtaacaaatcgtcgttaattggattgacaatacttaaaacattctgccataagtatttgctttagtgtacatttgagctgaatggaaatcgttttcccatctgaatggattgatttctaatggaaaatcaattccctgtcaatgtaaatgtagaccaaacaatgtggagaagaaactatttcatttgactgtttcattctgagaagaaacttttttctcatgcttgctaaaaaaatgagttcagaagagatttgacaaatgaaatttcatgctttatggtgacaggttctctccaagagaattcactatggaaaatacgtagcagaggctaagttccgatcctctcccgaggcctatgaagttgctattaaagaacaggtataaacaaacctatgaatccttattaaaataaacactctcagtgcatcgagcttttcattaatcttgttcgattttgaaggacaaagagaagcttatggctttgctaacatacccaactgttgaggaggcagtgaaaaggagagtagaaagaaaagcgaaaacatatgggcaagaaatgccggtgaacatagacgacaatggagccgccgatcctgtttacaaaataaagccaagtgtagttgctgatctgtatggagaatggatcatgccattgactaaggaagttcaagttgaatacttgctaagaagattggactaactaaaagagtagacttcttctacaatgtatttcaactgttttctgatgtagataacctatctagaagactagaggtcttttcagtaatcaaatttcatggtttacctcacattgtatgtaagaggatcctattactcttttaatggttttctattctatattgtatcttggcttggcttgtttacaaagattaaagaaaaaaaaaggtgttcatgcatgcatttattgtatattatatggtactgtttgactgacatttttgagataatatttataaatctttttttgatccagaaaatacaaaatatataaagaaaaagaagcatgtttaagcatcttttctttatagtttactttacatgatatgacagggttggtgggtgaataaaactgaaacaggtgtgcttctttgttttcttatgtgtgtttaataaaagtaaatgggcaccaaacaacacactaacccctttttgtcattactaaactaaaatgtggtttagattctttttctactctttcgataatttagataattttgagaataaggtgtcagttataagaatcttatactttgagcaaggccggccctagaactagaattaactgtgttatgagtagtaacaaaattataataaaatataaatttttaaaatatatatttttgagctctggattgggtgggccctgtaacgtagatccgaccctgatttcgagaattctcattccattagaatagggtttgaggtagggggttgttttttgttttgtcaagagagaccatgtgtggtgggtgtacttcaggtgtagacaacaaccatcaaccatgaacccaacacagcaacctattggataagataggaatttcaactatcaccaacaatttcatgcaaaaaaaccattcaacattgcttttgggcacaccaatatggcacctcactcacaatacttataggttcccttattatttagggattatttaacgaatacgcaaaaataataaaaaatttacaaaaatatggttgtacggaattttaaa

SEQ ID NO: 378908 - DNA, 3156 bp, Cannabis indica
ttaaaataatatttgctacataatatatggctattggtacaaattaaaatataatataacaaagatgtgtaagtttagatatttgataatatattttacaaaatttattgactgtcctttttattttgttaaaatgacaatttagactttgtgttttacaaatataattaatgttttaaaaccataaccctatttcttcttcctaattaccttaaaacctttccttccctaaccctaacctgagtacaattgtgacaacatttcaggacaatatggacatatgatttatttttagcactcttagaaaattataaatcaaattttcttatatatataattgggcaaattattatagtatatatagtactatatatatataaaaaaaaatataaagtacaattttttttatataaagtacatactcgtgcatgcaattaattatttaatttgaagacttcagtattatcataagtacttattcagacttctttttttttttaaaaaaaaaaaaaaaaagaaaagaaaatatgatatgcttactataaattattataattttttcaaatatcaaaaaatataaattattattccctatatattcatatatattttcttattggaatatatatagttgacaagaacaagggggcaagaaaagccaaacaatttagattatttcaaaaacacattttcatactatatatgaagcagcaggccgatacgagggaaattatataatttaattgcataaaatattaatttttgtaaaatttttaattttttactcaaagttttaattttatatttttacaatattttataaaaatacaaaagaacaaaaaaaaaaaaaaaattacatgaaagtaataacaaaacaacatcaaaaataatatataaataataaaaaaatcaacaataaaataacaagatcgtacaacataaaaatgtatataaattacaataaaatctacctaatacgagtctcccgttagtttcgaagctactgaaactacctaggaatcgcagtcccttcatgggaagggtggagtcgacctttacgatcgtcaaccttctgtgttttctttcgattttgcgagtgctttccatggatttagagttggttaatcggcttgcagaagtcttgagcctggatgatgtcgatggaccggttctggcgttgaataaagctggtgtagaggaggggaagaagagattggatttgtgtcttgttggaaaagttattggccctagaccggccaataaagatggaattgagaatgctatgaagggaattcagaaactcaatcatcggtttcaggtggaagaattgggctccaagaatgtttttcgattctttttcggtagccgtgaggaaaggcaacgggtttatggtgggggaccatggacaattgataaacaattgatatgttttgtgaagccaatgggattgggagagatttcaaaaataaattttgattttacgtacttttggatatcgatcaacaacgttccgttggcttgcatgaccgagttgtttgcacgggaatgggatgagaggattggtaagcttgaagacatcaagcttgtcaatggtacaatgaaggttagggtgcggatgaatatcactgaacctcttaaacgagggttgcaggtggcggtggatgagctaggtaatgaggtttcactcttatttcaatatgaacacttacctgacttttgttttgattgtggtataattgggcataaggccttggactttcctttgagggactttgttggggataatcccaggcccgatcgtgggaggtatggatcttggatgtgtgctccgagttcgccaccgcatgatcgatttcggtatcagaaaaagcgtgataattctccgtctaataggctgatcatgtctatgggagcggcctcgagaattttagttgttgtggagagaggtcgggttcgttattcaagtcctacacaggaggagttggctcccacgtctgtgttagagggccatgagcgtgataaagaggtgaaggctgggcatgcgaccggtcaaaatgtttctgtggctcctggtgtaccgtctccgacggatggcacacagtcgggtgtggcccatatgaatggtattgatttggggaaggtggtgccaacgagtgaaacggatgtgacgattgagccattgggtgatgaaatagctaaccaaggtgcggttggtgagtgttctttgctgcatgctttacctgattgtggcaagggtaagtgtatgatggagggggattgttctatggatgtggctagtggctcagctgatgggaaagaggccgagaatgttgtgggtaaaatggttcatcatagcatgcatggattgaataatgttgataagggtaagggtgttttggacctttcatctcaagtggaattttcttttactcaagcacttcaacaaacatttgaaccgcttatccatgtgcaaaaggccaagacttggaagcggctgaattcctcttgtggccgtgggtctaaaggtacgtctaagccgagttcctttcccattagcccaaaattatcacatgtgttagttgctaatgctaaaaataaggtgagtccgaaggttggtggtggaggtaaaaggaaaatggatgttgatgttcacaatgagaatgtgaagaaggggcggttggaggagcagtctgatgtggtccctgagaatgtaagtaatttattggcgaagcctgctccaggagccatgagtctactatgttggaacgcacggggactggggaatcctggtgcgttgactgctttacgaacggttgttcgtaagttttccccaagtttagtttttctttctgaaactaaactttatggtgggtgggcggaaggtatacgccgtcatattagtttttccaatagttttcatgttgattgtgtggggaagagtggtggtttgttattgttgtggaatgatgattgggaggtatctgtaaaggtctttttcggttggacatattgatgcattggtgtagtgtccggggaggaatttatggaggttcacaggctttttatgggaatcctaaggcaagcgctagagccgattcatggcaattattgtgtaggctaaagggtctgtttgatcttccttggatatgtggtggt

SEQ ID NO: 378909 - DNA, 4598 bp, Cannabis indica
ttatggtatcagagcgagaaagagagactttccctgaacgatcctagctcccttctccgatgaacgtatcgcgatttctttctcttctccggtactctgttcatcgtgtcttcttctccctgttcttaatccatggcgatgtcaggcgaaaatctagctgaaactcagatggaaggtgaagatcaaaccccaagaaccacacgcagtccgtcagcttcaatcggacatggaaatcaagatctccaattcatcaatccaaaaagtccactcgaagatccgaccaacccgtactacctccatcacggtgacaacccaggtaatgttcttgtatctcagcttctcactgggcaagacaattatgtttcttggagtagagccatgcaactctcaatttctgtcaaaaataaattgggttttcttgatggttcaattcccaaacctcctcctgccgattatgttctgtacaatgcctggatcaggaataacaatattgttatatcctggatcttaaactcggtgtctaaggaaatctcatccagtatactgtatgatgagtcggccgccaatatctggactgatcttaaggttcgtttccatcaaagaaacggaccacacatctataatctgaggaagagtttgatgaacctcaaacaagactctctcaccattggtatgtattttaccaaattaaaaactatctgggaggaattggcaaattactgaccgaattgcacgtgcaatggatgcacctgtggaggaattaaaaaactccaagaacatcatcacatggagtatatcatgtctttcttgatgggtttatcggacaaattttctcaagttcgaggaagcattctcttgatggatcctctcccagaagtgaatcgggtctttcatcttgttactcaagaagaaaatcaaaagggtaatcttaccactgaaaatgatcctaataccagccatgcctttgcgttccaaggagacaaaaataagcctgataatcaaggtcaaaaacctcctaattccaagaagggaagacccttttgcactcactgtaacatccatggacacaccatagaaagatgttacaagatccatggatatcctccaggatataacaagacaaataagtccaaagatgctgttaccaatcaggttcaaactgctagtgaaaacagtaccaagaatgaagattctcacaccattctgccacaactaagtgctactcaatatcaacaattgcttaacattcttgctggtcaacatggtaacattcctttgactgatcctagcacttcagccgaaaactctggtatggttttaacatactcttcatctaaattgtttaataactcttggatcatagactcgggtgccactaggcacatttgtaacaacttacaactttttcaaagtattagtaatgctgccatcaccaaactcattttgccaaataatgaaactctccatgttaacaaaagtggtactgtctatgtttccaaagatctgatatttgaaaatgtcttatatgctccaaattttaaatttaacattatgtcagtaagtagcttaactaacaatgattctattgaagttaaattcaatactgacagttgtgtaattcaggaaaaacctcacaagactgtgattggaagaggtaaagaacataatgggttgtatattttggataatacccattcggctactgccatctgcaattctaccatagcagctgagatgtggcactctcgaatgggacatccctctcataagcgtttgattttactttgcaacaatcttaattgtaaacttgataattttcatgaggatatgccttgttttgtttgtcctttagcaaaacaaaaaaaactcccctttccaaaacattttggttttgctaagtgtaagtttgatatgattcattgtgatacttgggggccttaccatattccctcacattctaatcacaaatactttctcactttggttgatgataaaactaggtttacttggacctttttaatgaaacaaagatctgatgttgctcatataatccctgattttttatcttatgtgcacaatcaatttaaatgcaatatcaaatgctttcgatccgataatgcacctgagttagtttttaaagatttatttgctaaatttggtattatacatgaatttacttgtgttgaaactcctgaacaaaatgctatagctgaacggaaacaccaacatcttttaaatgttgctagagctctctattttcaggctaagcttcccattcaattctggagtgactgcataatgacagctgcgtatctcattaatcgaactcctacacctaatctcaacaacaagtgtccctatgaattgatgtatgataaaataccaaaatatgagaatttaaggaacttcggctgcctggcatttgccagtactctcacagcacatagaaataaattctctcctcgtgctcgaacatgtgttttcatgggatatccccaaggtatcaaaggatacaaattatatgacttaaataacaaagagttttttgtttccaggaatgtcattttccatgaaaggatataccctttccatcgtctcaacaccacttatgatgctacagacccattttccaaattggttttaccctctcaacacatatctgaaacttatgttcatgatttacctactgatatgaacaaaattccttacactaacattactcctcagattgatgttactgaacaggacacgaacatacaaaatgagtctcttttccaagacaacactgctgtacaaaataacacaccagcagacaatactaacactgcagacaatgctgctacagacaacacaaatagatccacttcaaatgaaaatgatcatgttctcagacgcaccagcaggattcctagaccacctacatatttacgtgactatgaatgccactcgattcttcaagacaattcttcaactcctcactgtttttcaaaatttatttcatatgataaattgtctgattctcacaaatcctttatttctctcatcacagctttgtatgaaccagccaactataatcaagcctctcaatacaaagtttggaaccaagccatgaacaatgaattacttgctttgctcaagaataagacctggacctatgtgaaacttccatccaacaagaaagcaattggctgtcgttgggtatacaagattaaactcaacagtgatggatctattgaaagacataaagcccggcttgttgcacaaggctacactcaacaagaaggattggatttcttcgataccttctctcccgttgctaaaatggtgactttcaagttgcttcttgccatttctactatcaaaaaatggcatactttacaacttgacgtcaacaacgccttcttgaatggagatctacatgaggaagtgtatatgcaatttcctaagggccttgatttacctcctgaattttctggccaaaccgatattgtttgcaagttaaataagtccatttatggactcaaacagtcttcaagacaatggtatagaaaactgttcgacgccttaatccaagaaggcttcactcaatctcaagctgactacaccttgttcaccaaaggatttgaaaacaacttcattgctctcttagtatatgttgacgatattatcatcacgggtcccaatctctccttgctgcatcaattacaatccactctccataacaagttctctctcaaaatccttggcaccctcaagtatttccttggttttgaaattgctcgggctcctgaaggattggttctctcccaaagaaaatacactatgcagcttcttgaagaaactggatactcaggcagtaagccaactaaaacacccatggaccctcggctcaagttagacgatcaacaaggcgaggcccttactgatccatcctcctatcgtcagattgttggcaaacttctttacttaactctatctcggcctgacataacctttgccgtcaatcttttgagccagttcatgtcttcaccacgtacaccccacttacaagcagcacatcacttgcttagatacatcaaaggcagccccggtcaaggattattatattcagccacatcctccctacaacttcgaggattttctgattccgattgggcatcttgtcccactacacggcgttctactactggtttttgtatctttcttggggactgtttaatctcttggaggactaagaaacaaccgaccatctctagaagctctgctgaagcagagtatcgtgcattggctgccactggcagcgagattacttggctgcaatacttacttcaagactttcaaattcctcagacacaacctgcgttcatcttctgcgataaccaatcggctatacacatcgccaacaacccaatttttcacgaacgaacgaaacatattgagctcgattgtcacttcatccgtgacaagatcaaccgttccaaaatttgcctaagtcctatcaacagcacattacaattagcagatgcctttactaagcctcttgcttcaaccatcttatacaatcacattagcaaaaatgtctgtccacgatgtgtaca

SEQ ID NO: 378910 - DNA, 1617 bp, Cannabis indica
cgtacttaaattaaaaaaaaaaaaaaaaaaaagcacaagttgctatagttagtgagatggagggcatgtatcatttttttcactagcaccagaagtagagttcagcaaatactaatccttaagattttctagactttaaactataggccctaaaactttagaggtgactcatcaagataagctaatttccaaagaattaattagaaaacaaaccatgctccagaagagaacggcatctcctttaattggtttcacggataaacctttcattatttttccaccacagctacagtctgctgtaccagcctgagaagttacagcaaacatatattttaaagttcggaaattttttctcatatgaatggaaaatgaataaacaccttagagaactaaacatgaaaacattacgccaaaagcacttctaaatgaggaatagtaatctgcaagttgcaagttagacaaacataccaaaaaaggatcctcaataaatccctcttacaagggttaactgatcaatatcgtatttattcttttgtatgattgagtatcaaaatggataaaaaagaattacggctcaacagacaacacttatacttcataaattccccacacgcaacttgcaccaacaaagtttccttgcatcaataatagaataatcataatttttttttaaggaaatgaggacttgtaatattcacatagcacacttcaattttatttctccctaaactcagtcatcatctgcatatttattaaccttttttttttttatattcaactcttgcacgtccaacaattgacattataacaccatcttatttaactgaaggaataatttcacaggtaacaagcagaatgtcacacatacatatacagatctgaatacataaacgaatgcatggggaagttccacagttgcctttccattatacaaatgcaagcaaactagagtccaaatgtcgcatcataaaaaatgattttttttttgcatcaaatggtagttgtatatgcaataagacaagaaaatggctataatagtaaggattgcattaccataggaaaatatgtctctccaccctcaacattgtcacttaagtacattagcattgttgctattctctgaccaccacgcttcaagttaaactgcctcaacagataaaaataaaagaattctcagtttctcacattacaagagcaagagataaaggtctttttttaggccaagagataaagatcttgtgaagaagaatatacaataagagaatcaatgtaattaagtaattaaatgtgccaagtcatgttgaaaaacttacagtatcagagaagtagtcgtgatgaggtttgtaaaactcactcttttcatacctgtactgctgcagatgtcagccttgataattaaaagataataatatatcttttcataaacatttaattttctagttaagaaactacattccaccttaagacttgaatcagctccccattttccacaggtatttgtgaatagacagatatacgcttttcaatagcctgatggcaggagggtgaatagagattaaaaaaaagcctgagagagagagagagagagagagagagagagagagagaagagagagag

SEQ ID NO: 378911 - DNA, 3550 bp, Cannabis indica
tatatatgtagatagatatatattaattaactctatatatttaagtttttattttactataaattaaagtatataaagcacttactaaattttgttatacggaattcaaaaagtagcatatatataataaattataccgctaaaatttaatataatgctacatttgaaaaacaattaatactttttttttgcttttgctaaaaagaaaaattcaagcccacagtgagccaaaattatatgcatcgacattcttaacattaatttatcaatgaaagttgtttcagctttgccggtggttttacctgaggctattttccaaaacataaataataaaatacaaaccaaagtgatagaaaaatattggtaaaatgtaaaaattaagcataggatactcgaatggaatgataggtccaatatttttatgcagagttggatgagggtccgctgcctggcaaacccaacaatcaaccctaaccttgggtcccatacaagtctggtcacgtcccaccggacccatataacctacaaggttccgcaaataatgaacttttctttcttatatacatatgaatatatattacgcaatatatcaatatataatattttctttttctcaaaggataaatattatttggataaataatgttatagtttcacaatcacgcatgactaaactgtctactcgtgaccaccatgcacccctagctaggtgaggtggtggggcctgtgtacgtacgtaaccaattaaggccctcggcttcaattaattctcctcttattggtaattaatactttaatatgtcttacttatactactactatagggttttgtacgtattaaaatttttttttgtgtatatattgtgtactgtattatataaaacaaactaacagaagcttgttcaatattagaaacaaaggatatatagcctatgctgctaaattatgagcttccacattgagtctgaaggggaatccaataaaaagttagctagttccggccaaaccgagaactatcatacaaatcagtatgatcacttatgagatcatattggtgtggtgttgttactaacttacttgtagtagtactatactgccatgtcactgctagtagtgccactacacaaataacactcaataaatttagcctggccatccaattgagttggggcctttggatcgttaaaaaaatcattgaaagtgaatgattgaagggtgatataaaggcaccttgtttaattcacaaatgacaaagttgtattgggacccaacacttccctccaatttcattctacaccatccaatgtggtcatcatgaatttctctttcttcttcttaatgggattatttattatttcctttaaagtttattaataaacccacaaactatacatcttattgcgcctaaaccataatcaaattatcaattatgcacataataaattaatattaatgtcactatcattaacttctccgcaacatactaaacattatgtatatacttctatttcatttcaaaaatgatatatattttttatttatacatatattttttttaaatagtcggtcactgtttgcccacgtggcatgaaaatgaaaggttaggtgggggacccacttgtatttttggaagggagaacgtgtcgagtcctgagatgatcaaatgggagtgtgggttttggaggggacgcccacgtggactgtgggtccctagatcgatgcatttgacgtagtcaaacaagatagatgggttgataaagtggggccacttagttaagtgaattaaactgacgtggacttacattttgagcatttgtatttaacaccatctgaaaatgttatctttatcactcattattaataaatattttcattatgtctagtattataataaaatatcattttataattaattaatgattttttataatatttattaaaataagatatatgagatttaatattaaattacactaatattaatattatacttcagaaaaaaataactaagtgcaggacactattcctaaaaagtactttacaatacttatatttaataacaattgtattagcgatactctataaaaattattaacacaataactaataataatattacaccatataaccttataagatgcttagataccaccaatcccttctaccatttccattttttaaattatagtcttatatatatagttacatatgcatgcaagtttaaataaaatattttgcgcgtgataaacaatcgccggagggaatctacgtttggtggatgagttccgactgaacaaattttactatttccgaaaattgttctgttttttattaagaaaaatgtatataatttgtttttcaatgtaggatgaacacgtcaaaggcttttatatattgttgtaatttacaaaatgaattaaattgatggcatgtgctcaattttattagtcaaatatgcagcaattaatcgctgaaaaaagttgatatcagtgtacttatttcaatttaatctattttataaaatgtgtaaattatctattaacaaaatacaaagatagatcacatacattttgcactaaacagacagtctaaattagtaaattttctaaaacaaatactgttaattgttcatttagtaagatatgttttttcgtttgagaagagaactaattaaataaaattgcaaattatatgattaagttgatttggtactctcttttttctttatggtaatatgagaataatttatagactattttaaagtacactaacaatatatgacagagacgatgaccaaatatggtaaaagctaattgccaaataaaggttggacattttctcagtgccctaagctcagacaaagactcagttcaaatgaagaacaaaattttcctttgttgaacgttgttaacaaaagtaattttagttctatatttttttttatttgaattatttcatatattattttttttaattttttttttaaatttagagttatttttttttaaatttagagttaggtttttaaaatagtttctcttgtagtttctatgtaggttcctatacgatttttagttgcgatttaagttgctacctagttgtaataagaatttttatgtacaaccaaaaaaaatattttaaagtttaaaaatggaaaaaccattttttttttcttatagagaaaaacacaaattttagggtaaattgttcattggaatgtaatttataagtgccagtgatgttaccttaggatttttttcaactttcaaattttgaaattcatggtgcctcaaaattttaatatgtattaaaatatattttttttaaatttcaataattttaataatagttaaaaaaaaaaagttaaactgtctacaaaatttaaaagtataattctgtgaaattttcgaacaattaaatttttttaattaatctaaattataaagaacgaagaaaaaaagtagattgattgagatcaagtgagtatacacgtacatgataaggcgcgtgaaaccattttggattggtttttatatatatataagaataa

SEQ ID NO: 378912 - DNA, 6095 bp, Cannabis indica
attgtattaaaaataataaaattaactatgctactatgttctaatgtatatagtaaaattataccacccactaattcagccaatgaactatcataaaaaaatactctcacgaatgaatgcaaaagtaatggtcttacctataattttcccatatatattgattccacacattttagcattatagttgtcttttcaagtcgatagataagcttatagaagttggttgccttttttcaaattacaaattatagatcctaaagtaactgccatacatgtacttgaatccttaggattcaagtgtccttgaagatattgaaaccatacatggaccagcatgagtgagcctgttcatgggaatatgaatatcaggccctttactctgcaactgctcatactctaaagggaagtctcttggtctatattttgcagccaactttagggatatgcatgctgtaaatatcaaaattccagcaagtatccaactaaattgcaagttggccagcgctcttgctctcgaatctgcctccccagaagcacagacaactgctccaagcctgtcatccccgctgctaccttcgaccaaatgtacagcacaaccagcaggaacaaactctggaagccatagcatcaaccccatgttcataaaccaacaaccttgaaatacaatagaattagagagaacaatagttgcagggagactagttggaaaacaagttgctgcaagtgctgccatgagggaaatgaagactatgacttgcaaaagccaatggtaatgcccttcaatcccaacatggttagcagagtgaaaatgaagcaggaaaagttcttggccaaaaactgaggatataagaacaccagcaactcctgataagatgtgcaatgactgcattaactcagcacaaagggtaaatcctgaaaatatagctaggtggaggaacatagttgcatgctcgtagttgttgagtttaaaggccaagtgaagaaaagggaagtcgagaatttccataataattgcaaatacagagaatgataagatgaaaataagctccaggtgcttaaatttgaaggactgtttaacgggtaccaaaaccttacagtaaagttgggaggtcctttgagaaagtacgttctgatagtattgatgctgtgccataggccgagaagggcaagtgccaaaccaggcactatgtgccctatcaaagtgcccattgcaagcttgtctaagaggtcagggttggcttttgtctaccacactctctctagatggagcttaaatactaaacacctgatgctcatatataattatatcttatgcatgagtacaaagtagaatatcataatatattcatggtgcataatgcatgtgcttccacaaacaaaatagtagaaaatgacatctgaacatggacactatcataaaaagctattgcatatttcttcttttttctatttttgaagaaacaaatgtagatatgttggggcagagaataatagtaaaagtagctgatagatatacaatatggtaaaataccaaaagctttggtgcataatgcatgtgtttccaccaacaaaattgcagaaaaagaagtcctgaaagtttgaaaagacaaggcaatatcaaaatgaatttttctttcactaggaacagtaatggctggtatacgttaaaactaattaaaattaacccagcacctcaatgtggtctgttcccacaaatgtccaagatgaatctctgctaagcaattgcactatacttagcaattgttagttttttgctttccaaatactataagattttgggatgtagtcccattctctaacttaaacccgctcctaaacgagtttggaagacctttgcataaaaaaaaaaatagtttaactttacttattataaaaacaaaagaaaaaatctaattcaaattaggatctaaacttcgaactgagttgtagggatcataagtgacatggttatgttttgtttctgaaattttggacctggcacgactgtgactcctgctggctctaaaatttctaagtctaacggtattcaaaccttagaacaaatgtctaccagcactttccaacactcctcttaccactagaccacttcttgggaagttattatatttttgttgagtatatgtacttgttaaatataagattcttaatcaaagttgaaattaccggaaagtttacatgagactaggattattagatagtatcaacaagtatagaatttgtagagggaaatttgactttccatgtatacattagatgaaaattggtcccttaacaatattacgagactaggccaacattaagtgtaactccagtaatttgccgtataaatatttaagtttaactcccagttgtaaataaatactaagtttaatttttagtggtaataataactaggttaaatacctaagtcattatcaacgtgtcattttcttattggtatattcaaaaaaaattaataatttgaccaatcaaagattgtcacgtgacaatttacttaacacttgagtagaagatgcacattatttgcgtcaattgtgttgaattattagattctttattatgaaattatgttcttaattatgtgggtgattcaactgtcttcgaaaggccaaagcgaaaatccatcctatacatctcacatctacgatgcctggctttcttttctatgacatcagatagaggccaaccttcatgttttaagaaagaaaggcctggctcttccatccttacagggccacaggaatatcctattctattatatgtagtggaacatgaagtgtttccaatttataagtgtggcatctaagattaacccatttgttaaaaaaaaaaagtttaactcaacagaccttctatccaactaactaaagtatttacataatcataataaatttaaagattctaggcatattacctagctataaagcagatgtacaaagtgcggttgtggtgtttgacccaattccacaagaaaaaacgtaaacttaccgcctgttagaataatgtaacccttcttccgatattttcacagaaatcctgcaaatgaaatggaaatcgcatggtaatcacccaagtaaaatctagaaattaaaatacgttatgaaactcaggttaattacagctttgaactgtcgtgaatttatctcaacctacagaaggtcctggacagattttgaatgctgctttctctttctttatggatcaacaatttgttgtcacagtaaaatatagaagaaaaggaccataaatactgacaaaccgtatggtacggtaaatctatgacatgtatgtaatgcatcacttagcagtaatttttcattgaatttattaccaacttggtaaatccatctctgacattactctatgtcaagaaactttacagtccaacaaacaaacttttcgtaaaacacagcactaacaaagaatagacaagacagtaatagacaagggagggaagcgttatagaagatctcaaagcttgttccacaccaacccatgtgtcaaagggtcatctttaaaagtaaaatataaattacagttagagcattgcctccaaagcacttttttttttttttgaattaggatccgcctatcatatatttgggggccaggaaactatagcgctaagtaggttcctaggaggactcggacctcatacttgtctgaacatttgagggaataaggtcaagtcatcatgatgcactaccattttcgaagttgccatcttttcctatagcctcaattagggagtaataggtgttgtcatcaggtttgatccccttgtttgtcatttccttaagaagttcttcagctagaacaccttcctggtttttgcaaaggccttgtataagggaattataagtgagaagtgtaggattgaaacctttactcaacatttcatcccgaactttgaaagcatctttcatatcacctctcttactataaccactaataagggtattataactaatgaaatcaggcttaatccctcttcctttcatctcattcacaagttgacgagcttcttcaacttttccctgtctgcaacgcccttgcatgagagtattgtaagtcacttcatcaggaggaatctgcattttatccatttccttcaagagcataaatgcacggtccatattgccattagcacagtgaccatcaatcaaggcattgaacagcacaagatcaggcaaaacacctttagtcagcatcttttttaacaagtcatctgcctccttcatttttttccgtttgctcaaaacataaataagtgatgtgtatgttatccttgtaggctcaatccctttactcaacatctcatctagaagactaaaggccttattcgaattcccacatttgcaatttccgttaattaagatattatatgtaatggcatcaggaactagcccattttcccccatttctttaaccaggtcatcagcttctgtaatcttaccttctataaacaaagcatgaatcaacaaattgtaagtagacacagttggttttatacccttcttcaccatttcatccctataactgaaagccttctccaaatcacctttattgcagtaaccatcaatcaaggtattataagtcacagcattaggtaccaaaccgatttccatcattttatcgaaaagcccagatgcttcttcaagtcttctttccttgcacaagccactgataagtgaaccataggtatatgaatccggccttatacctttagctttcattgcattcaagatcaaacgacctccttcaactctccctcttgaacaaaacccatgaatcaaagtattgtatgtaacaacattgggattaatctccaaattctccataaacccaatgagctcctttgctttcttcaacttcccttctttacataacacattaatcattatgttaaacgtataaacactagacttgatcttcaaactaaacatctctgcatatataacccatgtcatctctagcatattcattttcaataacaaacttaagataccattacaagtctcagtctttggaataaaacccgtttctttcataaagtaaaagcattcaaaagcctctttagccctcttcatttcacaacaagcccttatcaacaaatcaaaaacattggtactttgtatactcaactgttctcgcgcacctccaacctcgtcgaaaatctccttggtagtcgcaatgccgccatcaacaacttgctttataatatgtaaagcgaatttcggggaaggaattcgggcgagaatggcgatggtaaggcaaagatttttaatatcgagggtattgagctcaacatgattgacaaactgaagaacaagttctggggtttcatggagactgacgagggtatcagaggttaaagaggaagagagtttcggtgaaaggtgtttgattaaatgccactgagaagagtggattaagttcagtagaaattggggggttagtgtgtgaggaattgaagggttgtttggagaagcggattgggtttgaggaactgaagagaaaagtgcataactctgagactggacagtgatgatgatgggtttgagtgcgtaatgtttgaagattcgagagctgagcactctgtggggtttcattgtgaacagagtgagatgggtttgcgttagctacttcacaggagccagaacgtagttatgtaccctattcctctcctcgttgaatcaagagagtggtgtagtgtcaaactaattttaatttcagacattaaactaatttaatttatattaaatataataattatttttgttgattttttaatttcttaataagtaaaaaattaattaacgtgtcatattaattaatcaatataaatatataaagaaagattaaaatagaagtgatgttaggggtgcacattcgttgggttagaggtaatgattgcagtttaaaaaccctacttagtacaataatataggagtgggttgggttggattcattgggttgagatgaatattttaaactttaatatttatgttacaaacaggataaaattattcaacctagtgcatacacaaaaaaaaaatgatacatatatgtgt

SEQ ID NO: 378913 - DNA, 1691 bp, Cannabis indica
aaccaaggccctccgaatctctcacattccctcataatctcagtctaaaaggacttttttgcatggaagtatggggggacatacacacatgaaagaagccgaggatttgaaggtggatctgagtaaactaagccagaaatatggtgacgataacacggtatacattcaaagtcaagcccagatttacaagctaaataatacccctagcagtaccaatagcaggcatataaatgtgaaaatagaaatgaagtttgttcaatatacgtaccagtggactagcatcaacttttagctgggacaggaagatgaaatctggagcgtacgactgagtcagggacttcagttcacgaaccatagaggtctgtcccaaccctctacagttccaagccactactctcatggctcctgtggaggagaaccatcctcctccataaaggtacaagagtgaaccgacaccagagaacaaaagtcttcaattatctccaaacctccactgcttttataaagagagaatctatccggaggtaacccgagccccaaaacaggcaaaaaggattcataggttgaccgactagccaccacatcttcttggttgggtccaatcaaatcctaagaaaagtcacacaccacaccaagaagatggcaaaccactttcaaaggactagaacaaactgacaccgatctttccacaagcttccttttaatgaaaggagaattgctttcaatttgctcaaggaccagcatggcaccaatatccccaccaatcttacgatattcaataatgtcaagcgcatcaaacttttcaagtacttgaataaatatctatagagcttggaaacaaatggccaaagctctaccctcattttccaggtaattaacaacattacccaaactagatctatcaaatgagctaccaccatggaccatcaggcccaatatttacccacacggccaaaggcctccaaccactacaaccaactaaataaagttttagaaccaatcccatgggcccaccatgattggaaataaattcacccaatggcctaaacatatcaacaacactcatcaaatgattcggcccacaaatgtcaaaataactcaataccctaggcccaacaacaaacacataacaaccctcaaacaaaggcccacccagccttgaataaaccaccacctcgggccccacatcacaaaagtcacacatctctccaaaaaacaaacggtcataatataaaaatggtacgtgaacgaaaaccctttccatgcacaccagaaacataacccaaacaaataacagagatggcaaacccaacttcaggcgcgacatctgaaaaactggggaaccaaaaagtcatacagtttttccttcccacttctcgagagcctctagtcaccaacaacacttttttcaaaataaacggagcacttcccggagctaagcccgcctgaccgtgaaccgaagctctcacaagaacaatctctaccttcgcctgagcctctaacggagaagacgatcgttgaacccatcgagtaaatccccagtcagcaaggaaacctctgccagggaagcagtccgagtatgtcgacgacgaccccaaataagtgccaaaaaccaaagatggaatgttgggttttatgccctaaataaaactccatttcaatgtaatctattttattcaacatcaataaag

SEQ ID NO: 378914 - DNA, 2550 bp, Cannabis indica
ctattgtcaatattaaagggggtgagtttgaagtaattgaaagatattctaagcatgagtcacttgcatatggagctgattggcatagagaagaacctattcatggcgaagaaagcaagaactcgttggtcgctacttgctcgttttatgaccgacttcttaggatttggaggcctcaaagtaatctttacatatgaaaactgtctcttggtacttctttcaaggttagttaaaaacacaataacatgaacctatctatgtatctgtactttcattttgtgaattttcttttgatgcattaactttgctcttttgtactgattattgtgaaagaatcaaattctgactttatttgaattcagcaatgaaaccaaatttagtctttttggcttagacttgttacctctgaaataattatcttgctattctaagactcctatttataattttttgttcttttaaaaaagtgaagaataatccgtctttgtcctctattttttgtatgttatactttaaagtaaacaatcatgatttaattaaaggattgcacttttgattatttgaggatgaagaaagacatgaaagatcacttttgatagtggaaagtggaaatgttgcttattgagaaagagaggcttaattccttgtaccataatagcattgtttactcacaaccttcttcctcattttctagatactaaatctggacaagaaatcaagtacagaggtcaccacctacctttatcctaaagaagtacccacctagtattaaaagaattgaatgcctataacttctaattaaatttataaggtaatttaaattaagctttccataggttattagctgtattgtgtgttagctaaactagattaataatgacttaataagcttacatcactcaagcagtttagtgagttttatatgagtgttctgcttttcaagacctcactagtctttctcttgtggagcttggataagattagtgtccattttaattgaaaagcataccttgatgatttcccccatggatgcaatcttttttttttttttattttttttcttttggcaaataaaaaaggagatcatgtggtgcatatttcttccccatcctttcagtagttttaacaatttcggagaccatgtgccaattatagaagtcttatactttattttcgcttaattaagttatcggtatgcacctcaggagtttctgtcacaactagctagtctctcaaagggttaagtataatctctcccaatgaagggttggacataagcaaggaaggattccagtaaaagtatttttaccactacaccacacaacacatggttatagatgcattcagttatctttgaaagagtgaaaacattattttatttttcattttcattttttcaagttgcaaattatgtttaagtcaatattcttagattgtttagccttcaaaacaaaataaatgtaattttcaacttaaaggattcaaatgtcacaaatatacttcaatagtggtcaaacttttgtctctcttttcttttttaccaaatacattagtttatttttttgtggttattagttgtttatacattttgtattttgattccgaaggacaaataaaaaacaatttatattcaaattcttatgtatatcttttctaaatgaatcccaagcaccacagatacataagcatagacatttattaaatatcatcacactaaattttttgaatactctctcaataaatactcttgtttcatttcactaaattacactccttatgtttttttgttctatttatcattttttttatttctacaagaagttttgttaatgttttatgacctttttctttctttctttcaacaacaaaatcaaatttaagagttctaaaatttaaattcccatataaatgtaatccccattaaatatcaaagtatccacatagcaaacaattcatcatttataatcattaaaagtcataatttcaaataagaccaatgatatttttgtccctcttcaaaatttagaagggtcaaataattaacttcttttttttagtcagtcattttgtttctattccaattctcaagtgatatccagtcaaaaaagagcatttagaatcagttatttatgtacttgaatgtaccaaagattagcaaataaaatatatttggcattttcctgaaatgttttttttggcacatgcatgcaaaaactatgatttctgaaaacgaaactaatttgtagatttaggtaatctttctttttcggaacaagaaagattatggattttttttaagattacagtttagtttgtgataaaaaaatattaaatgtatataaggtttttttttttgaaaatgcctcttagaatctcaagagtaaactcagtggataaaatttgaagaggaaaaaggtgtctaaagactcgtttggaacgtcatattaggtcgtattatattgaattggattatatattatatttttatataatactatattaaacttctaatttatactaaaatattatatatttaggtgtccataaaag

SEQ ID NO: 378915 - DNA, 1918 bp, Cannabis indica
ctgcttattgattgttgtgatattttttttttgagggtgattgttgtggttcactgatagatagataccttcatgcaactgaaattataacaatccattttactgtgtgattaattatggttggctaatggataggtttttcttctgcaacctcccgtccatgttgaccaaggcgacaaattaaatgtttctttctcaatgattcgctcgaaggagaatcatagacttttggaggttgagtttggctgtgatgttacacaatcttctggcaagattccacacttcaagaacaagtttttcattgaatgagaaagaagctaacctcacagtttggctttgacttttgacaaaggtaaaaattattagctcttatctgtcatgagaatgcatcacaggggtccatttggttttagaccatcagtttgataagtgtctatacattacttttttagaaattctttattatttatttatttttacattatatctattgagaattttatccttaataattaatacatgaataaataggtctcccctctactaactaattaatttgacaatttccagtatttatgtgctttgcaaacctgccaccagttttctgttctaaggcttcttcaaaaatgatgaaatctacaaatggacaactttttgtggagttttgcagctgtttttggtagttggttttttattttgtgttttctgtaattttatctttatattaagttaacagaaaattagaacatatactttagaggtttgtaatttgtacaatgcgaaagtatgcattgttgcagatgtcaaattaaaattttggaaggaaaaatgaatggtgaaaaattattatggtcgaatacttgctgcaagtcgtcattcaaaaacatatcaatatattttaaataattacaataaaatagcctttcataattgacttcgttcacatgcacatgcatgcctttaaatttaattagacttgaagctgcttcgattaggcatgccaacactatttgaccttttaaaagcttttaatactcttattacattgaattgccaacttgatacatcaataattatctacctttaacaacaaatttgggtgctattgaaagcaaagcaatacagtttcattttccttaaattgaagccttattataaattcttgcaagtttaacttacataagttgagtgctggcctgttcttgtgctcatatctgtaaacaaactatgcaaagatcatcaagtacttctcgagcttctgacgaattcttggtcaattttccaccgccttctttcgtcccgctccccatgaaatctgcagctgcagaagaactgcctctgtataaatccaactctgatgctaataaaaaagagcttggtgtgcacaagtcgtcaggggaaaatatcattcatgtgattcctttgattttgatcctttgtggttttattctttgggttttctctcatccaggtaaagtgtgatgttgcaatggcaaacaaaattaactgagtgtaatttcttgtttctaagacatgaaacttgtttcttctctatcttttgctccacaatttggcaatttttattaaagagttgtttagtattaacgtttcgtttaaaaacgactcgtttaaattgaaattcagcgtggctctagtttgatctttttagttacatttttcagaatatattggacaaaattaaagagccattagaaatgtacatatttgcaggaggtcatcaatcactttttatataatggcggcataaatatctaatgttttagtttttatacacttaaatacctaatgtttatttttggaggcaagaatatctaatgttacaattctcttacacctctcttacaccgttactactacttctgttaactcataatatggacacgtggagggttcaaat

SEQ ID NO: 378916 - DNA, 1262 bp, Cannabis indica
tcctttatatatatatattgatagagagctaatgatacaaatttattattaatatagcatatttattttacataaattttaagagctactctacatgtgtgaagcaacattaattattggtctaaacttattttgttatgttattaattttaaattatttgttatgtatgagtatttgtgaacatattatattaaagataaaatatataaaaaaaatgatagatagtgtagtgtaaaaaaattacagtaaaatagataacataaaattttacatatgaaaacatatatgttaaatctaatccacctagcaaaataggaaatagaaaagatagtcaatactgaacaaaataatagctgataaacagggacggatccaattgtgttaatgtgagattatacaaaaatattgccttttgaaaagttaaatttaattttttttaaataatagaaaaacactcacaaaattaaatttaattatagaccaaaataataaaaaaacactcacaaaattaaataaatttagtaaaaatgattataatatatgtatatatatttttttaataataaaaggccctcacaaagtgtccccacttaaaattaagggaaagatataaagcattaaaaatggaagtatgtactattattaatgctcaactcatcataaacttgaaacgattcatttgtagaaattaagccatgtaattaaattaagagatcaaatttagaaaggatagtagttagtggtgtctcgcacatcagcacatgaacactagtataaattatcaaaaaaaaaaaaaataaacacatatatctatctggtataatatttattgtccaattaaatagagtgtcctaaatcgaatgtgaattattttaaattgtcagcctctctttttttaattttctttttattttatcatcttttgatatttatacatgttatatatctaaatatgtgggcttttacagagaggcgaatagggagaggaacatgaatgcaatgcttttgcatgtgcaatggtatcagaatagcacatgaacccttactcttaataataagccattttcaaacagacatcctcaaatgggtccaatctgggccagttttaattgctttctcatcactacacttctaaacatctcttctcaatttcatatataatattagggatatgattttgtccttgtaatgtactttcatggaatgtattctgtggtatattagatgagtctcagggtacattaaatgagtgtcagggtac

SEQ ID NO: 378917 - DNA, 2289 bp, Cannabis indica
attttttttaaaaaaaaacatttaaaatacatgtccaacacaaatattgcatctgaggcttatcctgttgttatattacacccaataaaattccaaaatatggtgtggtgtcaacccactttcttatggttggccatagattttttattttcattacgcttttcgtcaggaacctttggtatttgtttgtaagttgtaacgtttatctttgcccattttatcttttcattttgattttcaaaagccactatattcttgttcacataattgaatgaaaaaaaaaaacttttgtttcttgtaattgtagatacgacaccgatttttaaattataccaacaatgaagaaaagactagatgaatgcaatgtaaggcggtgcagataatagtcattgtcctttctaaaaaaatttaaacgaaaagataatcgtttgaatattttacaattttcaaattcaaaagttttttatttttccttcattttacacgctaaactccaaatcaaacaaaaccaatacattaaaaataattataaaataaataaccgagtgctatgttgttgctacttgctacctattgagtattgacgccattggtctagttatatttataaaacaaagatttgtactccacatcattttattctcaatcatagaagaaaagaacattataaaagggactgtattacaatatagtttacccatctttcaaggcaaatataatgagctgtatagcatatatttagaaattgatacaattaggtttctttgacatatttggattgacaacgtctttaccaactaacaacacaacaccaactagcttgactattacggagaatatgaatagggctcttaaaataaagggtcaaaggaatataaattattttagggacatattttgtacgatgttgtgtcataatttgtgtttgtatgaagacatattgtgctttcattagctttaggacatggatggcatggcatggcccataaattacaagaacgttttgatggcttcgtacaacacagacataattaaggattgtggtttattgatatcccttctttattattattattattattattattattattattattattattatttgaaacccaaaaaattcagttacaaaatagggtaaggtattgttctttaccactctatttactaggtgagtagtgggaaaatgtgcctgcaattcagtaagacacgtgccttgtttgggctacattaatgcagatattaaattgagagtaattgtactgtgcagaattttgtttaatgcagatggtagagttaagaatgtagaagaattttagtaggtgtgtttggaaataattgtgtaattattaggttagtgattatattgtatagtaactacattgcattttacaatacaatatgtatttagatatcaagttgtaattacatgtgaatttttattatcatgttttttttttaaagagatagtaaatttattaaaacaaattagctaaaacaatagcttgcaaatatgtagggatacgcccctaccataattatgacttgaatataaacaagcatgcctagtcaaaaaattggcggccttgttcgtagatcgtttaacaaaaaagagaaaaacatttcttaaatcattgagaagagaaatacaattagcaacaagtagaccaaatggggaatacatagttactttgttataaatagcattgacaagcacttgaaaattagattctaacacaactagagggaaatcagtagtttttacccagcttagaacctctttgagaccaatagctttagccatagcaggatcagctaaaaactattgcgccatagcagaagcaaaaagtactcgaccctcattatctctagccaaccacccaaaaccaaatctcttctcagcagcaaaaattgaagcgtccacattgatatttgacagaatagcatagtagaaattgaaagggaaaagccttttactacagaatagtaattcaaccttaaaaattaattgtgttaagtaaatcacatgcacgtgaaaaacagtaaagtggaagaagcaacctgggaactcgagacggatatgcagcagaaatatccggagttattcaggtaaatttcaggatgaaatttctataaggagggggtaattgtaataccctagaattgagaagtggattagcaaaatccaaattagatgattatgaataattgaggaattatattattatatagttcaatatatgagaatttatttgattaattatatggtaagaccccgttggtgag

SEQ ID NO: 378918 - DNA, 4246 bp, Cannabis indica
ttttttttttttgaaaatagaaattttataattaaaaggatttaaaattagatttcatcgtcattataaaagatagagtctggtataaaagagagctcaaccataccagttatatgattcacaaaaacccatctagcaacattgtaggtcgagaaattacaaagtctaaaaatagaagaaaaattacaacgacaaaccagaagagagttgtttaaacatatgaatataattatcaataccccaactgaagtgaactccctttagagcattgataaccttcttagaatcactctcaacaagaacaaaaaggatcttcatcataacggttgtctccagagctagcgtacacgctgcagcttctctaattagcagattcgagaagttgagcatgttaaccgctacccacaaaatagaccctctataatccctagctaatgctaccgcacacatggagctactacaaactttgacatcacggttaattttaatccaatcagctggaggaggggagcaaataggagacataaaaactaacatccaaacaaacaagcaagatgcataatctacgtaataaatagaaatagaatcaataaagtgcttaatgttatccatggaattattatgtacattgtcgttgcgagccttccaaatagtatccaccacaataatccatggaattaacgcatagaggaataacttatcgtccacccctttcgacttcaagtttcaaagaaaagcaacctaatcctatacacgagcacaagaatcagatacaagcttaaccccccaaggagaatatcgttagagatggtagacaaagttgcaatagaggaataaatgctccattgattcctcaccttccccacaaattggataagagacctcttctatcttaattctcttagcgaggatggcccggataggcagatgtcagagagaatgcaccacaagaggaccttatgacgctttaggattttggagttccaaagctttttccaccgtgcgggggccataacgtagtcgggagctctttctaaagcttggacaagataggcaaactttgtcgaaaataaaccatttggctcctttgtccacacccacctatctctgtcttggccacttggtttaccactcttaataatgtcactaacggtttccaaggtaaaggtgaatgaagtttaggccattctttaaaagtaactccgcaacctttgtcgccccgtcaagccgagaagcattggccttagggtagaaatcctgtccgtgaataatccaaggatcagtccagacataagtctcttttccatctgaaatcatcttgtaagaacctttcttaaggatctctttggctttcaccacattcttctagaactacgagtcagaagtcttattagagcaatcgaagaacgatttgtttctcagatacttagattttaacaccttacagcacaatgattgatcttcgttaaggaggtcccatccccacttaacaagcaaagcctgattcatttccagcaactttcagaatcctaggatacttacctattattaatttcttccagaaaaataacctattgttaattaattattataactaatgttaggagggaggtgcatccagatttaagattttttttgagttattttaggaatatttttttatttgagaaatacatgttttaaatttttttaaaaattaaaaaacatcacataaataattaagcatcatgtaatacattgtttaatttaggtcaacgagaatttttaccgcaaactttgacatatacaaaatcatgcctcatgcattttttaggctgttcaaaatttttctcaaactattgagattgttggatttatgaatttttgtctaattttactaacaaaagtctaacgtggatgaaagttcacgatgcacaatttggtatatgtcaaaattcaaggggcacaatttggtagatatcaaaatttggagggcacgatttaatacatggacaatcatcgtattagtaaatttaaatgaaattggacagaaatccttgaatccaacaattctaatagtttgaggggaaatttttaacaacgtgaatagtttagagcataatttgggatatgtcaaagttcaggaggtaaaaatcttaattagcctttaatttaataactattatagaatatcactagtcatttgtaaaagtctacctcgtgatggtattaacaatgctctaaattcaaaatattgttaaaattgagatcattttacagttgacatgttggaacttattttaccaagatcttaatttactaacatgtatgtttgattatacatctataatctaacatcttaaatatgaaattcctaaaacgataaattaaataggtaaaagtgtcgaaaccttacattgattatagtgggattaaatgtctccttccgttcagtattctaacccttgttcctttctgttacaaagtagtaacaagtactgaacctgaattctccttccttaacccgataaagtgatagttcttcataatcttccacaaaggtctgagtatcaacctaaactatcaccttgaatagtttgggttgatactcaattcacctttggaacacatttgaaagagaaataaatagtatattccgaaattgactaatgaaaagaagaggagagctttttgacatataattagagttttctagcattaggaagctctctcccatcaccttctatacatagccttcccttagggttagttttaagattaagtgggcttttaaaaaaaagacaatggactaaaagaacaaagtcttggccaaaattccatgtgggcctcaaggatttgatttttctcattttgtctcattaaaatgaaacaatgttattgttgacctcgcttctagccaacgacattgagtcaaaaataaagcgattaagtaagataagtaaaagaaagcaaaaataataaaataaagtgaacaccagattttaaagaggttcagccatgtgagtatggtaatagcctactccccgtgtatttgtattgacttgagagaaagaacaaagtattcttccactcaaaagctcttacaatttgatctctgagtaactttctctcttaaatcactcttttctctcttgaatgaatttctgaagcaattttctcgatccctttcatagtgaggctaagctactatttatagggatggtttcccttttacccataatgactaaaataggaaactacattaattccataattacaatacaagaaataggaaactagaatgtgttgtcgttattgcttgactcaatcccgtaattacagggattgtcttcgcatctagacacaacgagagtaatctctagaatcgtcatcttccattcttcgctcggcataaacatgtctacgccttggtcggacatctcctcaatcatcttgctcggatttctgaatgttacagagtcatttatgggctgctagggatattttcctccgtccaagtatctaaaatatgggacatgtgtcatccatttctattgccaagtcatgatgcaaaaaataggtaacatttgctccctaagtctgtacggaccttcttggttgcacgtggacttcactcagcctagagtcttgtccggatgggtgatgcgtgtccttgatgtcggatgatgaatcattgtaaccctgactagggatctcttcaatttctgtccatttaatgctaattgacggttttacctcgaatcagggttcgatgcttgcgcgtgtttgacggttacactccctacaatgagcacataacgtatacttggggggggggggaattcgagaaatttaaatttgaaatgattaattctctttttagattgcttataaaaaggattaaggatctctggcaatccttttagccattttagctcttaaacaccagagcaaaagatatttggccaaatttcttcccaaattctttgagaagattcataggaaaaccttcaacgatttcatccgagcagagcaataaaacttcaaatcagtgagtaagttcttcatttctttcttttacatatttgcaatgaaatgcatgcctgatttctagattttttgctatgaatctcgcctgctcttgaactgttctaggttaaccatggaatacctaggtttaggacttgaaaatctcatttatgttgatctgattatctgactgcgctttgagtttaaccttacaacgttcatttccactcgtccatag

SEQ ID NO: 378919 - DNA, 2493 bp, Cannabis indica
gttgaatactttcatgaagttatggttattaattatttattaaataaattaaaatatcatgttacagtagaataattaagtagtggatatatataagagagaattacgtaccaagagttgcagagttgaaggtagtccaaccatcaaccacactgtggttcccggttataattgtctggttaatgccatctccaagcaagaaaagatacttcttgttactcgcaatcgttatgtactcttcataaaccccggatgtcacgtatattaagaagtacccgcccgaagcagcagagttatttggtgcagcagcaatggcatcgttaatggtggtgaaattccaactcccgtcctggctaaccaccaccacgtcctttatcgtaacctcctcatcctccccagcctgaagaaccttcctcatcgtcctcctcctaggtggactaggcggcagctgcctggaccgcctcggatgtttaaaagcctcatccaacctagccctgttaaggcccgacatcttcataggaatccttccgccacttctcctaacggcgtgtcgcctggaccaaaaaggcgtcgtgtccatatctatgggaacccaaccctgggtgcagagggagagagataggctgtgcaacttagtgtcgtttgatatcatctccgagatgtcgttcttgagcgaagaagccgatggtgtggactcgagttcatctgagcatgtttggaggttggtcaagacagtactcaacgaggtttggagttcttcagcttccgaggtcggaagaacgttactggtcctgttgacttttcgaataatggagttcgttaacaagtcaatgtttgacgagagcagctcacggcaatcctccaagagccggatcaaggatggttctgacagatcagctgagttacggtggttgaggcgagtctccacccagttgagtaacttttgagactgtgacaaagattttagaaccgaaaatctgccgaaattgtggacatcggtgtctcgatttgggagcattgtgttgcaataagaaggaaatctggtggatttgcacatgttgtctcgggagagagccagtgagaaagttgaagaggtaattaggagagaaacgagaaaccaagagaagtacattattatcaagttattattaatattattagccataattaatgagagatattgagaaaagtttggctgtgtgttttaatttgtgtgagtttggtgaattatatatacaaggagaaagatatatataacgtgcatatatatgagttgattaaatatttattttatcaggccaattggagtagtgtgttgaatatatacatagttgttattagtggtgaattaatggcaatcttcagaaataagagtgggccaattaattgtatggaatggaaaaatataatataatataatatataatttttattcaagtactgttggttgttgcatgtcttcctagcattcattgggatatgtttaacgattttgtatatatcctttttgtcaacgcttgtcttatatacatgaacctgaatttgcacccaaaatcattttggtagggaacaaattaaagaaagaagatgatacactattacaaaaataactatttccgtccatttttaaaacgtatttctggtgattgttgttaataaaattaagtgagtgttaataccatcaaatatagtagattattcgcgataattttaaacactcgtgtaattttcctaatgatttaaaaagaattagaagaccaaaaaaagaaacggggttttaaagagcattcaaacagtttaaaatcatcgggggttccccaattaatataaacctcactattatctcaatttccgtacagagtgacgtgacattcttctaggtaaaatgtgaagaacattttaagatttagatgggtagtacgatccttggtatgtcgtccagactaatttaattatccaaaaattactttttttttttttttgacaaagtgaataaacactacaagaaaaatgagcattaatgaggacaaatttcgttggtaaaaacccctgttttcgtcagtattcttcatcaatgaggacatttcgttggtaaaaaccgttgggaatagttcgtcggtaaaatgattattaacgacgactttttaagtcgttgggaataaaaattatcaacaacgacattgtcgttgggaataatattttatttatttatttatttttaaacctgagggcatcaacaacgacattgttgtcatgtcattgatattattatcgatgacgacaatgtcgttcttgaagagctttttgaaaaaaaaataataaataattatattaaaattatttgtaattaattattaatatataatattatattaacattattaaattaaataattattttaaattttatatttttttgattatataaaaattatttaattaattaagatatgaaatcatttaactaaaagtaaatatttagagtcactaata

SEQ ID NO: 378920 - DNA, 1726 bp, Cannabis indica
gaaccatttaatttcagaaaatgtctcataagacaagcttttataacaagttcatctattcactcctttattattggtagtacctaaacaagaaaaaccagaataatagtgcatactaatcttacacgtattgactttgaccaaattcacaaaactaataccccgattatttctctagttatgtattaatacttttattttaaatcaaacaacttcacattcttttatctatttctctaactttaaagttttcatttttcattttcccttctaaattgcataggaacttattcttctacaaaatctttacaccaggtacgatttatcaatatataatttcaatccaaaaatgatgatgggcataaattttattatctaatcagcctatcctttaagttatttttatttggcctgttatgtgtttcgtttcatcttaaataaaataaatgttttgatttcattaattatttctataaaatagataggacaaaacaacacctaattagaatttttcttaattttaatagcaaatattttcataattgatttttttttttatgtaatagccatggatgctttaagatcaggacaaggaggcattcaaatgctactaacagcagagcaagaggctcaacatattatttctagcgccagaaattgtaaatacaaactttctcactctaattgtaaatatatttctatacaaataatatttgaatttttaaattgatgatagttttaaagattgttataagccatgacatatctagaaatagatctcgtatgttttaattctaaattgataaaattttaaaatgtacgagtctcgatatttaattgtactaataattcttagtgagaatggctcgattaaagcaagcaaaagatgaagctgaacaagaaatggcactttaccgctctaacatggaagctgaccaccaaaatagaaaatcacaggtgatgaatttgtgtttttaattaaaaaataaaattaattaatcccatgtatattcatttgatgtgatcataattaatccatgcatagagatggagatggagattgagatgtgctcttcttaatttctaatcactcattattaattacaatgaatttcagattaactcagattttattgccaaacaacttgaagcggaaacacagattaagatccaaaacttgaaggaatcagcttcaagagtctcaccagatgtcgttgccatgctactcaaccatgttacaaccattaagaattaataatgagatattatgtatgaataaatccacaccaaagctttgtggatttgtatttattcgtagaagaattatttgattgtactaataataattattctggtttttcttgtttaggtactatcaagaataaagaagtgattagataaacttgttataaaagcccagtcttacgagtcattttctgaaattaagtggttctattttgtttggaataattacataagtcaccattttttgtaaaatatttacatttttacgttcaaagaatatttttttacatttttacggttttccaaaaaataatacgaaaacaacataaaatcaagaagaataataaatttattatatataacatatatataatatatattaaactgatatgaacaatgtttattaatattaataatataataatataatacaataataataataataaatttattattaatagttatctcattatttttt

SEQ ID NO: 378921 - DNA, 5319 bp, Cannabis indica
ttagtttctatatttattatgtgtttgtagtagtctagagttttaaatcattggtcattattgttatactgagttcaggttgttgtgagtggtggacaaagagatcaaaaaaggttgctactttggagtttgatcgtgttaggaagtcaatgagtgttattgcccgggagcctactggacataaccgacttcttgtcaaggtgactgatgttacaagtgctgtttaacttggattaggcctcttcttcttttttggttaaaagctaatttaatcactatagattgagaagtacaaactaatgttttaggtacttaaaaagaaaagcaacagtttgttaaattggacaaaagaaagccttacaactgagaggtaacacaatttgaagcattgagagcttaagcctatcaaagtcacttcaaaaaacaagattttttacttgaacaaccaatgaaccgccttaaaaacaaacagattgatcatttacaactatatgtattcaacttagattaggcttctggtttgtcaaattatcatagtttatttatttattttctgtttgattcttttatctgcagggtgctgttgagagtttgctggagcgaacctcacatgttcaacttgctgatggatcccttataccaatagatgagccatgcaggcaatctttgcttatgaaactttcagagatgagctccaagggattacgttgcttgggcctggcgtataaggacggacttggagagctttcagattattactctgacagtcatcctgctcacaaactgttgcttgatccagctaactattccagcattgaaagtgacttagtttttgtagggattgttggtctgagagtgagtatacataatcttattatgctattgtgttttgagttaggctcctatttgaaaatgttttttaacgactactttggacaggaccctcctcgtgaggaagttcacaaagcaattgaggattgtaaagaagctgggattatggttatggtcataactggagataataagtccacagctgaggccatttgtaaggaaatctcattgttttcgaaaggtgaggatctaagggggagaagttttgttggtaaagagttcatggctctttcaccttcagaacaagttgagatattatcgaaaccaggaggaaaagtcttctctcgtgctgagccaaggcataagcaagaaatcgttaggattttgaaggagatgggtgagattgttgcaatgacaggagatggtgtcaatgatgccccggcacttaagctagctgatattggaatagccatgggaattactggaactgaggtaatctagccaatcactccttcataataagataaagactgttatttgataaaatgtcttatacattgcatattctcaggttgcaaaagaagcttcagatatggttttagcagatgataacttcagtaccattgtctcagctattgctgagggtcgttccatttatagtaacatgaaagcttttattaggtaaaacactcttagctctgcatatataccctttcttatatgaaatatctcattggtgagcaacttatatagttctgttcatattgtcaattttcaggtacatgatatcgtcaaatgttggagaggttatatccatattcttgactgcagcattgggaatacctgaatgtatgataccagtgcagcttctttgggtgaatctggttactgatggtccccctgcaacagctctgggctttaaccctgctgatgctgacattatgcgaaaaccacccaggaaaagcaatgatgctctcataaatacttgggttcttttccgttacttggttagttggataaaaacacttaaaacttttcaattcaataatgctaagcagacatgtttttatgcttcattctcttaaatggctctcttaccttccaccatggcaggttattggctcatatgtaggcattgccacagttggtgtctttatcttgtggtacactcaggcatcctttttgggtatcaatcttgctagtgatggacatacactggttgagttatctcagcttcgcaattggggtgagtgtgcttcatggtcaaacttcacagctgctccatatagtgtggctgggggtcaaatgatcacattttcagatccttgtgattatttttctgttgggaaagtaaaggcgatgacattgtcgttgtctgtcctggtggcaattgagatgttcaactccctgaatgccctttcggaagatatcagcttaatcagaatgcctccttggaggaacccttggcttttggtggccatgacagtgtcatttggactccattgcctcatactctatgttccttttctagcaaatgtctttggaattgttccactcaactcaaatgagtggtttctggtcattttgatgtctgcaccggtgatactaatcgatgaagtactcaaatttgttggaaggagtcgaaggaagcgaaagaaggaaaagatagcatgaggaaagaaaaaaatcaggcctttgacttggaatggagttttttaaaacaatttttggtgatgcattattaaaaatcaggttgttagttcctacttaatattctttgatagttttattgttcttcataaactacatttctcctatattgaaaggaaatgcacaagatctatatgttcctataagaaatacaaatgaaatattaggaatcacctgtttactgatcttttcctaactaaaagtttcattttttatttttgtaagaaagaggcaactcctaatgaactataattacgagataattatttctgtatattatgattttgtcatactctttttgtcctattgttgtcgtttcatttccaacgttcatttttctttttcactgtgtttgattttgatggtgaagaattgaagattgataacattgagcttttcaagcccgtaaatttgttttttcactattttccatgatggtggaatatacatccctcaatggcttgcatattgtatatcaacaattatgatttattttcaaagtttgaatattcactttaccgttgtatgtctccctttacattttcttttcaaaaagtcttgtatgtccatatttgatattacagctgagaactttttcactttagtttacaaattggtccatgaaacaggggaccaattaattgtgtaatgggattcttgctatattattataattgttgtttttttttctttttgaaaaaaagggggaaagaaagacacattttggtttattcaaaattgtatttcttcaagtttagttaagaaataatttacgtctctataaagcttcacttcatcatagaaatcatccaacaaagcatatatttcatcatttctaggatgtgacttatcggccacaatgaatttatgaagttgacctctctcttcaatgaaactataccctgctgccttgctaattttgcctcccttcatcaccttcctcagcctagcaacaccgccccattcgcctgcagatgcatatatgtttgaaagaatgacatagtttgctggattccatggctcaagcaggaagagggacgctgctgctctttcggcaaatttgacattaccatgaaaactgcaagctcccaaaagagcaccccatatgacattgtcaggtttcattggcatttcttgtatcagttcataagcttcttccaattcaccggctctgcctagaagatcaaccatgcatccataatgttccaatttaggagtaatgccaaagttttgctccattgattggaaaatttggcggcctttggtaaccattccgccatgagtacatgacaatataagtcccacaaatgtaacatcatcaggtctaatttctacagcctgtattcagccagataaacaagatactaaccaattagaaatcaattgcaatgagttaaaattcatgaaggaaaatacttgacttcttaccagcatttttttgaaaagaaccaaagcttctttgcattttccatggactgccaaagccatgatcattgaattccaagagcacaagtttctcctgctcccaatctcatcgaacacttgcttagctatatcaattttaccacaccttgcatacatttccaatataccattacttacatgcaaatccttgaagaagccatttcttcttgcataatcttcaatcttctctccaatattaagtgcaccaagattagcacaagctggaagaacactagctatagtgacttcattcggctttgcatctctatctttttccatatgcataaacatctccaaggccttggcatactgaccattttgcgagtacccagatatcatcgtcgtccaagaaaccacattcctttcaggcatcaagccaaacaagtccactgctctttccatgtctccggacctagcatagcctgctatcataacattccatgtaactatttctttaactctcatttcatcaaattgtaagcgagcagaagccatcattcccattttggcatacatgtcaagcaaagccgtttcagcaaacacgtctaaggaaaacaccgatttgacgaaacgggaatgaatcatctcccctaaatgatgggacgaaagggaagcgcaggccgagaacaacaaggtgaaagaatgttcatttggaaggaagcacatacggctgtaaagagacaagcactggctgtgttgaccatgagaagagtaggccttcatgagcttgttgtagagaaagactgttggcttaggaataaggtcgaacagtttatgggcatacggaatatctgggatttcaagcagcttcagtatgagattgttggtgtagtctatgccatttctaagggtgtaagcatgaatctgcttaaggtggttcataacaacaacaacagcacaagtcgtatattgtaatcataaatttagaaaagaagagagagtccaaaatttctcgaatacgaaaacgacatgaaccatcgtttcaagaactcgttccattgatgaaccattactgtgcagtctctgttgggagttgcggactactcttgtctcttggtcagttggtggtcgtgagcggtgagtgagtgagtcgtaatctagtactactatttacatgcaaatcccacacaacacaacctttactttaatagtcaaagtcaaaatatcatataattacgtgccaacctttctcacctcatttttctttacataataggtgaaatagtgaacaactttatggattttttttttcttaaccagctttacttgtaaatagtgtagctgataaagataaaacgggttcttttccttttt

SEQ ID NO: 378922 - DNA, 2328 bp, Cannabis indica
aaaaaaaaaaaaaaccaaagtactctgtaaaacatacatgaattatacatcccatgaactacattattaattttgtaacaataaaaaataggtggcagataaactagacaacagagatcgaaagctcaacttagctttggaagccaagaaagacacttgaaatgaaacgaaatgggtgcatagccagttcaaagaagagagtgatactgctttcagtgtctatgcataatatacttgttattatttagctacgtatggaccatcatcttgcatacaaaaaacttgaaataactgaactcacctatgacatggagattggcatttgtggttattacatcgaagctttctgccacatacctgaaattaaaaaaattaattggaagtcaacaattcaccatcaaaaatcaataaagcttagatacaaacacaaacctctgtgcatggtggacaatccccatcacagcaacggcgcctgcaagcatggcgcccacagtctcttagtttctgacatttcctctcacatgccatatcttgatagcaaggaacctgtagattcaataaaacttaattcactaaactagtaagcgaacaaataacactgaacaaaatcaaatgacatctcaagtacaaaacaaaacattaaacaaatacgctgtacctctttctttaagctaccacaccggcataacttaatgacaactattctacatgtttcaatacagggacctcgatggcatcgctccgggcatctatggtagccacaagtaagcaccttatcacaagtggaaccgcacaatggcactgcaacatcacaagacattccttcatgaattctcttcccacatgggcaggtcctcttcccttgaagtgggcaaggaccacattcaccagaatgacaccctttactacatacatgtctccggcaatcaagcatctcctcacactgattttcgcaccgaaaattcactcgatcacaacactccctctcctcttctttctttccacattgacaccagtaaacatcccgaactttgcatggcgggcacggcccatcatggcaaatctcagagcacgtatgatctcggcaatccagtaacttggaacacactttattacatgaaaagttcttaaaaccacatctcctaacatcttcaacggaaccacaaaagcaacgacttttcacaagttttgggcaagaggggcaaggacccgggtggcacaaaagcaagcaacgatggccacactcgtgctttaaactcctatcacagacctcgccacacgaatgaggcaaaacccaagggtcatcgctaggcgggttttccaatttcccacagaaacaaaagtaagtcttagggatttgagattgggtgtattcggacctacatttgggacagttccaaaccgaaacctcggcagccctattcgcagtgatggggaggcgcgtggaggcacgaagggcggccaagtcggaggattgacgcgcccagctctggatgcagaagaggtggaagacagcgaagcagagggaattacaggaccaagtgggatcagagggtctgatgcgttcgagacatattaggcaggaaagagcaccggaagaggaggaggtgaggaaggattgaatcttggataggtcagccggggtggtgagtgatcgaccagtgaactcaaagtaggatctgaatattgaatcggaaagatcagcgtggcggcgggtgtgttcgcatccgtgttgaccattatcggaatctgcatcggagtctgagagaggtgggtcggccatgacgctgaagagctgatcaggcattatgcgggccttaggggagccagcgtggttggagaagagaagagaaggggcttccttttacgtagggactcgagggagtgtgtagtgtttcgcccttaaacaaaggaaaaacatttactaaaatagatgaaattatgtcttaagactctcgaaaatattaccacctcatccttttctatgtaaaaaaaaatattgtattgattaaatgatacggttgtgagttggtttaaagataaattataagttagaaaagaaaatactattttcctcaaaaaaattaaataaattaagtatgaataaactaagagtaatttgcggcataaatacttaagtttagttcccagttgcaaataaatacttaagtttaatttttggcggtaataatacctaagttataattttggaacttgtataggtacctggttaaataaattgccacgtggcaattcctgattggtccaagtcattaaatttttattatttaaaaaaaaataattcaaatttaccaataagaaaatgac

SEQ ID NO: 378923 - DNA, 2894 bp, Cannabis indica
tttcttgattgataacttttcacctaaatgcatagaagattattgatctaaaaagtaaaaagtgctatggaggaatgtaagagaagcaaaatgagtagagacatgggcctacctttttgcagttgctcctgcctgatttcctgaaccaagtaaatctcgtatttgctcattgtagacttctaagacacttacagatacaccatatcgatacagcttttgacgctctctaattatgtgaaacagttcctcgagaatcctaaaatttactccccggtctttttctgtaccctccatggtaaacgttttaccagtcccagtctgtccataagcaaatatgcagacattgtatccatccagaactgaggttgcaaatggagctgtatccttgaagacatcagctgcgcaacacaaagacctagattaattttggaaaggacaacatagagtaggcaaacatattacaaaattcaaataattttaaaatgcaagtaaataatttctcccatatcataatttctgtaccttggtctgtttgggggcagaatacagaatcatacttgaaggtctttttcacaaccccatttggctttacaatgagctcaccatctttagcagattcaaaatcaacaaccactgaagcacctgctgcaatttcttcagtgttgaggggtctacagcggcaaaagacccttatgtttcctaaaaacagcaaacttgattgtcaacaactcttcttcaactgcaacaaatctaaaacttagatttaaaatcaaatataagacttacctttcagctctaacaccttgttataaagttctttcctttctttggctccttcaacaaatttggccttaaggtgttcattcaaatctatttgctgattaactgacagataaatatacgcaattaaagtttatacagaaacattttaatctgtgttgttttcactttccaattgagtttagcaacttaccagtaaaattaatagtagaactcatttctttcatatccaccaggcactttttataggcagatgcctcctccgcaagcttaatttgttccattttcataatctgttgaatggaaaattgtcaatagagtgcctattttgaaatttaattagacatcgtctttttagtttcattacctttagctttctggtcaaatctcttaatgaagagaaccattttcccttctccttaacttgtccctctatggcaaaagctgtcaaaagaccaaaatcaacgcccaattatggatagctcgattgaagaggctctcttaagtaacaaaaaaataagtgataagtccatacccaaagatccgacatgcattgatttgcgcatgagctcattctggagttcctttaaagacttccaggcttcattgcattctccactctttgcacgattctccttcctaagctcctctaacagtatcctcatttcctctaattcctttctctgagagtgataatcttttagcagcttcttatagtctccttcaacctcggaatcacaaatatcctgaaacaaaatcataatggtaaaaacttctcaaccattctaatcttcctgatcaagtgaagccataccgcaaaaatgtgtaagcgaacctttaccattggtgactggatatcttctatttcaggtacaccaccatcacctatgtacgaagcctcgccatttctacatcccacaccagtgcttgtaacaggaaaacaatcttccagcgagttttcctcgaatttgggtgggggagggagctcaaaagaagcttcgggagataattcctgttcaaaagtttgacatattgtggaaaacttcacagatggggttttatgagtgttcttaacttgagattcatcaatgccgttctctaaagacaattctaccgaagctcccaacttctgatgccaattattgtccaaaaactcaggggaatccagataattcatttgtggttcatgaggtaactcaggtgattgttcgccaataatcaaatgaggagtagtgagagaaaatccagtctcagatcgccctgacactgaaagacaaaaacccaatcaaaattaataggtttattctacaaattttcggactttttttataataaaatcagaaaccttacctggagaatcaggatccgccattgctgaaaagattgagatgacagtggttaaatgggtcaaggtcaaagcaaggtaaagcagattagagaagaagatgatgatgacccatgtgaagaaaaatcagtggagaaagggaaaatgggtgtatttgaattgggtggtgtttgaatttgttgataaaaggaaaaagagataatggtaataaaaaaggaaaagaaagcaaaaaactggcgttgattttgttaatgtgtgcattcattcagtatgcaatgactcactcaaactgaccgttgctttttctttttttgaattttgaaattttaggaccgggctgccctgcctttgcctgccccgcctctttttttgttcttggattctttttttagaggaagacaacattattattttttatttgttaataatataataacacaagtcgtaagcattggcataactaattcttttttcacttgcatgtactaggtataaaatcttaccaactacttttcgaaaaagcaactaccaccaaaatattggatccacttttcataactataaataagattcgtacatttctttatgaattataaaagttattgtaattttaagggtaaattgcggcataaatatttaatattttagattttatacacttaaatacttaatgtttatttttgaaggcaaaaatacctaatgttacaattcttttacactgttattaatatttccgttaactcataaatatagacacgtggagggttca

SEQ ID NO: 378924 - DNA, 1626 bp, Cannabis indica
agcaaaggcagcaaccagatctccatttgagtttctgacaacacactcgataccatgtttgaaggaatgatcgaaaatagttgcatctatatctatattgagcttgatacctgaaatcggtttaacccattgctccaatccatctccatctttgagaggagacaacaagggaaggttaccctttccttgagctttcaaccattgatcaagactcgaattgacaaatgtaaccacatccctcacacttcgaacccgctgcttccaaaggagatcatttcttgctgaccaaagggctcaacacagcatcaccactctgcttgtggactcaccatctaccagtctgaatgtatcggccagccaagaccaaagggaagaacaatctcttctagcagcagtcaaaccatcatactcccaacatgaccatgcgaagttgcaggacaccaaaatatgccattccgtctcagcaaacactccacacaaaggataagcattgtcaaccaaaaccttcttgatacacaaatttcctttagtagcaagatagtttgaagccgccctccaaacaagaactttagctttgggaggcactttgagtgccaacagtttcttccaaatctcattgactcctgaattgtctgaggaatgcttcaaacctttaagcaaatgtgtcaaacaaaaacttaatagacacacatgagtacatgaccaaatcaaaatatatatcaatcaaagaattctattttgataaaatatatcaatcaatgaattaatttgctaattaattagcttaatttacgacaaaagtatcaattagtaggatgattgggtttgagtgttcatgtaacgatcttatcggacttgcttggagagcttcaataatttatggtcgtgcaaagccatagctgtgtttggttgatcataaacccaagcgagagattagatttgggggtactgagaatacgaaagatgaagaagatgaatatagttgtgagattagattggatttcggggtactgcaaattaatacgctccgagaccaaatccatattcggcaagcaccgtgactctatgattttcaaatctaggtcaccatggctctatgattgaactgagattttatataaaataaatggttgtttgaagatcgaagaagcacatgatgttgttaagactaaggcaaacgaaaatgggaagcgagaaggcgttggctgtcatcgaaggaaccgaaaacagtggcgtatctgaataaggcagcagaggttgaggtcacctgtcgattatgtttctaaagggaagaagaggagaaagaggagagatgccccattgagagacaatatgtgaacaagagtattttttattgggaaatttgattaaatatgcttacataacctttaaattttggggctttttcatttttacacttcaacatatatatatatatattttttttgcatttttacagaattctacatagaaacccctattgtaactagtaggggtgttgaacaaatttacaaaccgccaacccgataaaccgacaaaaatataacccgaaataatataatgaaaatccaaaccgccttatgaatattggtggtttacaaattattctaaaccgcccaattaacc

SEQ ID NO: 378925 - DNA, 2567 bp, Cannabis indica
tggtaaaatatttccaatagattgtctatcataaacaaggctcctttgtcagtttacaaaatttgaggtcaacattttagtactttcattgagagcattatttgtcatcctgtccaatcattatgattgtaacaaggataactctagctactacttcctcaactcttcctcaagaccctatggcggctgatccttataatgtgcgtgtctcagccaccactagagtttccacgaatttcactgatgcagcgaatcctgtcaatcatgccaatcttatcaacctagtattcttaacaaactagaccgacacatttgatccaattgccctggctaacctggctaatcctaatgaacatcccttaccgccaagagtagatctaccattgccacctcaaacagaaggttttgttaatgttgaacagctcccacgcaccaaaactgagtttgttccccaagattatgtcggggaaataggtccaagaataggcgatccgactatttgtgagtctcatgtggagttgggagagaatatcgagctggaaaggctcaaagtagtcgtagtccaagtcagccaaactgaagaatcacacattgttggttgcaatgcattcgcccagtagagacgcgaattcctgaggtagatgggcgaccaggaggccatcccttgggcccatcaagcagagctggaccaccgtaactgggaaactagtaacctaataaggcagtttaatgagagaagtgctgggagaggacaagatttgtttagagatcctctacaaggaaggctcatcgacatattgggcagagtctacagccaagtagacaacaggcaaacaatcaaccaaagttccttaagaacaaggacaaacttccccctgcctaaagacggacaaattctgtcaagaaatcttacggcaggaatagcaagttcgtggcactaggtggtgttgggggatggccacgattccttcctcagtaataacactattcagccagcctctggccagccaatagagtgatgctcctctctgaagcattcaggagcaagtcattctaaggcctatctttgacagactaggccaatgaacaagtggaaacgcaatagacaacatcaactcaaggagtgagaatcaaagtgactttgttccaccatagaacaataactttagacaggtggatccaccaaacccgagcaattggtgtgatcaaccccctgtcaacacacatgccgcattggccaatgaggggagaacaatcggccagacactacttagcatagagttggttgaccatagcgaattgactaaattagggctggccagccatggcaagttacctgatccagggctagtcggccaaagctagttacctagtcatgggctggctaaccatagacaaaccctcacctagggtatgaccagccaaggtttggctgtccaagggcttcaacccagccaagaaaggccactcgttgaagcacctactgcattagattcttctgtgcaagcacaagtggatcaaataagagatatgataaagggcctagtcgactcaaaatcattaaaccttgaactagataggtcaaaggaatctcctttgtcaacatatattaatgccttactcctgcctaagtcaagatatttgtatggaagatgtatactggaaaagaagatcctcttacacacatcaagtacattgagatgcaaacaaatctccaaaaggttactggtgatgtgcggtgtcagatctttctggtgacactattagaattagccgagcagtggtattttaagctggctctaggaagattcaattcttgaaataaattttcatgagaattctacacacaattctcgtcctcgagacaaataccaatacaactagaagaccttgtcaaagtgaaataacaaccggggtgacattttgatggattattttcaaaggtttatggttgagaccaccaaggacaaaggcctaatagaagaaggttgttatacagccatgctggggggcacctttcgttgagtgactacaggaaagatataagaaggatctcaaccaacaatatgaaagagttccttgaatgagcaaagggcttcataaaattagaggaagccatccgacaagctcagacaggagtgaaagttagtggtaggcagtcttagggtgttatacaggcctaagatatgaccaacatgtaggccagtacaagcaatgcgagtaacccctcaagcatgaaaaataatggaggcaagcgcaacaacaacaatttttgcaagaacagtggcaaaaaagggaagtacaatacttcccctacaccccgaaaccacaagaggaggagaactgcacatgcttcatcctcctaaccaaaaaacctgagacatttacatggccactcaggctattgtcccatacaagaagcctcctcctatcaacaagagggacatgtgttggttattattttactagtatctagatttactaccatgtatgttgtttaacatcctaaatatgagtttctaaaacaatggaatttaaaacatataaagttcaagaaactttacatt

SEQ ID NO: 378926 - DNA, 2440 bp, Cannabis indica
cgaggataagagccataggggactatgtaagtggtattttaaggacttgtgacattgatcagagacgaaagtgtcaggttagatctatcgctcttggtgaatttagctgctattcaccaaaatgacttactcacgaggcacgcgagggaaccagtggtgaaactagtggcgaagcaagtaccagtggctcggctgggataagcgcttggagcctcgagcacattagggctggagcaattctccccttgcgagattactttaaagagttcatcaaccatctcagaatagatccattccagttggttcccatttcctacaaaaacctttcaagtataagggttgtgcataagattttaggatgggagtgccccactcccctagaaatagtctatctttactcggtcaaggaaatccctgcgaggaaacgttgtgcaggaggcttttactatcttggcactcatacaagcaattgtaggatcattgttgggttaccaaacaagaccccttttaaggaagacttcttctagacaagtgcctttccccaatcaacacaactattttttgcataatacgtaagtagctatttgttccaaaatggttttaaattactccatgttttaattttggcctcgctgacttataatattttatccttttgacagtgatctcgaaaagaccaactccaactcctgaaatggctgagcgacgcaggcttctgttgtgtcttccttttggtctttgatcaacagaatttctcttgaatgaagccaatttgagatctgttggcctccttgctgaaagtgagtatacttgtgattgtaagtatcccaagtatacgttgtggcagtaggttctagtctcaagtgacgaggaaacccaagattacgtggctcaggcgcattatctccaaaatgcagtccctcaggaagctgaagaagaagcatcccgaggtaatcaatgtggatggtctcccactattcttagggcgagtcgaacttcgttagtgaccttcaacgatagccgatataatttttatatttggaaccccttcctcgtagattgcatcacccataggttcaatagttagtacgcaccttttcatgtgcaacttagttccactagttcttatcatgggattgccgagcaatatgggaccatgttggatagagcgagccatccagattggaacttagacccactaaacccctacgacatatttatgatcacaggatctagggagtttagtgaatattatagtcctccatctttgccatcttatgattatggtaaattctcttaagtggggattcatttcccattttcccctttatctatttttaaataagtgttgatacatttctttgtcttgcagatatggatttagaggaccttctccacacttcaagcaaaaaggggaagaagagaataactacctcagaaacttcctcggacatcaacgtggagcctcttaaaaggcccgggatgacaactgccaataagaagcatgccttgcagaccatagatctcgagacttctgagaatcaggtccagactcatcctcctgccctcacacataccgaggagcctattctaaaaactagtcaggccacagcttcttcaagtcaagcacttgaggccttgcccatcaaggttgggatggttcggaacactctttgtactatgttgcggcttgctggcgtcatgtccggtcttttgtgcccagcgattgggacttggtcaataatggcactccgaccgagatgcttgaaaggagtatcacttttgctctctcagttagtttccttctccttctcattttgccttttatttcaagaaccctaaaaaatacttatgcattttcattattatttattttcagcaaaccttcctttccttcgtcgcccaacgtcggggtctcgacagggtgaaacaattagagagtgcgctttagagaaccattgggcaatgcgaggtcgttgccaaatagtggaatgaggctcagtcggtgatgactcttctaaacaaagaggccgaggaggtgaagcgggcccacaaggttatacttgaggcagcctagaaggaggccaaggacaagttcgagatgtgcttgaaactccaagaagaacttaatgcagccaccatgaagctttagggtgccgaggcatataccaaggagcgatgcaatgcggtttccaagcgttctatctaccgagcttggatggtgaatccagaaatgaatttaagtttcttgggagagggcatggaggaagtcctttcctactgcaagcaggctaagacagcggaagaagaggtcgaggctgaggaggaagaacaagactcgtccaagtctcctacgatgtagtcttggtttttaactatttatatttattatttttttttatttaaggaaatggacatttggccgagacaatggtttgcc

SEQ ID NO: 378927 - DNA, 1983 bp, Cannabis indica
aagtaaaaagtaattaatatcaattatttccaaaataaggagtattgtaattttctggttggctacttcaagcatttatatataagatcaacttcaactagacttcataatactaaatatagtgtaattttatactataaatatttcaactgaacactataaattacactataaatgggtttgtctagagggttctactaaatatagtgttgaaattaataataggcttttagtatttttaacactaaatttaaattttcctattgaagatgccctaagagaatttaacaatatgaaaaatttaaaaataaccataaaaacactaataaattaataatcttcagagttaccaacactaagaatatcaataccccatataacactttgctacaaacagctccattacaattactttcttattcttttttcatgaaagatcacagctagctaataatttcgaatacgatccaagattgacttatcacaaaggttgttactttgttgaagttgcacataatccttatacttcattccagcaaatgctgatgaatgagaatcatggctttcaaccagctttggtactggattcacaactgtctcaagggctggtccattggctatggctagtgagattcttgtgtcatttttgttcactacggctcgatgcacaacacttttgtacttcccattgctcaatatctaaattacaaaacaaccccaacaatatattgaaatcaaaacatatataattatagaaaattttataatgcaccccctttaaaatgaatgcattgatacatctctatccgttttagtatctgaaattatttttttagtcaaattttttcttataatcatgtaaattatagttatttaagaaattctgcaaaattttaagaaattcagaaaatttaacacgctgaaaactgtgttcaaacagtacgttacacgcgtgactattttgttttatacgcgtgtaaaatagactgttttaagattgttttctatattgtaaattattccgaatttctcaaaattttgtaagatatcttaaatacatataacgtacatacttatgaaaaaaataaattaaaaaattattctgaatgccgaaacaagtagaggatgcattaatacatctcctttaaatgagtgattcctataattataggagcaattatatgtaatagatatataaacatagaataagaatggtgtagccatcagtaatctcaacctgttgaaatgagatttaatttcatagtttttttttttatcaaataatacctcaaggtggtctcctgtgttgaccaagaaggaattgggaatgggattgacattgagccaattgcccttgtgttgaatttgaagtccaccaattccattttgagtgagaagggttaagaggccatgatctgaatgaggtggcaaccccattgcaagctctggctgaggacatggaggatacagatttgctataaatatttgtaagcctgaattcacttcaagtgttttgtatatgtaattgccttccaattctaaactctttgatatgccttcaagtattatcttcactacttccctggttttcttcaagtactctaatgcaatctcacttcacacaaacaattaaaaaaaaaaaaatcaaatttgagattttaatagaaaagtcaacacatgcatatttttttttaaaacaagtaatatttagttttactattaaaatattaaattttaaaataaaataaataaatgtaatgtatttggacccttcacgtgtctatatttatgagttaacggaaatgataataacggatgtaagagaattgtaatattggatatttttgcctccaaaaataaagataaaatatttaaatgtataaaatctaaaacattaggtgacgtttggttagaggtaatgaaatagaatggaaaggaaaggaaaggaaacaatttttattgtattcttttgtttggttgcat

SEQ ID NO: 378928 - DNA, 4327 bp, Cannabis indica
taataagaaaactacataaaaagtaatatagaaaataataacgcaataacaacaaaaaatacatgcagataataaaaaatcaacaacacataaacaagagtatagtataaaaagaccgtattttcacaaataaaattaaaaaatcgtaaaatgtttaaattttgtgaaaccgttatttttgtaattttttgttgtttttgtgtatttgtgaaataatcccaaaaattaatcatgttctcaaaggcccacgaaggcccatttcggtgttgggccaattttagtgtcgactcaagtatgattttccgtctccatcggaagcgtgaaagcacaaccgaaaatggaggcaactgacaacactcctccccaagaagaaccctctgatagtaaccctaacgacatcgtctccgattactccttgccggagagtgatgccactctctctccaacccctcctgacgagagccaatccacggaaaacccctcctctgctccccaagtcattattgacacccccgtttcggactctctcgaagattcctccgaaccagttcctgaagacaccattgatgaacagccgcaaaatcttgtcgacccacctgatgaacctggtccggcagggccaagtcttccgaccaggaaacgacgccgtagaaagaagttctttactgaaatcaatggtactccatcggtggccaagaatcgtcgggctggactcgccaaggaggtcgatatagaatcaagaattgcagtttctgttgggtttccgattgattcgcttactgaggaggagatcgaggctaacgtggttcccaccgtcggcggagccgagcaagctaactatatcgtcgtgcgaaaccacattcttgcgcggtggaggtcaaatgtgtctgtctggttgacgcgggagcacgcactggagtccattcgatcagagcacaagggtttggtggactcggcttacaactttcttgtggagcatggctacatcaactttggggttggaccggcgattaaagaaccgaaactgaggtcctttgatggggttgagaggggtaatgtcgtcattgttggggcgggattggcgggtttgatagctgcgaggcaattggtgttcttggggttcaaagtcgtggtcttggaaggtagggcaaggcctggaggtcgtgtgaagcgaagaagatgaagggtgatggagctgtggcagctgctgatcttggtggaagtgtcctcaccggaataaatggtaaccctcttggggttctggctaggcaactggggttgccccttcacaaggtaagagatatatgcccacttttatttaccagacggggaagcagtagactctgagattgattccaaagtagaggcgtcatttaacaagttgttagatagagtctgtaagcttaggcaggctgtgatagaggaagttaaatctgtagatgttgcattagggacagtattggaagctttccgccaagtttatggtgttgccgaagacccagaagaaagaatgcttttagattggcaccttgctaacttggagtatgcaaatgcttctttgatgtcgaatttgtcaatggcctattgggatcaagatgatccgtacgagatggggggagatcattgtttcattcccggagggaatgaaacctttataagggcattggcggaggacctccctattttctacaataggactgtcgagagtattatatacggaatagatggggtgttggtttatgctggtgggcaggagttttgcgctgacatggttctctgcacagtgcctttaggtgttttaaagaagggttcaattgaatttttccctgaacttccacaacgaaagagagatgccattcagagattaggatttggtttactcaataaggttgcaatattgtttccttacaacttttggggtggcgatattgatacttttggacacttgtctgaagatccaagcatgagaggtgaattttttctgttctatagctattcttcagtgtccggaggtgcgcttttggttgctcttgtggcgggagatgcagctgttaagttcgagttgatgtcccctgtggagtctgtgcgaagggtgttaaatacattaaggggcatttttaatccgaaaggtatagctgttcctgaccctattcaggcagtctgcactcgctggggcaaagataatttcacctatggttcatactcctatgttgctgtgggttcttctggggatgattatgatatacttgcagagagtgttggtgatgggagagtattctttgcgggagaggcaactaacaagcaatatcctgcaacaatgcacggagcttttctaagcgggatgagagaggctgcaaatattttcagagtagccaaaaggaggtcattaagttcacctgacaagttaaatagtgttaccgaagaagaggatgagttgaacaaattgtttgacgcccctgatttgagttttgacagcttctctgtattatttgatcctggttcagatgatgttgattctaattccttgctcagggtgaaaattggaatagaaaagtttgaaattgtttgcttctatctctatgctttaatatcgaaaaggcatgccatggaacttggtggagttgatggggatgtgaacaggatgagaatgttgagtgaacaatttggagtgagttgggttggaagaaaaggcttatctgatgctgctagatctcttataacctgcataaaattagctagatcgaacaataatggaggaaatcaagtccaatccaacgttacggctagttaaagcgtcactatgcagcatctccattagtatgctgctaactttgtctggctggaaagatcggacaagtacctaaaacatgtgcatatggaggattttagggtggctattcgatgagggcatgatcctattctcagagctgcatttagtgcactctctattgtgaattcattaagaattttttgtacattcatcatttcaattgccttcagaatttgttagtcattccattccaattagttttggtgctctggtcacaattcaggatgttccctctaatttgacttcataattgttttttcttctctttttgacatgggactttataattgtttggaattcagatcttatataagagaaaaaatgggggaaaatgtttttgaatatgtgacttttttccctacaagttataaaatgatattcgattgagttttttttttttaaaaaaataataaatgaagagagaatgaaaatgaaaatgaaactttgtagatttttctatattttttcttcaactttttctattttgcttgtgtagtgtgaaaatcgtcgtgtactctctattagtgtcaaattacaaacttgttgccggtaggattgacgatttgtattattgctttgtgctcgtattaacatatttatgatgacacgacacaatacgtagacgacacatttgtaagacatgttgacagctcaaattcaaacacgacacgataaattaccatgtcacacgacacgatgatcaagataacacaattttcttaaaaaaaaatatgaaatctataaaaattatttgtgttattgtgtcagtacaattataacacgacatgacaagattattaaaatattgacatgattaaggtaaacactataattagtcaactattaaatgttccaaattattattttttatcagttttgaatcgtgtcatcgtgatccatattcctagtttcctactcaagaagaaataagtcactagtaaaataagaataaagtgcagcaaaatccctaaacgtttcatttcgctaacaatgtatccccaaatctcattttttagcaacaaaacccctaaacctgcattttgttagcaatttaccaattttgtccgtttttactgttaattgccatgttgaacgtagacataaaatattgtacacatggatatagtgtacaaattaggggtgttcgcggtgcaggtagtgcggtttttgactattttttcaaatcaacccgcatatgcggtttttttaatttcccaaaccgcacccgcaccgcgaaactaaaaaattgcatcgcaaaaaatggtgcagtatcgtgcaatttctgcagtttttccagtttagactatcaccaaataattaaacaatcacaaatacaacaaagcttaagtaacacatgtcaaaaataccataaggcttgaaaataaatatgaaaaaaaatttcaagtttaaacaataaaataattagttgggccttcacatattggacctaaataaatataaaaattagtatttttataatatgcggtgcggtgcggt

SEQ ID NO: 378929 - DNA, 1636 bp, Cannabis indica
tgtgccttttacggttattgtgcaatttattatgacttgtccttaattatttaagatagttttgtggtatggttattgggcaagaaaattggtcattttgtgttcatgacttatattgcaatgacttttcagttttgataaataattatatcaaatctttttaagttttatatttggattgttttatattatattatgaattgttttgtctccgttcttttacattaattaatttttattacattttgttgtaatatagttttattaatgtattgttatttaatttttgcttggtttcgtggagagtttacgattattattaagactttgccgataagtttaattttactataatcaaaattacacgtgttttgttgagtattcttagttagttgcttttagtcgaagggttttagtttggatttcgttctctttttgtagttgagttttagtttttcaattaggtgtttaaatttgattttgttacccttgttttaaattgggattttaacatctgattgtggccaaattgttagaattcagtctagatagttgaaaaataatacctacaatttggtaatttttgttaaattttattgtagttatgattaactagagtttgctacatgttttcacataagtcttggtgtattatgtttaattgagagtaatgaaaataattgattaagaatgaaaacataaactaaaacatagataataaattaattaagaaatataagtaaaataaattaagtaataatacatgccacacgatactatttttgtaaatagcgggtctcatctaatattttggtgtatatgttttgaagcacattttctccctttttaaaatagtgaaaaaccatttcaatacttcatataatgcccctattctatataatatgcaacaatattcactacctaagtataaattttaggggaggttaatttatatcatatttttgtgctgtagtactggtacatcatttttcctgaaaagtaaaaacatggggtggatattcttgttttgtataatagtattaacaatcctctcaattaatttttgaaaacttattataacaaaattaaaaataactgtttttacactaatgtaacaaactatttaaattctgtttttgtcgtacaataaattactcaaaatccattgttactataataaacaccattgtaaaaaaatagaagaaggtaataatttgtgaatgtataaatataaataaacataagaaaagaagtaataaaagtgtagtagaggcaaattgaagagagagaggttgcattgggtggtattataagtataagtataagataacataagaacgaaagaggcaaagggtggccctctttcccgtactcttggattggacttttctggaaagtctttccttttcttactattattctcatttccttttctgataccaaacccaaacccaaacccaaacccaaacccaaacccaaaccaaacccacctcttctctcttctcttctctctctctttttttaactacctcctcttcactttttactatttacacaaatctcccacttcaatttactttttttttacactttaattcaagtatatttatatttatatatatgcacaaacaaacac

SEQ ID NO: 378930 - DNA, 2226 bp, Cannabis indica
ggaagtatcgttatagtcaatcgcaacgcgacatgtcgaaaaagtgctaggtaccactggtggctaatcaatgctcatgtgtataatatgtttcattctctcttctcttaattaactcaactgaaccctcttctcttcttttctcttgatattcataaagtaaagagtcttttgcgtgtggaccttaataaatacaaaacaataaaaacaactaaatcccttttccgtttattttattttctaacttattctccacttattattacagaaacttctttcttattatatattattattattatcattattttcgtttttttttataaatatgtgttcatattgtttggagaatatataagacttcacttacgttcaatcccacctcatcaaatctcatcattagatttatgacaataaggattaattaatatgtcacactttatatatttatattttatagtatttttgttatttttagttttaaaattttataaattaaaaagaaaccacctattaaaataataatatttaaaattttaaaaattaaattaaaataaatataaagtttaaaaatattaaaattaaacaaactctcaatattaaaaataacaatgaaaaaattataatattacaaatgatatattatcatttatatatatttaaattaatttaaaataagtataagttcaataacctaaaacaaataatattaatatttatatatatttaaattaatttaaaataaataatattaatattatatatattataaaactaatcctcctaacaacgttaaatttaatagaaactatattttatttttaaaatattttgttaaactaacaaaaatcattaaataatcacatttcatatatatcgataataatatatatcaaccctcactactttttcttttggacaaattatatttccattttattttatatggcatgtagttataatatatatagtatgtttttaaaaatattctttagtgtctaaaataaaatttaaatagtcaataacaaattgtttgaaaattataaaataaacaaaattcctgctacaattaaaatttacacatataagaaattgatttataatttatctatctataaaataaagagatggcctaacctatgaatgatatccctagttatctagcgaacaactaattatagtaaggtatcacttctcactataccgataagatatttatgattttcatattaaaagatattataatcgtagatggtaaaatctacaattacaaaatttaagcaccaacaacctgtcaagaataaagaaagcgacaagagttcaattgggagcacccatggagtgttagctaaagggactttgatttaagtcaatataaatgtaataaaaattaacaataagagaaaatattaaatgaaacgtaaatggtagtcgaacgaatgagtatataagcaaacaggaggacggaaggaacaagtacggcggtgaagcttaagggaaaggtttaaaaatgacgattgtctgcttgcacaagtgatcattgtgagtatggaatgtttgatgccttgcgtctattgtatagttccttttattgtgttcttttaatatcgttgccccattcacgtcacccattggactcgttcaagttggttgcttctctaatattacatgtaactatttttctgactggttccaatatctacttggtttcacccgtttgactaattggccgaactcgaactcggttgcgaggtgaaccgacttatggcccaaaggctttgtttttttcaaagcctagtgagcccgtatgactgccttattggggctaataatgttgggtttattattgatttgtctgacttacatatcgagcttctcaaatatatcataaatattaagtaaatttttacctctacaagaatctaatttttatatgacgatttacattacaattatagtcgttaattgcttttcttaaaaaaaaagtaacaatactgacaataaaatttaaatagttgattcacgcatgtaaaatatatatatatatatttatatgtgtgcaaccgaatgtttgaattcctttttaagcacaatatattaatctaaatttttcaaagtgtcgccaatctcctattacaatcttttaatcaacatccatacctaaaaatacataccaaatttgttgttccaatttttttttcatggtggtgttcgttatagttacaa

SEQ ID NO: 378931 - DNA, 913 bp, Cannabis indica
aaaaaaacctctctcaatttgtaacatggtattaagagctcggacccgccacactccagggccgtccttagggtggggtggcctaagccgttgccaacccaagtccataaaaggtcgtccacccgaactctgtttcgccacattggattctttggcctaaaatatgaaagaaacattttatactctaaataacatttccctcattaaaaactcattatacatttgctgcaatacttcacctactcatctttccaaaaacttgtttagcacccttttcccttcattacaattacaaccatttttttcttcttctataaatcaattactaaacatggttgatttttgatgaataagtttgctttacatgattacatatcactatattattcttcaagttgagatttttttttttttttgcagtgcatgattgtcaattagtagatgatattccattacagaagctattaatccatgatgtgccagtagatatcatatgcactccaactcaagtcattttcacaaatactctcattccaaagcctcaaggttagcaaaatttcattctttttttctgggttttgatataagataattatattctactaaaccaagattcattgattgatttgaataggaatttattgggagaaattgtctcctgaaaagttgggacaaatcagaatactgagggagctgaagaagaggattgaaagagaaacaggaaagaaactcccatctggcccatctgagaaacttcctcccactgctcaaagaaaaccttaatattatttattcaattgaattcattcatgtctctgttaaacattttatgtaaaaaaaattaatgaaataataaaaaaaacatttttttaaagggtggaaaagaataaaacgataaacgctagaggaaggg

SEQ ID NO: 378932 - DNA, 2459 bp, Cannabis indica
atatataaaaaaaatctataaatatgtttattatatatttgtggaaactatttaattaatatatatgttttttgataacagggggtgcaaaagcacccaaacaagataccaaaagcaaaacacaaacaacaaccaacaaaaactaaaggaagagtcaaagctaaaaaaaaaacaggaaataaacaacctaaaacagattagtgtgtaaaggagtaacagggtgaggatcccactccactaagtcatcaatcatagaagcatccaacgcatcgggacaaattcttccttctaccttattccgagccacccatttagcaacgttatgagccatgaagttacacttccttgagatatggatgataccccaatcaatgaacttagaacacgagtgcataaatcttcctttcgcagactgaagtctgaaattcgcaactggagaagtcaagacttcaaactctttcactacacttaggttatcgctttggaaaagaatattagtcatccccaaggaaacgaccaaatctgtcgctaagcaaacagcaagagcctctgccagcatgggattggtcgcagggggtcgtagctgttttaattgctacaacattgccccactcattgtgaaaaactgcagccagcacactctcagaagtggagatcgctacatcagagttgcaacaaatcgacgatgaaggtggcggggtccaactcagaacttcaggaagattcttcgaagagaccaccaaatggtccttgatctttaggctaatcagatcagtgatacgcaatatatccgcctccttttccccaatgaaccttctatttctctctttccatatttcttcaacaatgcataaagtatgtatcataaactcatcaaatagtacatttggaggccggttcacagccaatttgaaccaatccatccatcgcgcccaataggaaacataccatctctgtctgaatgtcccatcctaagctgaaccaaatctctttagcaaaggggcagaaccagaacagatggagagaagattcatcacactccttgcacataatgcaatagttagagacaccctcaaaaatactaacaatattgtatattttctgtcggagtcctctaaaataatggtattatacatattcactactgtgactaaaattaaattagtgacaactggtgtctaaatgctatgttttagtcacaaataattttttgttgtgactaaaagtcacatttagtcacaaaaaatttatgttgtgactaaaaagttgtcactaaaagtagcaattgtttatagtgattgtgattagttcatagatgttttgacaaactttaatttatgagtttgcccaactttattaagtataattctattagcaattgaatcaatgttccaaaacacataatattacaaaatatgcaaattcaattatatatatttaggagctagctagggagatgtggtccactaccacaccacagaccaccaaaatctctgcaacgactactattaaagagtaagacaagcatccattgtcgaaaagtacgcgcacacacatacatgataatccatatatgtattagtaacagttgaatcttatatagaatgacaaaattttacttaatatattgaccaaccaccagtaccatccatgtcttttttatgtggtttcaatttttatgagcagtacgtacgtggcttagttacagcttattaattagttcttctcttaagctatatatatatgaatgagatttttgtcatgttttgtgtaatgattatttagaactatgcacacagcttattatagccttacgtaattgtaaggcacaaattggtagaaaacgaaaaccctaccttctagacagtttacacacgtttcccttgagaggtacgtactttgataattaattctatttttgtttttaagaaagagattggagtacacgtatatatatgtatattatttttattataatattttatcactcataaatatagaataataaaatttaaatttataaacaaacatattatatattattataaaagtataaacataaatctaaagaatacatttgtaaatttaaaataatagctcaaatagtaaaagcgtactttaattcataaataatcactaggtaacgatcttttaagaaaacaagacttagagttctctaattttctctctaaaaaaataaggacaaagtgacccttatttctttgggaccactatacatatatacctaataagttattaatttttattatttttaatttagcctctcaataaattagaaatatcacttaaggtatctacacacatttagttcatgacactttaatactcaatcattcacaattaccaaatgattcattactttatttagatccaagtttatagggtaaataacattttggatcttgtattttgtaaaagttaccaattggaccctctat

SEQ ID NO: 378933 - DNA, 5026 bp, Cannabis indica
ttgaggttatccccgcagtgggcactgggggaggctttgctttattatggattgacggtgtgaatttagaagttattaatgctagtaatggggtcttcgaagtccaaatggtagagtcgttaacaggttttaactggctgttatttgcggtctatgggagaccttatgaaagtgagaagaatgtgttctgggatgcactagaacaaaggattgtgaggcgtaagtgcccatggatgatgataggggatcttaatctaattgcacatcattgggaaaaatgtggtggtcgtagggtcactgctcatgatacgggtatccttttgaatttcctccacaatacagggggtattgatctaggctatcatgggtgtaagtttacctggcagaataacagattcacgggaggtcttacgcgtgagagactcgatagggcaatggcttctggggattggatcacagagttccctggggcaaaggtaacaaatgcgcctatctcggtctcggatcacggttttgtgcttttggatacagttgggggaaaaggtaggggttttaaaccgttcaggttctttgaagcttgggatagagatcagacttgtgaggaagttattaataaggcgtggaggttaagaggtggtagagatccaagtatatgtagtaggctgaatgataccaggatagctctgcagaaatggaagaaggagagttttggggattgcgatgctttgattagagaagcggaagaacggttaggctggctgcaaagacaaccaatgatggcttcccttcttcaagaggaggctggccttcgggatagaatctctgagctatggataaggaaagaatctatgtggagacaacgctctagagaattatggctgaaaatgggtgatcggaattcaaagtttttccatgcttctacggttataaggaggaggagaaatgaaattgcagcagtgaagaacaagtgtggcaagtgggaaaataatgggtacaaaatcgggaaagtgttcacggagttcttcaaggacctatacacggcccaaaactgtcatgttgatgaagagttttatgagctgatggctcctacggtcacattggatgaaaacaatatgctccaaagcattcctacgacagaagagattgagaaagcagtcgcggatatgcatcctctaaaggccccgggccctgacggtatgccgggctttttcttcagaagatactggaagatagtgggtggagaagtgattaatatggtccaacaattctacagatccggccgaatggacgataaattaaactacactttcatttgcttgatccccaaggaggagaatgcctgtacagtggagaaattcagaccaattagcctttgcaagtttggttataaaatcatctctaaaatcatggccacccgcctaagagtagtgatggataagttgatatccccttttcaatcggcctttgttcccggaaggtggattgcggagtcgtcaattttaactcaggaattagttcatactattaagaaaaagaaaggaaagggtgggttaatggctctcaagttggacatgctaaaagcctatgatagaatggagtggaatttcttgtttgaagttctccggggccacggctttgatctgaaggtttgtaacctgatcatggaatgtgtccgatcggtttcttactcagttttgatcaatggagtaccccaaaagaaattctttccttctcggggtctacgccagggcgatcctttgtctccttttctattcctgttatgtcatgatgtgctgtccaagctaatcctaaggcagcaagtaaatggtcaccttcacggagttgctatttctaggtctgcccaggcagttacacacttaatgtttgctgatgacacgatcttatttacccgagcaaatgtcaaaatggccactacgattttggagtgtatccagaagtatgaacactggtctgggcagagatgtagcttgcctaaatctagcgttctcttctccaagaatgtaggaaaccccctaaaggagaatatcttacatgtgcttgaggttagagaatgtgaaggtcatgaaaaacacttgggaaatccgtttgtgtttaaaaggaggaagtgggaagagtacttgttcttgaaggaaaaggtgctgaaaaggatcgagggttggaagacaaagttgttatcctttgcgggtcgcactactctggtaaaatcggtagctctatccattcctttgtatgccatgtcaacaaataggcttccgattgctagctgccaggagatagataaaattgtgagaaagttttggtggacgaggagtacggaaaaggagcgatttctagctctggtagggtgggaaaaactgtgccggcctacttcaaaaggtggtctggggtttagaaggatcgaagacatgaataaggctctcctatctaaattggcgtggcaaatggcttcaagaatagacaaaccttgggttaattgtctatcggaaaagtattgcaaaagacaatcattctagggtactaaagctaagggaaatgactcatctttctggaaaggagttttgctgtctagagaagttatttgtagagaagcaatgactctggtggggagtggaatttcagtggacatttggcaccaaccctggattccgtggctagagtttgaagagttccgtagtctgattaatagggtgagatcaagcttccccaatgtcaagacgatagctgatgtttcgctagataatgggagttggaatatagagcttctaaaggaaatgtttggcgagggcttgggagaaagattaggccgaatcccccgtttgccaactgagcaacatgatcaaattgtttggaaaaaggcaacggatggccaattctcggtcaagagagcgttcgaagcctcgcaagattgtgatctggtggaagcaacagtgtctggaagaagtgtggagttcgaagatccatcatagacattcggttatgttatggagagctagttcgggtagtcttccaacaaggatagactgagttttgtatggataagcttgcttgctctgtggaggggaggaagaaacggctgtgcatattttctgggagtgtccgtttgcaagggccctatggttcagcagccagttcgccatcttcggaggagcgggtggtggtgattcgattaagggcagactacaatggttaattgagagaattcctgctgaccttttgacccgtctcctctctttcctgggctgtttgtttgaaggcatatggaaatctagaaatgcaaacttcttcaaaggaggagtacccaatttaatgcaggtgcgcgaagctataatgagaagattcatggaatcagtggacataatggagagggatgtggatgttgctgcatcttttcggtctgtgttgtgtgaagaaaaaattagtaactcggtggagatttttgcaatctcggatgctgcttggaaagactctagagctggcctagcagtgggaatgttggatagatgcaacaacactagtgagtggtatacgaggcaggtgcctgcctcttctgctgccgaggctgagttgctagccattcagtgggcgatgcagatggctgcccagaggggaaccaattcgtatgctgctgcgtcggatgctaaggtgttaattgatgctttgaaaaaaagggtctgccctccagtttggcatttgaaacctctagctttggaggtactacagttctgtaattccttatgattgtaatttcttttttattcctcgtacagacaatctaatttgtgatggtttagctaagatggttagagacaatagtcagtataatgactacattttcagggagggatcccctgttgtgattcccagctttttaatctaatgaacttacttgagttctttaaaaaaaaaaaaactataagcccgccaaactcatactcattcgcaaaaatccaaaaaacactcacaaacatataaatccatttgattgcattatgtttatttttttaaaataatttgtttctgtggtcatggatcacacgtataattacattacgatgacctattaaattactatgtacatattttttttttaactagactaattaatttcatatattagttttacagtgaaaacttcaacacagtttttaattatgatgatagaataggaggaagaccatttagttgaggtgagttggttgatgctaatcaatggcttgctcttgaatatgcagatgagatggaaaggaatggttctcaatttacttggttaccaagaagatggagagataatttattccaaaattgatttggtctttaagaatgaggaatgattggatttacatcctaactcggaggctctgtttaaatgggagcaagaatcaaatcattgttattgcttgataaaaaaaagttagtttggaaatttagggattcatcctttaaatttattcaatatgtggagtgaacatgagaagtttgaggaaagagttttggattggtggaattaggaggctagagggaatgaccttttcactataattttcaagtttagaagacttcaaggtaccttgaagcaatttaagaaatctcaatttagggatgttaagatcaattatgagacagctcgagattatacaataaagctcatattgatttacgaaaaaatcctcattcttctttgttgaaagactctgaaaagagagcttgggagaaaatagctcactgtagcatgctttatgtaagtttcttgaagtagaaaaataatgtggtgtggctaaggatttggggatgagaatttttcctattttcatgcttgtcttaaaaaagaggaaagaaaaagaacagtatagcttcttatgttgattctcaagggacagttagtgaaagattaccctagggtagtggaccattttctgtctcactttaggaattttatgagtagtccaagcaatgcctctatcccaatcaatcagttgggtatggaggaagggccttgtctttcact

SEQ ID NO: 378934 - DNA, 4053 bp, Cannabis indica
tatgactagtttgggtgattttgagttatttgtttttaattattatgttacagaatcagttctatttcaaatatacccgatttgagttattttgtattatttttattgttatagaaccgattttatttttatttatatatgagacatctatttctagtgtcttttccggtgacggtgacttttccgacgatgatgactttttcagtgacaataacttttttggtgactttttcagtgacaataaattttctggtaacttttccagcacttgtgactttcccgacaccgatgactttcgagcaaaactttatttatttacaaattttcattcaaattttatttatttatttattttttttttaatattttaaactttaactattttttaatactatatttttttacattatttatttataccatataaaaataaactctattatacttttctatatttacgaaagaaaaaagaacccatttttatatgctctgcctgtgtatcttctacagttccttttttcttttccaagaggaagttcatgttataaagaaaatttaattaaaattattatacaaaaaagaaaacaattagatatattgaacgatgtcttttcactcttgatactctccacatctatacctaaccagctcctgtctgtgtccacaatgttcttaatcaactctaaccaattttcatcttctttatttttttaagagttaaaattacagaaattctataagctgcggcttcataaatgtcttgtacaagtaaaacaaagaaaattactaaaagactattttttttctttaatatagaaaaagaaaaacaacttggtcagttttgataatccttcatgtataggaaacaaagaaactatcactaatttcattttttttttgtccatcaaatttattgagaaccttcacttatggctgaggaaaaccgtggtaacaaaagataaaaatgtaaaattacacggtagccatagtagtttattttgaggccctgaagatcactgtcctaagaacaaacaatgtataattttactaccaaagaaatcttctcactttctcattcctatgataatattacctcgtaccaaactgtatctaagagtaatctccacttctcaaactctgcagtagatccaagtatccataattttccggacgaatatagctggattaattagaaagttaaacaaacaaaaaatattaaggaactatatactccaaatttctgtgtatttaaataataatggtgctggtaaagcaaatttgttatactccaaatgcacgtattgatattgacaataaaattttacactatgagcctgctaaagaacttcttgtgtaaaaaacatttgttacaatcattacacatttaactaacaataaaggttttttctcctaacacaactttatatcttagactattccgaaaaacacatatgaaataatatcaggggtgaacaatgggtgcaccatgttaactctggccattgttttaggttagaaaaaaaatagaaataatatagaatgcaagcaagtttgatgtgaaaaaaaaaaaattagagacaaaagacagagagagatggaaatacccatgtcgaaatagaaagtcaatgatgacaagacagcaatttggcttgaaaattgatgtcctaccacgtatgacattcgcaacatgtgccacaggaatcaacttgaaactttccacctccccatctgccacatacaatttttatgccatttcagaggatgaagctctttgcctatagttataatacttttacaaagaagattgcttctataagattcaaccttcaacctgataagcatataattaaccttgccactactaaattgagctgaggtcctagaacgtctaccttcattcttaggtataaaactttcgggaagttttaaatcatagcaaaacaagacatccctcttgtatctgtatccatcaatgtccatgtatgaaacagcaccaactggtatagcactgcaagagaagcacttcagttctgaacccatgagagaaacactaacagatatatttaccaaccaagaaaacaaagtgatcagtgtttaacaagatatttgataattttatggttaacaaggacttgcctgctagaaatggatttgggtattccagcttcttcttggcattccttgacgacattctccccacatgcaatcccatgaggctgacattttaccatgttgaattgcatacataaaattaatatctcacgctacagtatgcacacatattcaatggagaataacaatattcaattgacttagagcaaagacattgttatcgaattttcaaatacaaaccagtcctccagcaacaagatgatcgagcattcctgggaaggtagatttttcttgacttctcttcccaatccacagaaatttctctccttctttctcaacataaccattcatgtgaattccataagcctgttatcgcaaaagcactagaaaaacactggttacacattggaaatgtgatcaacaatatagtcagaaaccacttgcaacaccctagttagtatattggtcgcatattgattccctttgtgtattcattattgtaccaaatcacaatggatgaaatagaaagaagaataaaaaacttcaaaacccatggctcaagaaatcatatatggtttttacatgtataataccaatgccaataaagcatacctttattccaaaataaggagcagctgcacgttctaatgaaaaaagtggtgatgcaccaaaagaagaaatcactgggtaaagctgaataaaatcaactataattagctaaaaaacacaatgatcttcacagatgttttgctttaatcacattgaaacaaccagcatggcaattataatgtttcatctagccaaacacagaattggtgtctattcaaactcaactagctcaaagcagtacctcattccgaatacctggaaactgttgctcccctaagatcttaactacttctcctactgctctggtcctgtcctcttgggtcttaagcgacggatgcaatgtcaccgtccctccatggaagccatcattagagttatctggtaagaatttgaacactttctggaacttccgcaaattctcagcaaaactgaaccaaattttaacggtgaaagtcacaaactctttgagcacgaaacttcttcactaacttagaaaaaaaaaaaaacttacccattatgaatataaccaactatttgattctctattacaaaaggcataaactcgaatcgcatttcctgcaatccaagcttggaattaatcaaaagaaaaaaaaaaaaaagattgattggaatgaaaccaagaaaactcgagtaaaaatagcttactgatcctcgattgcacattttaatcttttcaaagtagccattgagatcagtaacgtcgtccgaatccgaaatactttggggctgtgaaactcgaaggacgtcgtcccaggtgaaggtagcagtggttgataatgagcgaggaggagaaatgggtttgggtaaggaattttgaaaaggagaggggattcgaaacgccgtcgtaagagttgtgcgagcaaaagcacgataaggggtcggatgaaaatgaagaagatgaataatattgcaggccatggccatggccattaaaattcactgctactgtaagcttgaaagaaaatgtagaggacagtctaatttttgttattgattgaacaattaattacattcataaacagattagcctttatatatacagactaaagagttagcttggaatagaaatttagttacattcaactaacaatacaacacaaactaattcctataactaactctagctaatcctttttactaaaagccccctcaaactaacactatgtttggtatgaaagacagaaaatagaagagaaagaaaattagaaggaaagaatagagaatttattaaaaaactataaattttattcaactagaccaactcgacctcaataatattagcaacattaaagagagtttagactttgaaaa

SEQ ID NO: 378935 - DNA, 6031 bp, Cannabis indica
aatttcctcatttatttcaaaattcaatctataaaccctagattctcattcccaaaatctcaatccccaaatccttaatctaacccacaatttctcctagtttcgcactctaatcactcatttccacaacttcctctggttttttctcggaaaatttcgattttttatttttcattttctcgggaaaatatgggaagtagaaaggaagaagagagaaatgagaagattattagaggtcttatgaagctccctcctaatcgtaaatgcatcaactgtaatagcctggtatacgattttctctcattttctcaattttttttttgaaaaaagggaactttttgggtttcgagaaagcttaagaagctgtttaattaagaggaaaaatcaaaagaatggttttttaattggtttattgattcatgtgattatttgttacagggtcctcagtatgtttgtacgaatttttggagcttcgtttgtatatcatgcagtggcatacagtgagtattttgatttcggtctttttgcaaaatgtgtttgtcctattacattttgaaatttgagtgtgattttatatattcaatcaatttgattataattgtttggattctaagttcttaattttatacctactttagattctatgtttgatattgattattattatcatcttgaataccttattttttattgttatatttgataaatttcattagttgtctttatgttcatgttgaatttagagtagtaattagggagaaaaattgaataatcaaaattgtggcaaggcagtcttaacacttatgttgttaatattttactagaataaaaatttagtgacagttctttcctactcggccacttggctcgagtcgaccgttatgaatttattccctatatggcgccctataaaggcgaacgattgttcttttagttttcgtattcaacatttgaaccttttcatcaaatatttttcgccttcttagttttgtgttcctgttaaacactttaaatctgtaattaaaggtgtttgtagagtttctcatgatggatcaaaccctcacaccgcgaaccatggatatgaccactcaacttgcccacatagctgtgcttttttcttcttcttcatgttattatagaagattatattactggtaactttataattcttactacattggattgtttcatctttcctttgaggctctaacctattagggatattgtgtgatttcattcattctgtgatttctttcatcttaaaatggatttggttcttcgaattcaattatgttatgtcggtttagccttagtagtaaaaacctttattttttctattgcaagagttccagcacaagagaaacattatctgattctggcacaacttttgttcaaatgggttgaaattccaatatttgctttatattttctagtatctttttcagcttatataaaggtccctttaatagaatttccttgtggtctcttactagcaactcaacataccaacaccaagtgctgcagctgtatcccctttaaaataaaatcctatctcttgatgtttcggtattttaagacgtggatgctaccatcttttgatctttctattttcatatttatttgttttaagtattggtgccgaccataagtttgtttcttcagttttctcaattgctatttatcagctacaataaaaatccgaaacttctatatacattgaaaaatttacttaacttgttggcagtagaaagatatgttcatttatttgttaaagagacattacatttagggatgtatttttttgtaatgaaatttcatatttttgtttatccagccgagagtttactcatcgagtgaagtctgtatcgatggcaaaatttacttctcaggaagttgaagcacttcaaaatggtggtaatcaggttcgttacaattaacactattttattattctatatagaaacagctagtcactatttttctcttgattagccattcaatcttttcagcgagctagagaagtatatttgagggattgggaccttcagaggcaccgatttccagacagcaggtgggaactttaaagtacaattccctcatttgttgttcacataaataagtagattttcttatatcatatttatgttttgcagtaatgttgacaaagtccgtcagttcataaaagatgtgtatgttgatagaaagtatgcagtaggaaaatcaaccgacaagcctccaagagatacacaggcaagagatagctattaggaaatttagtattttatttacattgtaatatgtttatgataaagaagataatacaatctcatttatcttatttgagccaaggatacgagcttgaaatgtttcattctttttcttaatttaattttgcagaatcgtggagttcatgaagatgatacaagacgtgccagttcttatcattcttattctcaaagtcctccttatgatcatcaatatgaggatcgccggtatggaaaacaagcatccgcgcttaccaggaagcctggatcagaccgaggccgctatgaagggaaaatgtctagctttatctacagtcctggtcgcttaagtgagcaaatgtacgaggatagatttgccaatgatggctctaattcccgagtttcagactattctatttccagtggaggggatccatttagatcaggtacacattcccctagttttagatcagatacgcagtcccctacttatcagaaggatactggtttcagtagcccgccatttcattcttctagagatgttgtgagtgaggatgttaagcgccaagcagtagattcttttccgcaggtatatagctttggtgaaattgacttttactattaaatactttcatcttattgtttaggtgccccttttgttaatattgtttgctcattcctttattcagagaagtagatccacaggaagttttggatcaattgaaaacaactttgtgcctcataagtcatttagtactggaggtttaacagatattggctcacactctgaacaagctgctggaacagtccaacaccaagcatcctttaatggatcatcggttatgggaagttctggtaatttggatcttttcacgtccccatctgtaccagaaacagtatcttcgtcagcaccaattgacttgtttcagttaccagaagcaccagcagctccttcatcagtagctctgtttcatccattggtagtatcatcaactacgtcgacaacttctttggacttgtttgctgttacggatcagctacagtctacaacaatcttcaatgaaaagataccagagtttcctgcccctaaaaatgaaggatgggcaacatttgatacacctccgtcgtccacaactcctgttccaagtaccgagacaattaaccctggaattataccctctaatagtgaagagtctctagggaaggttgatcttttttcatccttcgatacaaacatgcaatggccatcattccaagattctagttttcacagctctttgaatatagctagtccatggagtgatagtttgccgggtgtgacagctaccaatcccgatagctcaaacactcaggtacgtgttacaataaaacaaactggtttatttatgggcgctttggagtgtttgaaaaactctgtaatttatgcttaatttatgctttggagtgtttgaaacagttatggaatgcttttgaagatactgttggtctgcaacctttggagggctttaaacaggatggcggaccaccagtgggcatagatgggcattcttcaactgctaatcagcatttggcctttacagcttccgaggttggttgcatgaaaccttatactgctttcaaattttattcgtcattattttttcgtccctttttattattgaaaatattctttacagaactccagttttgacggtatccaaaggactgcttctaacggtgaacctcctggtcctatttcatctcttgagatcgggccatcgtatactcctccaatgcttcctttaacggtttgtacttcctgcatgctttagcattttctatatgtttttcggtaaatagattgtggcttagtgatttcgttttcttttttcccacatttctgaacatcttttgggttttaacctttctgattttaacagggagaaacgcagttacatacaaccgatcgcaaatcaaataacccatttgattttccttatgattcagaagaaccagaagaaaacaacatggtaaatctacactgttattacttacctgatttaaaattccccacattttgattaatctgtttgattattgtgtggaaaaccgagaaattagtaggtcggtttttaataagctgttcgtctatatatatcaccaaatgtaggttctggcttagtatctttttgtgtgccgatccttcaaaacttccatgttgaatttacttttcttgttttataatagctggtggatatctttcttcatagagtaaatgcttaaccggctagctaaaacagattcaagtcccctttcgggcattatcctcgttggaggaatttgtcttcagctccatcattatggaaaagaaataagagataagataagagagaaatgtctgttacaatgtcatgttttttcatctaaatctctgatttcgtcattgtttgatttatatttcagtttctggacatgacctccttccaaggtgctctaccgaatgctcagctttcttcgagtttccttggtgatgtatctgaaccgtggttttctcaaaattcagtgaccccttatattcccgatgctggtcaaggtaggctttgaaatgtacttatgttgattcaatggatgttttacggaaaggcatttaacaacacacttttgtgttcaattctttgaaggtggcgtaacatatctgtccccacaagttccaagctcccaaatacagtaagttacttctctctcaaatcatgtcaatgcttttgtttcgatatgaataatcacttaaaacaaacttatcaaaccgaaatgtagcactctcttaatccaaatagttttatcaattgatttcgggggttcttacgaaaatgcatgaccggtgtgacgttttattgaatgtaataactataattattcgacaggaatgtaccgactcaagggcctgttgcatcgtcgattggaggaaatccattcgcgtagagtttattgtaggaaagaatagttctttcatcatttttagttgattagaaggtttacgagttcttcccttctttttcggtttataaatttgttgatttctctgcatttccttgagaatgaaaacattatggttttttgtctgtatttttttttgtagaataaatgtttgctgtgtataactgtatcagaccatataattattattattttttttacttcttttttgttttgttttacacaaatttgttctataaatctgcatgagtactaaaattatgatgaagcattttttttctacttaataaatttcaactttaattaatgtgtttttttaataaataaataatagtatctcaattaaggggtgttacaaatttattttatttattttttgctaggaagttgcaaatttattttaattcaaaattgtcaataagtccataatagagtttgcttcaatttagaaaatcatttgctctaaactaatgtattaatgaaagttagattttgacaaatgattaaacaaacatatattatcatgttaatatgtaaaaagtatataacacttgtgatgtttctcaaataaaaagaaatataaattataaacttttaacttttaagtaataagttcttaactaatctttgaataaacaaaaacaaaggtgtggaaaattcatccaccaaaaattattatcactctaatgtagcaacattttaaggtgttgtatcactactagtcaattaggtttacatatttaatagagtaatttgctctgcatattagtttccataaatatttaaattaatttttaagttaataataatattaa

SEQ ID NO: 378936 - DNA, 5339 bp, Cannabis indica
gcatttaaaagttccagccaactagagccattatatacttatcttaattcacaatacacgattgtattccaacactatgatcatcatttaatttttttttctcgaattgctttgcacggcaagaaaaatatattaatcccaataatgactatagaccaataataaatcaaagaccattattgaaataaacttatctatttttccctttagtattttagaactcctttggctgcgccttacgtgtctttaaatattattcttgttttcggaaagatgacacgtggcacttccaaagaatgatcaagtaggaatcttctaagccaaagctcttccacgtaagaaggcccaatctagacgggagatgggtcagagcctatttgaagcctagaagcctcaccttcaaggatgagacttactcgaatctagaaggctccctgacttccataataggtaaaaccctctggatgaatattgggacgcacttggagaggaattccaaaaggcaccgccaaaagccctttgaggggtgatgtggcatccctctgacacccagtcccaccaaatcacaccttgtctcctatgtcagaacatggtagtgtgcacaccaccaaaaaaaatgcatcatctttgtcgaacgatgcttgtttgacatcattgcctattgtagcagtactctgtgcgtgacacctgtccggaccgcgtgggccttatctatatgcacaccttcaccctacaagccaaaattctacaatgggcctcaaagtcatgtatttcatgtatttatcctaatagtggacctagtttgcacagtaactataataggtcacgggtatgcccagatccgaacgtagccaataaatagccttttataccttcatgaaagggaagtgagaactctggttatattttctttagactttcttcttcacaaagtaagaaaaaacttagaggaaaaacactatagccataaactagggttcttcaacttataagactctattgtaatatattcaaagcctttaggctaatacattgactcatggactaggttattaacactcaaaccacgtaaaaatttccatctctattacataactgcttatttaattttttaagctcttctttaatttagtttttaaaaatcttagtaaacaaactgttaaggtggaaatgtttgatggtgttatgagaacactgactgatgtgagatatgttccaacattaaggagaactttaatctctttgagagttttggatactcgtgactatgactattttgcaaaagatggtaaaataactatgaagaaagatggcttggtagttgtgaaggttaaaaaagaaaaaaatttgtataaattagtcaggaggactattttagttggagttgtgaatgtggagtcaagtcacaaaagattcatttagtgtgaaggaatgcgggaaggtagagaagactctaatttcagttaaaggttgtttgaagaaagaatttgttattcgcattttcggcaagggacacgtggattccaaatataaacttaaggcccatcagtggatccaaataacataaactgggtcgaacttaggatctatccggccttccacgaattcaacaacataactcacccaagtgagattccgtcaagcctggtcagcatccaaaaggtctatctttgtgtatctagaagaggtcatcagcgtgtatctggaagattattatagttttccgtttactgccaaatcgcacaagattaggaattacttcccaaaatcttggataaagaataatatcttgctaaaaagaaaaatttaataattagaaatcaggtaattaatatgtcattaattgcccacgaatataggacacagtataaatatatagcttcatgataaggcctctacgtcagcatacacaaagtgctccatgggtcgagcttcaccaaataagctcaaagtcaatgtattatttgtaaactttccattagaggaaaaaaggtaactagtatgacttctataacactataaatactcattgaatccttcatgcaaaaatttaaaaaatcttggctcactttctcatacaaaaatagagtgctcatacttcactgtaatcccttaggcttttctaacctctcataataatattaactcgtggactaaggctcgttacgccctaacaacgtaaaaactctgagtgtcttcttcatatatatttctttttgaattatattttctttagctcttatatttaataattagttttccaaaaaactcggttaacagaaggcatcagtgaaagattgaagaatgtgaagacactgctctagtcgatgcatatatactcttattgatggtttgagttgtgagtttagagaatttgactcaatgtggatattgttggagtttgactcaaattaatttttttttttttttctatatttgttaagttctaattttttaggtaattattaattgtgtgaaagtcttgatagctaagttttgaaaagtcttcttgagaaagctttggaatgtcttggtcccaaaattatcttggtgtccaatttttttttatcctatgaatatgtgttttgtatgagagaagggtgtatgtgtgagaagaagagtgagtcgtgaaatgaaaagtgagagtgagtttgtagtgtggtgaaagtgagaaagaagcaagtggtgtattgaaatttgtgtggagagattgagatagagtatatgtaattttgaagtgataagtaaaatatatctctctttgtggatttgataactttaccaaccgagtgaaatttctttgctttgtttgtttattattttgctgcacttgaagtttattatttgtatggcgaaagtgagaaagaagcaagtggtgtattgaaatttgtgtggagagattgagatagagtatacgtaattttgaagtgataagtaaaatatatctctctttgtggatttgataactttaccaaaccgagtgaattttttttgctttgctttgtttattattttgctgcacttgaagtttattatttttctcaacagaaaacatgtacattttgttaaaaagtcagacattgttgaggtgtgaaaatataatactatatataagatgcatgaactacatctcttattgctatttagttttgagatgagacctcatacaccataccatacactcacctaatccaaaagagtttcttgtgatttgaaatagtgagccaaaagtcgcttgggattcgataaaccaaaagcactacttgtaattgagttatccaaaattaatgaaaaaaaaaaactaagagatgttaaagaattccgcattacaaatacatgaacatataatattatagataagttaagatgaataagatgctgcatatttattgtatacacggagtgcaatgttcacatgaatacaataataatctatctttttcataataatacattcattacactacttaataatagaataataacattgcaaattttatacaaaattaattaaaacagtacaacaaataattttaaaatcaatactaccattattactacaactctctagtagtccaattataattaattaatagggaaatgctaacatttgactacattattattattattattattattattattatttgtagcattattattactaatggaattcttgcaatgagcaatagctgcttgaatggctgcttgcaactcttccatggaactatcattagcagtattattaggaggaggcatcgccacaagggggccactattggtcggcgaagtccacatcgatgccggcgccgaaaactctcctcttcttcctctcatcatcatcatcttattactattactattattattattattcaaaacaccagagaaagagtgtggctgcctacgtaattcgatattactaatctcatcatcattatctcttctagccttggaaaacaacagtggcctcctcaccattctcatgtaccttttgattacctgactgatcagttcgaatttcaccttagatgacctcttcttctcctcaatatcatcctcaataataccatcacccatattattattattattattattattattatttctatttaactgctgccctttattatttctccatttcgatagcccgaaaagcgaaaaagacttgttgcccggcttgtttgatgatgatcttcctcctcctcctcctcctcctgctgcttcgttggtaatggcggttgcagagacatctttgctctgtttttgatgctccattattattgaggaggatgaagatgatgaaatctccttaatgggaagagtaaaactatccatggagttagtggaagttctaggagagattggaagatgggaaagaaggtggagagggagtaaatgaccatggaagaatatgtcgtcggccggagacaagtcgacggcgaatgaagaattattattgttattgttattgttataactattattagtctttgtagtagaagaagaagttgtggctttattattatttgtggagagagaaatagtgaaggagaattcatgtgatggagaggatgaagatgaaggtggtgagacaggagatgatattgttacctgttttttggaagagttattaattgatgatgatgatgatgatgatgacagtgatttaacttctttgattccttgaacacaagtagtagtagttgttgttgttgatgttgtactaccatgtttggtttcccaagatttcttctctgttgctagattctgatgatgatgatgatgatgatgatgagtagtagtgtccataactttgagatgatatgatatattttggttgaattaaacactacaaaagagtttaaaggtttgaactttgaataattatgatgagagaagagttggttctttgaatactaacaaaatcttttagaggaaagatgataaggtgatttgtgaagtagtgggagagagaagggagagggtcatgtcactctgtagtttagcttaaaaatgtctcttgtgaaaaaggaaaaaaatgactaagggcacgagcagtgttagcattttaaatgttatattattattagttttattaaatattgggtttcaaataatttaatataataatttttgtagaatataattaactcattgcaagatgcgacctctaagtgaattatagcaatgctaaaaaaaattgagtattgctatgtggaactaaaatatctagtgtcactatgaaataacattttattattagttagtaattttttataatttttattaaaataaaataagtaaaacttaatattaaattacattgataa

SEQ ID NO: 378937 - DNA, 2065 bp, Cannabis indica
aataaaagttgtacatttattgaatcatttcatcaagaatgtcactcgggatagaagtagtcgagtagctacaatcagcatgtaaccatgagtctctagctaagccatgaacaacacgatttgttcaaaccagacaaaagaaacttgcaatcttcaatacaactaccaaaaggggagatcatagacaccgagcttctaacagcttggatagtgatgagactaattgtttcaacaatgacattggagacatttgatatcatgatccaactaagaacctccttcacacctagagcctcgacaagacctggatcaacacaaccaacccaagagtcagactgagtctgtagaacatgaccccttgcatctcgaagcacccaaccatacccaaatttgttggtatctgcaaatgctgatgcatctacattaatctagtaattatcacttaatggagtacaccattgctcaacccctttaccaatctcaatcgagaaaagagaaggattaaaggatttgttacgagtaaataaccatggttcaagatcacattttgcaaaagcagcaacattcttgactgaattactttttccattccaaattttgttatttcgatcatgccatattgcctaacacaatatagcatcaacttgcttatccttcttactccaccactcaaactggtgttgaaactagtcaccaaaagaagaaaaaacaacactcccgccaagcagtcttgctgcacgccagcaagcagtagcaaagctgcaaaaactcagacaatggcctattgtctcagcctcttggttacatttggggcaataggaagagatcttaacatgcctttgaatgaactgagaataagtaggtaaacaattggacactgctctccagagcatttcttttaccttcgaaggaaccttcaactttcatcttagcataaattattttcatcaaaataatttataatctgactaaaattataaataattataagaatgtgtgttataagataatattattttataaaagaaaactctaacttgtattttacaaaatgcatagatcaaaataatacttgaatttgattttcatcaaaataatttttaatctgactaaaattataaataattatttatacatgtaataaaatttaaaacataagctaaataaaaagtaaaagattaactaatttaatatttgaataaaataatttatttctcctttctctttttctctctatgattataacatcagttctgaaatttcaccatcatcttcatttcaatcattttgatctcctatttttgagctccttgtagttgaggtaccgagcgagctccccaaaaaacattagtgttgagaaaatgtatatagaaagatgactttaatttctaagatttgagaaagagtttgaagaaattcaatacaaattggggttgtagtagagatgtgtgatttttttctttttaattaaacaaggtgctaccaaaagttgtggaaaaatgctcaaatgcacatagtgttttttttttttttgattcaagcgtttatatattacacaatacataacctgggactcgaacccaggacctccaacacacacgcaccctcctatggccacttgagctaccctcaagtggttaaatgcacatagtgtttaacattacccaaagtattctatacttttgtattgggaagcaacctgagaacaatgaatatggttatatggcaaaaaggtagtttgagaatttaagctatgaagattgaaaagagtattattaactttttagaaaactaaaccacataataattagttttaagctaaacaaacataaactaactccatatatttttcatattttaaatttataatagctaacattacaactaatcattatttttaaaaacagattttcacaagttaaattttaatttttaaaaacagattttcacaaattaaagtctaagttttattacaaaccaatcaactcctatggtttcaatctttatctcatgtaccttttctcccaaaaaaaaactttatctcatgtaaatgaaggaccttttt

SEQ ID NO: 378938 - DNA, 3750 bp, Cannabis indica
attttcgtttttttttttttttggttgaaaataaacaactaatcatgattcagatcattctcttcaacttatttctagtactaaatcttttgaatttaggggcgaactgtcagcaaaattattcaggatcacaatcacaacgctgtgacattgacaaccatgaatcagtgacagggccttccccagccatactttacacttgcaacggccaaaaacggttctgccaatcttacctcattttcaaaactcaaccatttttcgattcgattcgaaccatttccaagctcacgttagcgagcccagaagagttggctagactcaacaacgttgaaaaaaccaaatcttttcctttaaacaaagaggtaatagttcctgttaattgttcttgtggagcagatcagtactactaccaggccaatgcaacagtaatcttaaacgagaatgatacgtattcaaccatcgctaacgatgtatttcaaggattaagtgcttgtacttctcttgttcgtgccaattcacatgaagaacatgctttacagggtggcatggaactgaaagttcctcttaggtgtgcttgtccgactaggaaccaaacccgaaacggcaccaaatatctcttaacatacccgattagctcaggcgacgatattgagaaaattggtgagagatttaacgttactttgaaaaacttactctttgcaaatgggatttcggagcacaatccgacaattttctttaaaactacaattcttattcctctctctactcagcctctaagttctcaaaccacagttcataataagagttatgatgatcataagacaccctttagttcttttccttcgaaagagactaaatcgaagaagaaattttacgctatttttgggattacggctggttgttctttgctagtcctctgtgtcgttatagtggctgctgtttgggtttacaaatcaaagagatcgtcatcatcatcgccaaagggtttattattgttaccaactagaacgacgacgatgtcgccggaagatctccgagtggagattgctagcttcgaaagaggtcttcaaaggtttggaatcgaggagattagaaaagctactgaaaatttcagttccgagaatcaaatcgtgggttctatctaccatggtgtgtttgggaagggtcatattacattagcggttaagaaaaccaaaagagatgtctcaagagaagttaacattttgaaaaagttaaaccatttcaatttgatcaagcttgaagggatttgcaagaacagagagttttcttatctagtattcgagtacatggaaaatggttcattaagagagtggcttagcaaaaacgaccaagaaaaggattggagctggaatacaaggattcagattgctttggatattgcccatggccttaactatcttcatagtttcactaagccggcttacgtgcataagaacattaagagcagtaatattctgctcaacagagacaagagagccaagattgccaatttcgggcttgctgggccagctacggatcaggtgaacatcccaagtcgtagaagtagttctcattccgatttcccaaggactactactgctcacgtggtgggaactagaggttacgtggctccagagtatttggcaaatgggatttcaacaccaaagatcgacgtgtatgcttttggagttgtggttttagagcttttgagtgggaaaaatgctgtgattgggaaagagaatggaagacaagtgttgctgtcgaaaaccattgtggagattatggaaggagatgatgaagctaataagcttgatatgtttattgatcatggccttaaggaagatcatagatatgtagagtttgccattagggttgctaaattgagtgtcgcatgcttgaatccagaaccggagactaggccaaccatgggagatgtcatttcaactctcaccaaaattcaggcagatttacataaaaattgaattatcctgtcctgtaatgtaattaagattttcttttctttattacattaagaatttgtattatatcttagtttcttttttcttttaaagggtaaatttccaagtaaatttccaataggaatgcacattatccttatggccccgcgcggacctgcccttaatgaggcgggaaacagagcggagacgagaatcatttcttgtccttaaacatgacaaggacgaggaggatgacactccgttgaatacattaattatctttttattaatattttatagagaaatttacagccaaactcttatatattttaattgttacaccaaatcataattaataaaagaaccgaaccaaaaaccccaactaaccattgttacaaattttcataatcttacagcagaacaaagggaaaatgggtaccatttgttagtttgtcattgttggaatcttttaagtagttaactctcaaatgtgaagaaagcagccacagtcgaatgcgaagcttcatcaatgtttacagctcccttgaaggtcgagtctcgaatattcgaaaacgattctcgttctgcacgaacgatgaggacaagtggtggttcgctagagaaatgaaagagttcttagaggaattcgaggaggagatcaaggttttcaaagaggaaaaaattaagattttggagctggtgaagaagatgatagagttctataacttagtgggatctgttagagagagtctcacattgctaatgtgtggaaagataatggaatatataagaggaatgggctactcctcccattgctaattggttttgagatggaatctcattcaccttatcccaaattctaacatggtatcagagcaaaacaaacaaaaaaaaactctagcgactttctcacctaaaaaaaattgatcatagtagagccaaaaaaaaagccaccaaaaatccaaaaataactgatccaagagccaaagtcaaaaaaagtcacttctaattcgggaatagtgagctaaaaaataaaaagaaccaccaaaaaattatcaatcccaaaagtagagcaaaagagccacttgtgatcaggggatagtgagctaaaaaaagagtcgaatatgatcgagttgtccaagatagtgagcaaataaaataactaccatcttaagaggggatattagagagtcccacatcgctaatgcgtagaaaaataataaaaatatataagaggaacgagctactcaactcattgtcaattaaatttgaaatagaacttcatgcaccttaccacatagtcacttattttactaacttatataatataatactataagtacttctctatataaaaaaaaaaattagtaagattatgtcaactgtttgataatcgatctcccccaaatcccacctacgtactctatataatattaatacaaagcataactaaaatgtatttattggaaacaataaacaatcaaaatgaaaagaaaaagaaaataaaaaagtaacaggaagaagaaagtttatatgtatacagccactttttttttgtacaaagtatctataatgttttaatattaggatcatataaaataaattatgtgaagcacatctagacttattttcatgactatttaaagcataattgtacaaaaattcttaggttcttgcttatgttctacatattctatagatttctctgcttcttttattcaacccttttaaatgttcgagtacattggcatcgagtaccaagattagagtactaaatagctaagagttattc

SEQ ID NO: 378939 - DNA, 4523 bp, Cannabis indica
ttttttaaaatatttatatttatcattttgtttttcaactctgtcgatcatcttcgttgttccgatcgtaaatattaaatttcattctgattattttgccagatgtttatttcagggcggatttacgctatatatctgttaaagcaattttttttattgaacttctttttgtctggttaagaattagggttgtgatctatctctatttgtgtcttcattttgaactctatgattcattagtgatcttttcttttcttttttaattacaacgaagattttaacttgattggtttaaggtaatcttgatggttataagtggatgcctatctggtttgttagatgcttcacactaaattttggttgtgggataatgtgatgatgtctacaaactataattattgtacttgctatatagggctaagagtatcaataagaaaatctcactgtttaagataaataaataagtaaataattgataagaacacttatagctggtggtaatgttgtatagtagttactacttactaggtattgatattttagcctgacccaaaatatatttctgtacttatgataacaatgctcaagataaaaaatttctgtgggatagctttcagtttgggcatctcttgttgttactgttagggagttctaagaattttcgtctattttcttccctcaaacagttaacagctttttaggaattactggattgtagattgggttactgagctgaactaatggacctcttctttctcatttatattcttcttcttcttcttctttttttgggcttgtgtattttctttcttgtgaacacaaaagttatccctttttttttctatgtgaaagtattacctatactagctgaattacttgaatcagtatttgtctatgcacactatctagttcttagtgttatgaactcaaccaaactaaacacaggcttttgacaatctttatcctaggttttttaagcaattaaatttcaaaacttgagaagtagattagtccttttgtggagtaaataactggatcagatttgtggagatctatgtattgggatgattgagcaatatcaattctcattgctgataccactttatgtgtgaaggacattttcttggtccttatcatgtggatgacttctaggtaattttgtactttacgaaagggaaagtcatttatttgaggtggtctctgagtgttgtgttttattcctaggtaaaagctccaaatgattgaataagtattgtttttctaaacaatgtggcaaattttctaggagatgaaataaacatctaaaaccatgtgaccacccaaaaagctatatttgttgcaagattttttatatctaggtctaatattggtcatttttttgtttttcagaaacataaaagataaacacacgcacattttctagtagttggatgtttggtataattgagaacgtcatttttctttctctgtttgtttcagttaacgtatggattgatgattatgtggacaactgttattgaaatttcagggttttgactttcttttcccaagggttatgaattacttactcctgtgaaataaactggagaaaaaactaataaagactatcaattatgattagttttcatctccttggcatctgatagtgaagataaaaatgacaccattcatatttatatattttcttcaacagtatgtgtgtatcaaagtatgtatatacatatatatattgtgcttagtaatgaaaaaacttagcaataggaaatggtcatcaccatccctctgtctttggggcttaattcttaaagtagctaaaagcatgattagctcatggcttcagtaggttcagaataatttggaaatactattgtgttttattaaataaatttatagaattggaaatggatttgtcaaatggttcggcatgatttatacgcctacaaggtttaagaaaataaataatggggaggcatgtagtttgctattccctgttattggagaatgctttcttctttaactaaggaacaaggcttgtggttcaagttcttcttggtaactaataactatataacaattgttgtggtttcttggtcccaaaatattgttaggttaggtggggagtttggttccaatggaaaaaaaaaaggaaaggaatattgataatgtcggggaaatgcattatgcatcttttacggtaacaggaagtggccccttagtcttttcagaaaaagataaatacttatagcaatatactgaaggcagacatcatgtccagtcaattcgataacaagatgaaatgaacattaagtgtttaatttggtttttaatgtagtttcatttaagagaggttacagattttagtttggtttagtcattaattttcttttgcttcaaatattatatcttccctaattgtcctattggattaaataataaacatggtctgaagttattcactctccccttcattttagattgcatgaaaatttttccttattgctcaactaaataagtgattccagattatttttctcatatatcttttaaaattgatgattagtttgcttaagagagtggaatgttatattgtaatgttgtttatgctgttttgtctgtatcacgtttaattatgtgataccctgtggattttccacatccttgtattttcttttatagcgttatgagtcttatgacattgcctcaactacaactttctaattctggtgattgatagcctcataattccatgaatttatgcatcagacatttgacatatacttgtcgaactcgcatttttactttccttcataacgacaaatgcatgctttcaggtgcaactagcaaacgcgaaacaacttggggatcattatgcctccaaacacccaaaggaaaagcctcctactgaatcagagtgatttgttgaaaagaagcaaggcaggaagaagaagatgaagaaaaaaggctcagaatgtgtgtttcgagcttctatgtgtacttgtgaaagttatgaaaatcaaaatatcaagcttctgtgtatttgttaaaattgtatgaatctaaaatttgctgaaattattccccaccaggccttatggtccgtggagattgtataactatgatggatgattgataaaacatttctatcacatctggagttcaatcaatgcatgtaaagtggttgttttggcacgtttttagttttctttgcacttgcagtagcattgatatcaatttggtatcaagtttaatacacaaatcatcggcaaaataagaaaggcttacggtttagtgttggtgaatactgttgtctaaagttcattcaaaaaatgagttttgaaactcaaatagtccttaactgtcttatatgagatctttattatttagtacaaccacacaaccctacttcatacaagtatttcttttccttttttgtataaaaacatgatcaacttcataattaatttcagcagcctacaaacataccccagtcacaacagctccaaagccaatctagtcatctagatttacactagcatagatttacagcatcacctcacctaaatccgaaggagcagcatgcacactaccattaacagtccttccagggagtcaactagtcaagtattagtacaagttacaacatcagtcaaatcataattaaatctttccagaatgataataaaagtatgtaaagtctacaagtatttgtggcatgcaaattttagtcaaagaaaaaaaagattaaaagaataaaaattagaagaaaatgttttcttaaattttataatttttttttaacaatatctcctttgaatggttgttctattccattgttttgtagtgtctatattgttttgaatattacttagcatgggaatttgcaatctttaaagtggttttaggatcaaatgatgcattgttttgagcagtagttttattgtttgtattaattcttgaacttctttcagtgtgacaatgcttcttacgtcaagattggacagattcgtcaagttgttcagatcccacaaacgagtaactttataataagtaatgttgttagaacgtttagtcatagtgaaggtccacaatctcaaactaaaatcaaaataaacaaaattgctactctgattaacgagtatccctttcttgatcagccacttcaacttacccttgtgcaacatatccctccacctttaatttccaacgttttagtggagaatgttcttggttgcctttttgctgctcattccaatggtcttaaagcccttgagttttttgattattccctccatcattcataatttagtctaagtgctgatgcttttcacatccttgtacgaatgcggtatttcgatagagcttgggagttgttgaaaagaatcagaaaagaccatctgtccttgcttattaggggtgttcatggattggtttggtccggattttcatagtttttgaaccaaatcagtataacggttttttgaatattagaaaccaaattagaccaaaaaatttctcaaactaaa

SEQ ID NO: 378940 - DNA, 1287 bp, Cannabis indica
attttaaaaaattattaaaaccgagaaacgcggatcatttccctagttatatatataattgtgttaatcaagtcaatttcgtagtgttataacatattaaattgtgtagacgtatgttttcaatttgcatcatacaatacatttattaaatgtgttatcgtcatatgtcgtatgatctgaaaagaaatcattattttgtttgtatttggggttttgacacgattaataaaacgatctgaaaagatcattatcgtatagtcttaacacaaacacaatacgataacacaatttgtcagctacttcaaaatcatattttgactggcatattatggcagtaggtaagtactataaagagtcctgcacttgcatgtccgataaaaatacaaggatatcagtatactaaatggatgtttgccactagtcactaaaattttattgtactactgattggagattaatttcattgatacaagaatatgagaatcctaggaataaggtggccacctcagggtaggaaaaatcagcagaccacttgagattacgacaagaacatcttgaggccagacctgagttccatccataatttttcactagtgccgactgccgagttggtcgagtgaatcaaagcccaatccaaacctgttaatgttagatccaaaacgttcacaagcatatttaatccacaaatcgccaaagtatggtccgaggttgattttaattggatgaatctacaatgaaaaccatggagatgttccccaagtcttgagaaattgagagaaatctctcgggtacctgcaagaaagcactccaactctcaaagtcgtaatattctcagattcacaagaaaaaaaaacaataaatcaaagatcccttttaaggccccattgggtgagatctttatgatcctcaagcgagccttctcagccttttaacctaagctcgctcgatcctcaagtgtggacgtgctgtcattaaacacttacaagtatcctgccaagtgttagaaatgagaaaatgacttttcaatagcgatttagaaactctatcatttaaaataaatagcattaaatctaacgctacgtcgtcattgtaagatatcataacattttgtctaccatcatcgtttatgtgcaaataacaagtgcatacgtacgatgacgtttctattctttttatttattaaattttttctcatcatgcattggaatggtctttctttccattttaaaatagaataatccttttaccaaaatagtgaaaagaccattctattgaaatgatattcta

SEQ ID NO: 378941 - DNA, 6348 bp, Cannabis indica
tttaatttaattattttgtttatcatctgttcaacaacataatcataattctgatttcactgatttttaaagaataatttttttaaaatttgttcaaatatattttacacttctagtatctccccgcttcctgtaaataattattttaaatacaccatttaaaaattatgaaaacttcatcataaaataattatggggtgttcatctaatttaacccgcactattttaacttttgacaatattgattctgcctctaaaatatacggcttgttaaaaattcttcctaaacttttatatttatagaattttagtctttatgtaagattttgtgccattattccgtttaaatactgacatgtctttataaattaataacttttacctctaaactttgacaactatcaaattgtactccgtccaaataaaaatgaaaaaaatataacagttttttagtaatcttaagaaattaatttagatcttaaaaaatcattttaaatgattaaaaaatattaaaaaataaattaaaattttaaaactaattaagtaaactaaaaaaaaaatattatttctgatgaaaaattctatttagatagaaaaataggctatttaagatttttgtcctccgaacaatgacctatacatgattgtgcccttgaatttttcagcccgttaaaaatagtcccttaactattcaaaattttgtaatgtggtccttctgtatagttttgtcacacgtggtaaacataataataacgtggatatttatatcattatcacgtcagtgccacatgtgtaatttaaaattaaaaaagtaaaaatatttatttttagagattattaagtaaaaaatcaattaatgataaacaaaattaatcaaaactaaattaaaaagtttaaattatttttttaaaattaattacacacatggagcatacaactagcttcccaaatcttgtcctccttagtggcttccgtaataattttttccaggtcatgggctatcaattccttggcctcttttgaagcctgactttgcccctattcttgacattgttaatggtttagaagtttgcaatgagtctgtgcttgcagagcagctgtgtggtgaccaagccgtcaacttttaacttggcttcagtgaggaccttataatggactacctttttggccagttcctcagttttagcactctgaggtacatgatctgtcaaaataaacaaggaaatatggaagtctaatcaacatttgaaccaagatagaggaaattttgaaagaaaaatatccaaactacaaatgtaagagcatttacctgggatctagaagttgagctggagagtaggcaccttcttcactggaaaaccagtggataagaaccaatactgcccaaggtcgggggaacgtttggggtagctggtggggaaatgagcaccagaatacctctcgagtttgtaaaatcccaatttcttgaagttggttctcatcagtggaggcttcacaccgtagacgaacataaatctcctctagagaaggtacctcgaactttgaatcttttagaaaatgtaccatttagctaaatgcttataagctagtggtattagttgaaacgagcaatcccaattcgcacaataaactcttcgaagtaagctcttagggggaggtgtccccccttgagatgtgggaccaaattcaggcactgaacccatccatgctcgtggatgtagactccttcatgacagccaacctatgccacatcagtctcgatatgttgagtagtttggctttagtgacatacatttctagcatcccataggaacggaagcaattttcctcctactccatctcctagatggagttgttgaatttatgagcaggaggtggaatttcggccttccctttccctttggacttcttggatgtctcaaaaggagtggcctctgtgataggttcaagagtggcatctgagtcaagttcccatataggaacattcgattgagttcctagtggctatttcctcaacaggggcaactattgtgttttcttcaatttccactgcttcaagatggaattcctggttcaaatccatcactggaaaaatgaaaggaaaataagtgccaagaaattagacgcccactatccaaatgacaaaatgggcattagggaatgcctcccttgaaattgcttggagaggtccccaccggatctatcattcccaaaagtctgccctcccctgacaatttggagtaatagatcgggaaccctgggaaaattacatgaacaatgtctaaagcaaaaatcaataaattaaagccatccagagtcctaacaactccaaatgggtttaaggatagtacattggcctagtgttcattcagaaactcatcgtgcctagttcaaccctgattctagaatccttataacatgcaagtatctacagaatacagacgaccataccctaaatatccacataaaactaaaatttccatggcataaaaaatttccgcataatcctaccctagaaatgaaactctacggacaacactttaccactcgaacatccaagacatcctagacctagcttgaactaagcatttctatcttaaatacaaaatagcaaatagtcaacaaagcatttggatacttacttgttatatgagtcgggaaggaaaggttgttgtggaaaatttcccaagaatgttgaacccagtcaattacacaatcgtagccaacctgagtgtcaaaacttttgtcagtaaggaaatggaacagtttgaggtctaatggctctatgttcgggaaacgagctgaacggtggtttagaaagtattgaatcatgcagttgaaggcctgtagcttgcattcactattgaagatgacagtataatgggagttttttggaaaataggaggttctagtttgaaattcaaaaagcggtattttgagagtctgaagtgatgaaaaaaagaagaaatgggtttggaaaatctatttatacttcgaccaatatccttgtgaattgaattgtatggccaagatccactctccaaaaagcacgttttgatttgatggatgggaagttgaaaagatagcatttaaagcttgcccctggtgtctattttcatcattatatgcctcgagtactgtaagcattaaaggagaggtcatttcaattgttctgccatcattgcaactcctcctaagaaatatggcccggaacgcacgtgttaaccacaaccgtattaaaggcactgcatgtgtgctacgattatggtacattcaacttatagccctttatttgatgattgctcatgggatacatctacaatcttgaaaaacaccacgcataaagaacttatctccaagggatggaagacgactgcaagctcttggaccttgaagagtctcagaagcttagggggtaaatgttctctgtgtttttgagtgtgtaacacgtggcatataagaggaaatattaaactaaaaaattttgctaattaaaattcttcattataatcctatcatggagaagcctcacagaaccgggaataagttaagactactagagaagcagaagtccacttttcttatcatagcttccggaacgcagaagacatattgtctctcttggactcagagtagtccaaatatggaagcctacccagttgatactcacatgggtactcgaagggcatattatgaatatcgaccgcccataactgtcgcagatgtctacctttggtgcattctagatcgcccagtgatggttatactttttcatacacaggatcagatcttttcccctatgtccaggcatggtagtgcgtggacctcgtctacctttttccagatgaatattgcagacctctacttttaaaggtgaaatctttagatgacacatgccctctacttttaaagattaaacctttgagcgacacgtgtccacaaagtgcaaatggtccccaattgtctagttggagcatgcacgggtataattatttctaagggacacaatagttagctctcttttgcatgtaatttaccccattagtggtctttgagttgaaacgctaggcaggtcatgggcatgtctatacccaccacgtagcctatatatacccatctatctatatacaaaggggggataaaagtcaaaataggtgaagctttaccaatattgctctaggtattattcttcttcaagagaaactaacagtacagagttatggttttcctactaaatattgtaaacacagtaaatatgccattaaaggctaatagactaactcgtggactacgattaatcaaaacttgaaccacataaaaaaatctccatctctttattttctacaatttattatttctttagtttttaagtatttagttttcaaaaatcttggtaaacaacacagatatattttcactagtagtgaaatgcaggacaattagaatcatgctggctataaccactcaatttgatttagaagttcaacaaatggatgttaccattgtattccaaaatggtgaactagaagaaaacatatatatggagaaaccaaaaggttgcattaaagagggtgaggaagacctagtatgaaagttagaaagatcattgtatgggctcaagaggtccctaagaatatggaataagatgtttgattcttcaatgaaaaaacaaggttacttaagcagctattatgatcactgcctatattacaaaggaagcaaagtttacacatttatctagtaatattataagagaatgatatgcttatcataagcaaagagaagtcaaaggtagagatcctcaagaattaatttgttgaaatcagagtttgaataaagggcttaggagaggccactaatatccttggtatgaacattaaaagggacatgaagaaatggaatgttattttaaactagaaagactacatcaacaagattattaaaaagttcttgactaatgaagctaaggtaacgaagcaacctatcacctactagcaccaattttccaaggctcaatgcccaacagaacctaaaaaaattgaggaaatgaaagaggttccttattcaaatgcaattggctctgtaatatatttgatagcatgtactaggcttgacctagcacatgtgatgaatatcataagaaaatatatggctaatcctagtaatagagcattggcaagtaatgaaatagacaatcaaatacctaacaagatctaatattgttgagatagtatatagaagatagaatactaaactactcatggagggatataatgatgttggttaggttggagataaagatagtagaaggtctactatagcctattacttcataattggtggaagttgtattagttgaaaagtacagctccaaccagtagttgctctatcaactactgaatcagagtatattgttgttactaaataataagttagttattgaaattaattccccatataaactaacccttttcattcacaatgaatatcatttggttcgaatcctatcaaactttacagcttagaaatcaagattataagaaagttagttatttttttaactcactacttagctcaattactcattaagtatataaattgaagaaaacaagatcgagagacttacaacttcaaaaattacttctcccagtcctagaagtgatctagagtaataatttagagatagagagagaccctcgtgttcaaagagttttttaaaaaaaagatatttagagagagaaaagaaatgagggattggttcgatccaaagaagaaaacttgaacatagaatagagattcttacctaaagagtgaaagtagaggattacaagttaatcgatgtgacctagaatccctgcaacagtttgcaaaatcttaatcttgataatggattcgatatgagcttctctgaggtcgctcactaaagacgtagttccaagaataggtggtgaatcttgtaaaatctctgtgcttgttttctattcttctcatctctttgactttgatgcttttccgtgtttattttgattcagctcaaattcttgagctcaccttgattgtgtttagccctaacctattttgtgtttgttgtgtttttgaagtctgctcgtcatagcaacatttttggtaaatttaattcaagaaatatataaacacaattagaaaatataacagaaagtaaacgtgtcaaactgtgattcataattcagaaacaaagaatggtcaaaattgaccttggacacttatgtgtgtgtgtgtgagtgttgggttttgtgtcctaaataaaaccaatttcaatataattagatttactaattaataaagatcagaaatcattttatgttgcat

SEQ ID NO: 378942 - DNA, 2313 bp, Cannabis indica
tgttatggttaaaatggggagattataaacaaaaaaatttcatcataaggcctcaacgagaagaaaaaataataaaattattgggctagaagacagtatgggtgtttgaaaaaatgagaagactattgttcagaatattgtgggagaatattttacctcacttttcactgtgtcgactattgatgaggcgatttttgaagaagttttgggggggtttcaacccaaagttactttagaaatgaatgtggacttgatgaattagtttagggaggaagaagtgattaaagttgtgaaagacataaatctatctaaagctgctggagcatatggtttactaggttccttttatcaataattttggactactctcttagtgaaaacgtgactcgtgtgtgcttgaatatacttaaaaatgtgactagatggtttactaggttccttttatcaataattttagactactcttagtgaaaatgtgactcgtgtgtgctcgaatatacttaacaatgtggcagatgttagttaccttaatgataccattattgctttgatacccaaggtagataacccaacgacaattattatatttagactgattagtttgtgtaatgtaatatataaggtggtctccaggaaaatcgactgtgtgaatcattgggaaagataatatcagattcataaagtgttttttgtcaaaggtcgattaatacatgataatgcacttgtggggtttgagggtttacactgcatgcgcaaagataaatttagaaatggttctaaggcgactctcaaattagacatggctaaggtatatgattgggtcgaatgatgattcattaaatctatgatgattaagatgggatataataaattgtgggtggataaattaatgacatgtattacaactggagtttctcttttctgattaatggggaaatttagggtcatgtgatttcccagcatgggttaaggcaaggggattaactctctccttttctgtttctcttttgtgcggagtccttctctaatttgattcaacaagttgaggggaatgaaagactaaatggattattgtttgaccaaaatagagtaagagtgtcatttttgttttttcctaacaatagccttgtattttttgaggctactcaacaacaaaattgatgtttttgagatattttggcaaactactcagtagcttcaggatagttggttaatttccacaaattggagttgtgtttcgaaaagaaagtgtcgatgaatattagaaggagattggctttaatgataggggtcatggtggtagataactatggaattggactttcatcctttgttggtcgaactaaaaaagaactatttgagacgattaaaaatcaagtttggaaaaaggtaaacggatggtgaggctcaatattttctatggctggtaagagtacttatcaaggtgatttcacaagttatttcggtatataaaaaatgtgtttttttcgacttacaaaaagtactcttaaaattttacattgaatgggagcaagaattcggtgggggtcgacagagagaaataagaaaacacatcggtacaaatggtcatttttatgcaaaacaaggaaaaaggtagattggggtttcgtgacttggggttacaaaatcaagctcttttagcgaagtaaatatggagatgcatctgtaatccaaatacactatgtagcaggcttctagcaactagctattttccaagtggtgatgtgttgaatgctaaatgtgagtcaaagctgtcttttatttggagaagtttggtttggaacaaggaaattattaaaaggggtaatgggtggataattggtacatgtgaagatgtaagggtattggaagatccattgttaccaaggcctttcacctttaaaatttataataagtatgtaatctcggataaaatgaggggtgttgatttgaaaaatatggatgactcttggaacacaggattcattggagctttattacgccacgtgtgtgcttttacaaacttaatcttttactaactttattaatttatgaaaagtgtggtgtaatcaaagtaaacacataacatatataaaagatagaccactgataagtacggggattccctatattaaaacttttataatctattccaaaattaattttacaaaataagattacatttcaaaatactaccaaaagggtatgtgacagtcagtagtcccgtgattcgtaacgggaaataccgggtaagctgtgcaattccacatcgcctggggaaggtctagtgggatgattctgagactgtgtagg

SEQ ID NO: 378943 - DNA, 1314 bp, Cannabis indica
atgatagtaaagtcactttaactaataataagaggagatcattgtagctataatattttttagggattttttatttttacactttaaaataatttttttttgtatttttacagaattctacatagaaatccttattacaactaacgctgcaacctaaattgacaacaaaaaatcgtatagaaactcttattgcaactagcgctgcaaccattttagaaacccaaaccgtaaattaaaaaaaaagttaaaaaatagtatatgaaataattcccctttttttttaccaaaaaaaaaggaattaagatatggtgacaatgagcttagccaaatcataagacttacacctaaatggaataccataaatttggacccaaaaaggaacatagtgcaactactctggggttatgggaaaggagctatcaagagcagcaaagattgtgagactttgggcaaaataccaaagctagccatctaagattctacgcttatattcccctcacagccaaatgtgaccagaaaaagaccatctgaatgttcagacacaataataggaaatctacactgagaagactagatttgagaaagagttttgattaaagagagacggctaaagtgtttgaaagtacaaatcttaagaagtagagtaatatcattaggagtttcagttggtatgtcatcaagagtgtagaccatattttcatcagaagttagaaccatgggttgaagagagttaaaacctagttcatccatattgaaactaatgctaaagactaattgaacaggtaaagaaatacagaaaataacacgtatcccaaaataaaattataattgtgttttataaaggaaaaataccaggcttcgaaggatgactcttggcttgcttctgaccatagcccctgctgtagactccttagacatcacgattattacgatcttccaagctccatcatcacaaactcttcgtcttaccgccatttttagagggaggagaggatctttgatctagcttttgatttgatggttagatttagtcgagggagaaattaatttaggggacagagaacacagcttctggagatatcgaaagggcaaagtgtaattaatttggttgaaaatgtcatctggaaggagatatcgaagataatcttcgtcaaagcaattaatgcaacaattaatgcggttagaacgagaaagatgaaggaaaaaacactacaagaaaagggctttttgccggcgcatttcgtgacatgcgtcggcaaaagttgtcgacacaaacaaatatatggaatttcaatttttttttgggtttacttt

SEQ ID NO: 378944 - DNA, 2452 bp, Cannabis indica
tactgagtcatcgtaccatcttgctcgtgctacagttagaggtggctgaggaagttcaaggtgccagtaagagtatgtgtgctcgtggtctgctgatagtaccgaaggagtgaagtagaagtaaggcgtttatggcaccttgggagaattacatagatgttctcgagacaaggatatcacctacttcgccttcagtggtgggatttatgcaagatgactgactagtggagccatccttgttaggcctgatgatcacatctcgttggcgtgtagaaatcaggacttggttgggaatcctagtaaaggaaatgaaaagggtttttctgctgttcttagtgtcaactgaactttcccaacactcataggcaattatttttgtattgttgactttcgaaaatcaaataaaatttaatatattatttttttaccctgatgtttttgcttaccatttgctttgatcacatattgcaggcatttaagttagttagtaaatggattgagcataagccagaaattaatggaattacatttaccaatgagcaattctagttttttgtacaagtaaagaacagttctgacccaagaatgtgctataaaatggacaaaaaggggatttcctaattaaacctgaacaaaccatgtatgttttgttatgattctttgagttgtattgtccaaaagactcgtgaagatccatccatgaaagatgctactaaatggtatattatttgtcatcaagcatggccagtcaaaaccataagcaaatgacccatagatcctgtggcaattccaagcaatccaccagcaacaacctgcaaatgatacaatgcattaaaatccatgttgatgatcaaccaacaaggctgtaaagtcacaaggcaaaaaggttttattacatctttatcaaaaagaacaaaaaaaactttattgcatcatttatctatgaaactatagtataggcataaatataagaagtcctacaatccatcatgtgactatgaagccaaaagattgttcagaacacaggaattttagacactaaaaaatactaacagtgtagaagtaatgaaccagaagtagttgtaatatatttgagacaaaatccatcaaaagtaagaacactactaagagctcctataaccattaaatgcattattagtttaatgaatattaatttattttagccagtgagtgtgtaatagtaagataaaatttaatggtctggagctaatcaatgtctgcatacttaatgtataagaatactttctcataatctttgtgtgcttctaattataatcaagtttaggaaacaatatagcgaacctgcggaggggtgtgacctagaagttcacgaagtggtctgctctcagctagaggatgctcagcaggaagttcataaacaatttgattcaaaacctgcaataaatacataatggttatataaaaccaattcaaaccacgagaagctttacaaagctaacagataacttgcaaacacttgaaaccaaagcttctaaaactctgaattctagacaaagcctcaaaagagagactgatgaacagaaagaaatagcaacacagactacagaggctgaaaaagaaaatgagagaagaaaaattatcgaacctctgcttggcgtccagcatgtagtcttacaccagtggcatcatacatgacctgcaacaagcatcttacattaaagatctccctacaagaacagaacatgaactatcttaaaatagacaggagaattataagccctgatcatagatgatatagtatgttaaggctgtgattataatgaactattttcatttgtatgagttctttgcgaataacaataaaatgaagggacaagaggacatacaacacacgctaagatcaatgcaatagcaaacaccgatcctccaaagccttcttggaatccaatggcagctgcaagagcagtaacagttgcagaatgagatgatggcattccaccagacccaacaagttgcttgagatcccagcgtctttctttatacctgcaaatctaagaaatcataagactcttataccattatgaagtttcataatttcccattgttaaagtcaagaacatattctccaatctcaactcaaaagaaaaccaatattcccactgaactttccttttcatatctcatttcccctttgcccacatcaaaatgaagaagaagatagaaaccaaattttaaagatttcaaccatgtttcattcaacaagaaaatagtgtttgcagctcaaacagctataactacaagcacaacaagcacccagaaattgaaacttaacaatccaaaaacaaagaaagaagaaaagaaatgctagttggtagagttaagaacaagttaactatttgggttttcaagatttgataattcgacccataaattgaaatgctcaattgctttattttccacgtaaaaagat

SEQ ID NO: 378945 - DNA, 4995 bp, Cannabis indica
aaatagcaataaatccaagagtaatgaagctaaaaaaccctgccttaaatctgctcgagagttacccttgcctatacaaaatagcaataaatccaagaataatgaagctaaaactttctgccataaaccagctcaagagttgcccttagctagacaagagaccaataaatccaatagtaatgaacctcagaaactcctccttcaaccagctcgagagttgcccttagctagacaagagtccaataaatccaatagtaatgaacctcagaaactcttccttcaaccagctcgagagtcgcctttggcaatacaacagcacaacaaattcaagagcaacgatgctcaaaagctctgccttaaaccttctcaagagttgattaaaaaaccagaagagttgccattaccttcatgtggaagggaaagcaagaagccccaaactcaaaaactctgcacaaaaccagctcaagagttgcctttggctatacaagagagcaataaacccgagagtaatggagctcagaatctcgaccctaaactacaaaagaggatagaatccaaaagggcctccttgaaaaccagttcatgtgttaaagatgatggtattcaaagctgtgcttatttgtataaaaaattgattgaggatagggttcttccaaagattgaaagagagcattgtgattttgaggacgaatggctaatcgggtcaaagatggaaaagcaggaaaatagacaagaatccatagtacatgaagtaacaaatgctgttgtatcaagttctatgagctgcaatttgtggccaaaagctcattacttacctaaagctgatgtgtttgcattgccttacaaagtgcccttctaatttttgatagttaaatttgagataattttttaattttttatttggtttagtgtcttaaccaaaaaaacagagaaccatatactgaaattttgtaaagtatgaatcacactaatgagaatgagaagagtagcatgattactttatgtgaaatattacataacccaaccaaacaaacaataataaaaaccataaaaatatttcttcaagactcgtatcaattgatatttagcaaataatgaaatatatatgtttctatgtaaaaagaaaaaaaaactctacataatttaaaatgcataaaataattgacacaattaatggataaattttatatggtccctaaataaattgataaaatgaattcatcactcatttgaattgtttatttttaacacaaaagtgttacttcatatgtatccttattatactcaaaaataattgtgcaacaacacatgcgcatgtatcctcatatgactgcaagtagagtaatgaggtctcccttcccttatctagacttgggagtaataagctcaaggccacccatgaatggcctcaatgggggcgggattatgacagacccgtcttcttgctggtaattctcaagcaggcatacaagcattcgcggtacagcacaggctgtcgcatttaacgtgtgaacaaattggggtggagcaaggttactcttcccctttttaggagtgttccctgctgatggctctgagggacgatatcggataccaaggcgacggctttgataatctgtgcaattcgatgcgctcgatatctaatgaaggattggatttcaatttcattagggattaagaaatgatattaacattgtctaaatatgatcagatgagagtagtagaagtagcaatacctcaccgaaccgttctaaaccaggcatccatgcctcgatatcatattttcggtaagcaggagcgcctaaatcaccagaagccatatccaagattctgccaagaaaattcatcaattttgatcaatcagaaacagagcaggataataaaacataacaaattggaaaccacttgattaaaattgctaacttataatgtagtccaagtgacgagaacatgtcttcttcgattctgatgagctcctcaagatacttttcactctcatctggtcggcatatgatgaacatctctgccttactgaactggtgaactcgatacagacccctgaagataagcatagccagttaacaaaaaacagtgcagcgcatcttatttattgaaagcactgtggtgtatagcatgctgagaatttaccttgttgcagcaccagcagcacctgcctcggtacggaagcaatgggagaatgctacatactttaggggtagcaatgattctgaaataatagagtccacatgaattccaccaactggaatctctgcagtgcctatgagacactggtcactaccctcaatagaatagacctattttcaacttgtacatgatcaatacagaggtaaagatatcgaagtaccataaaacttgaagaaaaacaagtgcattgtgcttaatgatacagcaaaatatttgagcttttgctagttaaaaaagttctcttatgggagaaatagatatacctgtgtgtttgttcctcggggttgaaaaccacatttttcaacaacagatgacctaacaagttctggggttgttaaaggtgtaaagccacttttcataacttgtgatagtgtccaattaataagcgccatttctaacatgactgcttcatttttcagataatagaactttgatccactgacctgaaaataaggactttagttatctttatgggactttagttatcatgtcaaactacaatgattaaagattaacaatcatcaacggtaccactgaagcagcatcaaaatcaagaagatcaaggtctttcccgagttgttggtgatcctttacagggaagctaaactctcgcggggaaccaacctaagaaagcgcattgataataagtaggaagggagcagagcaaaacaaaatcaaagacaacttaacataggagaatgatagaagtataccatctttcttatggttgcacaatcttccccacctattggaacatctggatgggtcaaattcggtatacattgagcttcctgctgaagttcgtctgtgagtttaagcaggtcttcttccaagctaagaagctcttctttcagattctttcctgagcaaaaacataaacaaatgacaagtaataatgagaacaaattaaataatcttatatggcgaaaggaaggcactactaatcagtcataccttgttctatcagcttctggcgctctgatggttcaagctttcctttcatcttgtttgccaccacattcctctctccacgcagcctctcaacttcctgctatctgtgagtgacaattagctaaaattgagcatgaaaacccgatttgctaaaaccgaaaaatgtgctccatttaaacaaacaaaacagcctagataagaaactaatgatacttattcaacagtgctgcagaaaatcaagtcaacagtgctacaaaaaaagaagcaataaagaaggataaaccttaaaaaatggaccttttgaagagtaagcattttgtcatacaggtggagtacaagctccaaatttgcattggagtttctgtttcttatgttgacagcgacaacatccttgttatcccttatccatttgaagtcaattgcagctttccattgaggtttcacaactgcattacacaagtgagttgggagtttattcaatcaaagattcaaaattgaagcaaaatccattcatatgatagaaaaagaagagtacccttttcatctgtgggattttgcgttgcttttgtggcttgaacagtggaagttgagaaagctctaatgggtaaagaaaaggaaggtctttgaggactgtaatgtggacagaagaagaaggttttggagagtgacctgaaaacgaagcgagaagaagaagaagaagaagagggaattgcggcaaacttgagagcatttaaggttgttccgcccaaacaacactggaaacccattgattatcgaccctgagtttggaaccactaacccaccactcccctactccccaagatgtatgtaaaaaaattccttaagaaaaaataataataatcaaaataaaaaagaaaaattacgtatgccattaacctagtataaattaggatttttaccccgaactttaacatgtattaaattatgtctactgaacttttttaactgtcgaaaattttccttgaactcttgaaattgttagatttaaggacttttgtctaattttatttaagtttactattttagtgattatttatgcactaaaccatgctccacagactttgatatctaccaaatcataccccttgaattttgacatgtactaatcgttcgcctgaacttttatccttggttagattttttttttttttctaaaattggataaaagtccttaaattcaacagtcttaatagttcaaggaacatttttaacgaccttaaaaaattcaaaggtataatttggtacatgtcaaagttcggggtaaaaatcataattagccaattataaatatcaatcttatatattcttttaattatatatttttactatattagtgttatttatgaatgaaaaatcatatataacattatattgatagaattatattatttttataatattataatcatatattattcttctggtattatgtttttggattggtttcctataaatttcaaggtttttaagttggagtttttataataatattaaattttggataaaaatttataattttattatcatattaattttttttataaaaatactttatttttttataaaacaacattaaaataacaaaatagaataattaaaacaatagtaaaataattaaaaaataagaattatttctcaaatacacaaaaaacaacaaaaaaatagcaaaaatacaatttcacagaatttttaacatttttacgatttttttgattttatttacagaaaatgcagtctttttatgttgtactcttgttaatatgttattggttttttgttatatgtatgttattttttgttgttgtttttatattattt

SEQ ID NO: 378946 - DNA, 1556 bp, Cannabis indica
ttgtattgaattaattcaatagtataatggtacaagagcttatatagtgtgttatgtacaagaagttagttgcaactaactaaccgacttaatgattaactaacattaaagaaataacagatactaagctaaggcaaactctaataagaagtgggagtagttaaaactgtcttgaagtggtatagcccatgggtcgcagacaagaccgttgtgaggttagacttagtcgtagtgggcttcccagcttactttcgtgggctaaccacgtgggtcgatatagatttaaatgagtcttcatgcatttgggcttaccaccccttgtaccgtatcgtaaatttaaatgtctaaagaattgttgtgggttgtacaacccataattaagtgggtttgtatggttaccacgaatattgcaatttaacaaggcctattttagaatttcgacatttggttctcttacaaaaagaactgcttgtacagacaacctagtgtttaccacccatagtttatgggctcattgagttgagccaagatctaactgtaaattttacccttacatggtgcgaccacgatttgaaatattgcaacaaaaaactgcttgtgtagtttggtttgaaaaaaattatcaaaatccacaatattcgcacagcaaacacccctaattggtaacttacttttattatttttaaaaaaaataaataagaagaataagaacgaaaattaatttattaaaataattgcttaatcttttaaaactttcataatgaccccaatttgtcaaaaatataaggataactacattttatgcattctttttttttacctgaagtggactacaaatagaatttatctcccatgaactattactactttcaaatttccgcttgttaaatatccccacaactatttctaatagtgaattataatccatttgtcgacagtcttacgtggctagcaaaaaattgaattggcactataatgtaagatctaaaactaaagttttgttttttttttttgagatagatctaaaactaaagttaagagggcatacttttttttattgtgagaataaaaacgtaaattaaatattaaaagtaaaaatacttttattaggatttgaactcttacttctatagttttgtaaaataacttaatcaacatgctaaagttaaagctattattatgtttatagttattacttttatttataaatatatgttgtaaccaatgtttaaaattacgtttttgaggcgcgcctcattgcgcacaatagattgaggcagaagaatactactttattgtgtgcgccttagctgggagaagagaagcgtacacctcagctatgtgaggcggttagatatggcatgaggcggtacaaatagtgaggcgtacgcctcaattaaaaaactttagagttttatttaagggacaaaaacataaaaacaacaaaaaaaattacaaaaatacggtttcacggaattttaaacatttttacgattttttgattttatttacagaaaatacggtctttttatgttgtaattttgttaatttgttgt

SEQ ID NO: 378947 - DNA, 9784 bp, Cannabis indica
cttaggttcgatggcctaatctctctctcttttcctttggagaagacatagatttcagaatttttggtggttggatctcaatttggcaaattctataattcaacccaaaaaaccctaattttcgaagtattattattatttatttattgattttgatctgatcgggatctgagtatggcttcggcgaagacagctcggtctagaggtactccggtgaaagagaacggtgctaagttggaagaaggtcttaatttcttcaagtctgataaatttgatgcccagaactacgttcaatcacgatgctctcttaacgagaaggtatttttgagaaaattgaatacttgatgataatttgttgtgtactcaatttgcttagtttgagtgagatgacatttacaattttaggtttaattttgtattgaatggaatgtttgattgctttattgctatgtgaattgtccattttgagtttaatggcttgtttcttatgctttatttatgattctgtattgtgggcagcttttgattttattgtttggttgaaaagttaggagtttttctattgactcaattaaagtaatgtttttagctaaattctgtttttgttgataagagaatttgattgatacttttagaggacattagatagaagatattaaagggaagagaatgaaataagagatggatttgtaggatcatacataagaataagatgctaaattatatttaaaacgaaacattttgagaatttttccttcctagacttgagcaggaactggagtttgttgatgtaaaaagaactaattttctagtttgtttggttctgtgattttactattttctatcttgtaccagattttgtttaccaaggtattcctccgccacaagtgagagagtctaagacaagtggtccctttctctctttttttttattttttcacgtctgatttagactaatcagtgcttgaaagctaacattttgtttcttcattatatttgtattgttcatctgttaattaagattatgcattttattgtttcttgaagatggttactttaatcttgagtgacagttattgctgatattactgcaactattctataattgctagacattcatgtctgacttgataccaaataaaatcaatttgttagctctttgtttaatgcatacataaaaacaagtttcttggtatgcattttttattttcttacaggaaataaaacatctatgttcatatcttttggatttgaagaaagcttctgctgaggaaatgcgtaaaagtgtttatgctaattatacagctttcattcggtaagttacaatctatttacttcatattactgcatttcatattgacctgtctaaagacaatcatcatacccaaaaaaaactgaagctttttttctagtttctgtctgtttggtactatttgatgcaaagtaaaccctattttttagctgacaaatcttgttatcatttgatgaagaagaacagaaacatttgtctttcctcaaacttgaaataaatttctagcctttgggaaacagagaatggaacaaaattatgtagttaatgttataccgtcatgactttattttcttttatatacttaatatttcagattgtaagtagtctttacttattacttacaggacctctaaagagatttcagatttagagggggagctttcttctatccgcaaactgatgtctacccaaactgctttaattcatggtttagcagaaggagttaacattgattcattaactaaaactgctcctgatggttcatttgcgaattctccatcggcttttgaagataaagaaccttcggatctggagaaatggttagtagagttccctgatctcttagacgttttgctagctgagaggagaatagatgaagccttggctttgcttgatgaaggagagcgtgtagtttccgaagaaaaagaaaccaagaaactgagtcctgctatgctctcgtctcttcagacttctataatagagcacaggcaaaagttggctgatcagcttgccgaagctgcttgccagccttctacacgtggtagtgagcttcgtgctgctatttcagctcttaaaaagcttggggatggccctcgtgctcatacattgttaatgaacgcacacctccaaagatataaatataatatgcaaagccttcgtccttcaagcacttcatatggaggagcatatactgctgccctatcacagctagtattttccgctattgctcaagctgctagtgattccatagccattttcggcggggaaccggcatatacttctgaacttgtgatgtgggctacaaagcaaaccgaagcctttgctcttcttgttaaaagacacgcgttagcttcgtcagctgctgctgggggtttaagagctgcagcggaatgtgttcaaatagcattaggtcattgttccttgttggaggctcgtggtttggcactttgtcctgtgctcttgaaactttttagacctagtgttgaacaggcactaaatgccaatttgaaaagaattgaagaaagcactgctgccttggcagctgctgatgattggatactcacataccctccggtaacaacacgtcagtctggcagactatcaagtacaggtgctggtaatacgctagcatttcaacataaactcacaagtagcgctcaccggttcaatttgatggttcaggtgaacaattttatcctttttgcaacaatattaatctgcatgtgtatatatatatatatgtttttgtctctctatgggctgattttctgtttcgaaaaaataactacttacagactataatgaaatattgtttccaagatattggccttagaatttctgcaagctaacattttgtgagcagtcagcgctgttcatttaccaaattgatgatgctagaatgatctttttctactctcttttatgtcagtgtctagaacattagtcatctaagaatggcagtatgcaaagttaatgctgtattagtaagattttgttatttatatgttcttaccctttgagtgagcttgttcggaatcatctttcttgttttgtttttcccattcaaaattcttgcgtttgggacagggctgttggagataaagaggcatactttataaaaggcttaggcatttataaaggcttaggaatcattaattgatgttttcttttgatctatatttgttggatctgttagattgagtgagcttgttcagaatcctctttattgttttgttttttccattcaaagttcatgatcgggacaggactgttggatctgttaatgtcagtttctcttttctgggtattctcaaggcatacattattttacatccattgctctttcaggacttttttgaagacgtgggaccgttactaagtatgcaattgggaggtcaaacattggaaggtttgtttcaagtgttcaacacatacatgagtatgctcataaaagccttacctggttcgatggaggaagaagcagactacgagggttctggaaacaaaattgttagaatggctgagtcggaggctcaacaaattgcattgcttgcaaatgcttcgttattagcagatgaattacttccacgtgcagccatgaagttgtctcctttgaatcagggtaataattatgatgatccacgtagaagatcttcagataggcataatcgtcatcccgaacagagagaatggaagaaacggcttgctggctcagttgatagactaaaagatactttttgtcgacagcacgctctcgatctcatatttacggaagatggtgaaagccatcttacagcagatatgtacataaacatggatggaaatgtagatgagatagattggtttccatcgtttatattccaggttaatatgcaaactgtttaattactttttccctcgtttatttccgtttcgagtctgattttccatttttttttcgtgtttgattcaaatcaggaacttttcttaaagctgaacagaatggctaccttagcagcagatatgtttgtaggcagagaaagatttgctacattgctattaatgagattaaccgaaacggtcatcttgtggctctcagatgaccaaagcttttgggatgacattgaggatggaccaaggccccttggtcctcttggcctgcaacaggtgtgtattctttttccgaaaaaaaatcttatttttgttttgttaatgaatttaagctgtctatccaaaaccgagttatgacaactaacgtttcacacaattgaagcattaaaaaaatagttttaacaactttagaaaggtacccattttccttatggtgatatctaggagaaagagaatcgaacgatagtaaggtcattgtaagtaacgaaaaacgcaggcaattctgattaaagttttgacttttttgtatcggtttgcagttctatttggatatgaagtttgttatctgctttgcttcacaaggccgatttttgtctcgaattctgaatcgagttgtgggtgagatcatatcaaaagcaatggcagcatttgtctcaacagggatggatcccaataagtaggttaccccttaccattatgtttcattataaacatcattatacatatcatatttgcattcttacatatcttataaaacttataaaaactccaaacagtgtgctaccggaagatgagtggttcaacgaagtatgccaagacgcaatagaaagactgagcggaaaaccgaaaggcatcaatggagaacgcgaactgaacagccctacagcatctgtatcagctcaatcgatctcgtctgttagatctcatggaagttcatgagggctacaatttccattgtaaattaaaaagaaatcacattattttgttggcaaaatccttgtaatcatcatcatcatcattagtaaggaatttctccactatttttggtcatcttttattattgtcttactctctcttttgattcttttttgagatattattgtccaaggtttgaaaattgcagttctatggttacaaattatatttattcttttatgagtgaagattgaagtgagtttttatatgttaattatttcattattagatcttgattccaatccaagtttgtacaattcaatagcatggacttgaaaatgtattgtaaacaattctcaatttgctaaattcagctcttaaaatgagctgagcatagtcaagagtacatttataaggtggtgaatttagtcttgtgaatttttcatacactttcccattctaagctatactagaaaaaaaaaagaactacaatttgttaccttcacagcttcactatcgtctttcggtttgttggtgcaagattgtaagcttttagtatttatcttaaagttcgttaagatttattttgttaagcgtttggtaaataaaattgtttattgtcttgttcgtaactcttgtttctatctagttcgtgagttgatattttcacttttgttgtcacttttttttgtcaaccaaactcatgttgaggtaacttggaatggaattgaggataatttatcaattgaagatatataaatcttacaaatagaacaacctagtacaacaaacctatgatgggacaatccttaatctttatccaacttattgggcttagagtccttttggagattagggcaccaaacatgcgcttagcttgcttatgcctaaagtcaaccttacttatactaaaatgtaacatataaattttacaaaattagacttcaatgtctattgaattagcttgttaagttgtgaattaagacgaggattaacatctaataattgcttaacaacatctctcattgttggtcttttctttggatcatccacagtacatctcaaggccacttgaagaacttcaataatttgttctttaacagtcaacttagacagttctctttcaagacttaaatcaactatctcattgatttcagctcctttgctccataaccacctaacccaactcacaatatcagtttcctccataaatgaagtatccacagcttgttttctagttatcaactcgagcaaaactactccataactgtacacatctgcttctgtgctcctagttgttgcaaatgcattttctatcaaaaataagataattagctaataatcaaaatatcatctctagcttgtatggaactagagcaaaatttaaaaatgatccttttattttaaaataattcaaattaaaaatggccataagtgaaaaactgtaataaaaatccatataaatgtagaaatttatcttttgaaaggttttaaaagattatacctggtgcaatgaatccggtggtaccaactattgcactagatgacattgaagaagactcatctagaagtttggcaataccgaaatcagcgatatgaggttccatctcaaaatccaagagtatgttcttcggtttgatgtctctatgaactattgtaggatcacaatcaaaatgtagataggccaatccatgtgcaattccaagtgctatcttatatcgaatactccactctagaattggtggtggattcatttcatgtagaatatcatgaaggctaccattttccatgtaattgtacaagattaaaccatagtcttttctcaaccaaaaatctttcaacttaaccaaatttcgatgcttgatcttcccaagtgtttcgatttctctaatcataccgatttgtccttctttgttccccacattcacaagtttctttacagcaaaaacttcattaggacttaatgtggctttgtaaacaattccatgagatccttcccctatgacataccgatcactaaaattctctgttgcttccaccactttttcgagcaaggaagatggcccttcctctaaagagaagctcatttcccgtttcgatcttctagaaaagaaaatcacacaaaccaacccgaaaataacaagaacaagtgttccaagtatgatcatagcaaatcttaatcttcttgagacatttcttttgcttggtgcatagtcacaaggctttaacatgttgtctttactacatggtaagtagaggctaggattaccctgaaccaatgtggatgagtacaacaatttcaatagtgtttttggtacaacaccattgaaatcattgtatgagatattgatctccaacaatgttgttatgttgccaagagttgctaagcttcctatcaagttgttgtgagaaatatccaacttttctagcttgatttttcccatttctgatggaatcttcccaatcaatccattattgctgaggtttagcaaataaaatggattctcaaattctccaattgatgttggaatctctccaccaagaagattgccaccaagttccaacactgagagcttttcaaactcgaacaagaagcttggaacacccccggtgaagcggttttcactcaagattaaagtggttaaacatgtcaagcttgttaaactcgagggaattaaaccgttcaaggaattgaaaccaacatcaaacacacctatttgggtgcaatttgatagttgagatggcaaagaaccaactaagttgttgtgagaaagaatcaaactttgaagatgcgcgagtttaccaagctctgagggaatgaatcctgttaacttgttccatgacaagttaaccaatgttatgttggaacaatttcccaagcttggtggaatttctccaccaagcttgttcgcgctgatgtccatgtatgaaagcctcgagttttctacaaactcgggaagaaccctagtgagcttgttgtgtttgagaatcaatctctctaaagttgaacatcttcccaattgtgaaggtatgttaccttcaagttggttaaaacccaacaaaagcttcttcaatttctttccatagcaaagatttggagggatttcaccactgaagttgttactagtaaagtctaattgcaacaacttgctgttcactcccaaattttgaggcaaactaccaaagaattggttgttatacaatgaaacattttgtagtttccttaactcactcatctccaaaggtaactcaccactaagactattgttatacacaagtatttgctgaagactctgaatcttccatacactaaccggtatttccccgctcaaacgattttcaaacaattcgaggtcttgtaactcggttaagaaccccaactcattgggaatttccccaacaagttggttttgatacaattgaatcattttcaatgacttacaatttccaagctcagatggtattttcccacttaattgattctcagctaagtaaagctcttctaacttaactaatttcccaaatgaagatggaatattcccaactagattattatgaacaactgaaaattgtgtcaaactagtgcaatttcccaaacttggaggaatctcactacttaaactattcaatgacaagtcaacataactcaaattcttgcagttacttaatccccaaggaattctaccctcaagaaaattattggcaacattcaaatcagtaaggctactaagtttgctaaagctctcaggtaaaactcctgtcaattggttgttttgaagataaactatttgtaatttactcaagtttcctatactcgaaggaatcgccccgaatagcttattgttttctaagaacaacactacaagatttgtcatgatcccaacatttgaagggattgaaccacttaagttgttaaggcctaaatacacttcttctatggttggaatttggaacaaagatttaggtattttcccatatagagaattgttatacaagtcaaggactcttaggttttgcaagtgctttaggctaattggtatcactccattgagtttgttatgagctaaaagtaaattctctagaagagtacaatatcccaattcttgtgggattgagccatataagtagtttgaactcaattcaagagtcttcaaacttcttaattggcctatttcaggtccaatatggcctgaaattccatagctagagaggcttaaggttttgacatggtgagtattgtcacattcaattcctagccatgaacaaggagtggaatcagaatgattccagctcgaaatcaaggaagagggagcggaatcccatttttcgaggagtgaaaggagagccactccatcagagctcaaagcaaaaactttgtgcatagaaaaagaatagcataataacatatacaacaagaaactagacaaaccaaactccatacttagaacaagaattttagtgaaaaaagaaatgggatttatggaatcttacctattcaaagcttggatggaagaaaaaggaaaagaacatcaaaaacttcatggaagtttattaagccattgaaacaaagtatggagtgtatagtagtaaatggtgttaagtaatcattgaaacaaagtatggagtgtatagtagtaaatggtgttaagtagtgctttgtttggtgctagagaatgataatgcattaatccttatatacaacatttgcaagccataccaaacatagctttttctttaacttttggtagaatcaaaagtatgttttggggccaaaatgacctcttaaaaataataattgaggcaatgcttttgtttttttttgaatgaactttaatgacttgacaaaccatactcataaattcttaaataataggacatttttttgttcaacgagaagttatattctttattttttttttattttggggattattttacaaatacataaaaataacaaaaaaatatata

SEQ ID NO: 378948 - DNA, 12140 bp, Cannabis indica
catcttgagttttattcaatatattcttaaattttagtttattcacacaacatgttgcttcaaagttcaaactacatttaaaggaataaatggcagcacatgtcttgcatgtggcactcccactaatttatatagaatgggccatatcaaccatacttgttgttgaacccaaatttgacatgattgtttgtcaacttactctcaaaataaacaatctcaacacaacctttaaaaaaaggatgtacatactacattacctttttggtttttggtttgggttgaaattataactccaattttgcacggtaattgcattgcattgtttttttttcttacactcgcaacaaaatttttaaactctgattttgtcaccttaataactgtaacaattaccgttgtatatataagaactaataataattgtgattatagtttctctatgagctaaagcaaaagataaatgcacaaatgcatttttttttttacatctagcttaattttacgttatatagcttcacactaaacataacatttatccaattattaaaaccctaaaccaacaactaatttatcaattattttccgcttaaaattttatatgcatgaaaattaattggagagaaacaaagcatggcctagaaattacgtagcatttgattgtaagattacctgaacaaatgtataaaaccgtggagaagggaagggaagaaaaaaactgcatattcacttatggaatttacaaggcagctgctttcaacatgtagcagcaacctactaggaatttacatttctgaccctcaatcccccacacacaaaagcacttaggtaaaaaatggaatacaaatcaaaaagggggaaaaaaattaaaatcggagacaaattggataaaatgagaaaacacaatcaaacccctcttaattctccttcctatacccaagccttttagctcctttaggaagatggaagccaactctaattaaccagtatgacctcacagttactcaagctccaatctagagaaaaccctttcatttacataaagattgtttcaacaggtcagtgggccaagtcctcacttccaacgccaacactagacttgtccatcgtgcgaacgttgtattgctcataaactctggtgcggttctctgcccaccattgctctgcttgtttttcactaaatcgttttcgactgcattttgaagataaaattgagttaagcgataagaaaaattagttcttgttctgggttgcatgttttaagtaaaaatgatacatttcagattatacattgacttgtgaggactaaactaattgagactgacttcacgagctaacataaccaagaaattcaattttagttaagattagatgtaaaaccgaatggatcattaaagtttcaaaatgagatttttaaccataaatttactttgcttgaatagctcagcatgatttccttaaatgttttataggatcatcagcactgtcaactaataacatgcagacgtgttttataagatatctatcatgacggtggaaaaatcccaacaattacatacctgaagcggacacgcttgagatccttggcacctcctggaagagaggtaagtgtaatgtaaacacccgcttcatcttgctcaacccattcattatcattacgagattcactatcttttgttcggctcccatttctagatgctacatctgaatggccttgtttattatgacctgaacttctattactgttggtagtggacccattacaattcaatgggacatttgttccattcgactctgaatcttgggataatatttgaccacttaatctttctactgaaggattagaaatatcactaaaaacatgatcggagcccagagaagtgagagaaggtgatttagtgttacgggatgctccaacaggaagtttttcagccatctcctttaactgttaccatacaagaaatttaatgcatcataagcaaaatattatcatgaaatatctaccaatttaacaacatcaaaatagaaataagatccatgtgacatagttatgcaagtacattataattaataaatgttatccaccacagataattgaaggacgtagctcattgaatagaatgactgaatactaaataaaacaagattccaaatgaaacaagactctccccctgataaactagataaaacacattcatattcacataaaaccaaactgctcaaaaaatggatgagtgtagttatgcacacaaatacgaaatatccatcttacttgggctgtaagtgacttgatgacttcctttgctgccttacacttggctgcctcttcccctgcactttctcttgcttccttgagcagtttagttgttctttccagctcaacttcttgaagttgtgccttccgtgtaagactttcaacctaagatagatatcaaaaaaagcaaaataacattaacggatcaagtgaatccacaagcagactcgtaaatgaataagaagatcagtgcatatactcctaactaaaagtacatctacaattgctacttgaggttgggtcaagaggctgggtgtgagtgtgtgcaggcagtggggttggtggaggttctttgcttgccctaaaacattgtcatactaaacataatgtgcatatattactcttcccaagagtttgtactacgaaacttatgggagtttcaaacagtctaaagcatagaacatttcatctagtcactcaaagctgaaaaatcaaagggatggctcttttccgtgaaaattatgagatgttatatgaagttcacataccaatcagtgagataaagattgtaaaagagggagagaaaaagaatgctaacactactctattctgagtatgagagattatcatcgctactacatctcctatctttgagaaattatcatagctgcctcaatcttctataattatttcttcaaagcatatctcctagatgaaaaagcttggccctttcacaaaaagggtttgggtagaatcagtagtacaggttttttaaactttctacataaagtccacactccttactacctttttaaagatctatacatttagcaaagataaagcaaatgtataaattttaagagaacatggaaactgtaaagctaagtattaacttgtctaaaatcatgctacctgtgttcttagtttcttaacctcctggctgaggctctcgtttgttcttttggcatcatctacaacaatctttggtgatgtaagtcctccaagagttggagttggtgttgtagaacgagggggctgggccgccttgaaattggagatgttgctcgagaaacaattcttgatccgggaacagaagctgagaagaacttcttggatgacccaaaaactggattaaaagacttggaaatattaagagctccccattgtgaacttccatttggaataggtgagacccgactgctattaaattccagtttcttgttcttctttgaagaccgagtttccacttgcttcaaggattccatagaagaaaacctagcaagttgtgttcgagatcttgaatccaacctctcatctttatcaatgaactcatttgacccctgattgatactacctcttctgctcacagaagactgagatgaagcatcagtttcaatattttttcttagtttgttaaaacaactatcacaaacacgatatggtttgttggggtttggtgccatggaagccttaagagacttcttactgctgcatgaatggcagaaaacaagtccacaattataacaattatggcgttttcttttgaaattaaacggtagacggcaaccagaacacatagactgatcgattcctgacacccacttatgaagacaaatagctgcagtaaaattagtgccacaagcaatgcttctaacttgcttgtctttcaaggcttcaactaaggtaggtgaatttcgatcatctatgtccccatgacctaaacgaccatttgctccctttccccaagtgtaaacttcagttcttgaagtcaaaacagcaacatgataagcaccacaagctatttcatctacaaaactcttggaaagtttaccttctacacgggttggaagctttccatcagcttgaggatttcccaactggccacaaaatggactgcccatcgtatagacatggcctgatgttgtaagcgcaactgtcaaactatgtccacaggcaactcgacaaaaatttggttcaacaagagcagcaacacaagtaggcacaagccttgcttccttgtcgccatgaccaagacgacctttatcaccatctccccaagtgaacagctttcctgaagaacagttactagaacttgagtttccaaccatgacttccacaacggcagcagtatgccaaacaccacaagccgctcgcacagtacggagccccttcagggactccacttctctgggtaaagatacactcatcctatctccatggcccaaaacaccaaaagttccatcaccaaaagtgaacaattgtccagcagatgtcacaacagcagtgtgccagggtccgcaagagatagacgacacatgaatgccttccaaaggaccgttaactctttttggcatccaatgactcacttcatttccatggccaagaagaccaaaattgtaagtaccatccccccacgtgtacaaatcaccagaaagagttacagcacatgtgtgatactcaccacaagctacaagctcaatgtttgtattacttaaggcatcaataagttttgggtaaaatacatcagaatctacaccatggccaagcctgcctccagattcctcaccccaggagaaaacttcaccttgctttgtaaccaaagaagcatgtcttccaccacatgcgatgtgatgaacatcaaggactactgcagattctaaggctttgggcaaaaacgaatccatttttcctgcaaaagtatttccaactctatgcatcccaccacccaaaacaccatcccctgtgccctccccccaaatgaaaacgtctcccaaggcatcaccatcatcatgaccagaaccttggcttgatgaactaacagcacttgatagactgactctaaaagcatccatctgcattgccttcatatgaccatgcacactatctgagcctcctgaagacaaagaatggactgaagcacttgcagaatcagaagggaagaaacccttgggaggaacagcaaattgtatcacatctgataatgccttatccagaccattttttggaggactttcatatggactatggaggcgaaggtgatctgaaccatcctggattagatagacagaaaagttagattaacaatcttttttgttttgaccagaagttacttcatttaataggcaaacaaaacacagtcaattgagtacccttgcaaagcaaaacaagaccaagctcaaaacctaataataaaaggaggacctaaactagaagaaagggggcctccataacacataattgtggtacatttaactaagtcacagactgcatatttagctcaaaggaaaacagggaaaagatctttcaccttctgtaagctatcattactaccgaagggagagtgcaaaggagaactcctcctcgtgtatgttctaggtttatttgcctctgatgggattccatcactcctaaactcatttctccattttcgatgatgaccacgggatatcaatgcttttaaaccactaaaccatacttcagcttcatctttatctttgcaaatctagaagaatgataacaagagaatacagtaaagtttaagatgagttatctaaaaactaaaaccatacagcagtaatcaggtcagataagaacacatttattaccaagtccagtgatctatcattatagataagagaaaatgactgatactccttctccggccgtggatacctttgaaagattggctggaaaaggtgtagacagattaaattaaattactaccaaacaaaaaaaaatcatcattcataagaagttgacatctgttaagggaagaatgaaattgtgacaatgtaacacctgtacaagcacatgctaaaagataagaaaagtatgcatacaaacatgattgctaaacacccaactacacaagccacaatatctgattagagcagctactagattgatgagagagcaaatgttgcaaacctagaaaaatagaagtgtccaaccaactcattgggcatattaaagatcttactcaaattagcattttgtatctgtcctcacctttctcagtacaaaatgatcatggttggtcaagtttccaaattttatcagatttcatatttaatggatgaacacaatagctaagcaatctgtatcacatactacaatgtagaggtgtaaagaagtttggtaacaggtcaccaacttctgttatttactagtacaatgaatgtcaatcttcatcctcatccacaaccataccaattcatttagaaataacagagaagaaccagatgctgttagcatccacaagtagacaaacctaaacaaaggattagaaaatgaagaaagatttgaagaataaaacatgtatccgataataacaaccagggtgtatttcaaatgtttctaccaattttaaagtatctgctatttttagagaggagaatataaataagaaaagactccaacattcataaattttgttgaaaacacattacttaataatgtagagataatcaaagcatatatatgaacaaatctctcctctttaagttactatcacccaagaaagacacttacggtgcgttgccctgatataattctagaaacaatggctcagtttaagatgtttctcctccttcccagagaaccatattaaaacagactcatcctgaaagcaacaaaccccaaaaataagaattacaagttttagtggaacaatgtataaaatcttgctctgcaactaaccacaatagacataattgcacacaaatttaatacagggtaaaatagcatgtcattgagctcaatagttattttcaaagtcatgatgtatttgtcctcaaattgtgtacgctctggcttttcatgtgctgaagtcagggtaatcaaatatcacgaatattggatagtattatgggaatagcaaaagactacaaatagaaacattttcacgtgtgtattgaggatgataattatcatttgaaatgaaatataattacaaacataatatgattataaactaatagaaatagtttataacaatatcctacgcatttttaagaaattctaaataatttatgtaccgaaatagggctcaaattgtttgttgcacatgtatccgtcatttttaacagtaaatgtttgaatcctgattttggcacaataaattcttcaaaaaaaaaaaaattggaaaaggtgcggaatatctattataatttatgtacacattcatatacaaagttgggattataactatcatggagcaaaaaatgaggggatgcaccagtagtgccattttcagaggaactactaaagaattttccaaaaatatataaaatagaggacctatatcagccaacctacataacatataacatacaatattaagtttgaaaatatctcataaacatatctttgaaaagagatccactgtaatatcacgtttttttttaatgttcaaatgtatattattttattgcatgagaagaaacagtaaaaaacatatatccaggatatataatggacacagtaaaattaacaaaatcatccaaacatttcttaatattttggagaaattttgaaggaaataattttacaccataataataattataataataaattatttttccttacatgagcaatatatcaatccattataccaatattttaattcgagcgatttgaggattatgacatttgtaatcttcttcggtggaagtgtaacctaggaagatgcatttgtggaatcaaagaacacacttagtacgatgaagacctagcttatgagcatagttccataggaggtacattcaaatgttttttagtagatttgagaaaagatgagtattatgataagaatgaagaagagagacaaggtgatgctttaatactcaaaaggcattcagctaataagatatgtcgcaattaggataactgcccccaggattgctttggaacataagttataaaaataaaggaccaggctacttcaaagtgtcaattttcccttagcattatggacgctgatcaaatgagataagtaacgatcattaatgggttcgaccaatcttagcttcctccaagtaacgatcattgaatttccaaaatcccatttggaataggcaaacactactgggaaaggcatcagtgaagtattacgggcatacttttccatgtagatacaaggtcattaaccgtgaccaatataggaaattaaggccatttagattgtgaatggtgatttgaagagaaggaatatcaatggataaagatgctgaaatagtgttgaaagagtatgagaaatagaagagttgtctactttggtggtttgttcactacttttggccattgttaaggaatgaagaaaaggattctccagctatgggttaaattaggaaaagtgctcatgcctatcagtaggccattctacaacacatctctgtagaggaaaaataagaactatctaaacctagacttaaggaatctaactaagaaacaagaagtaagaaattaaatttaaataataaaacagatttagttattttctttggaagatatttccgaaaatttaaattattaaaatacatatcttccaacacaaatcatagttgcaagaagagtcgttattgtattcgaggatacctatctcttctttctgatattcaaaataaaggcttgtttctatcaaataacaaatagcaaatagtaataatgactaaccaggggaaacaactcacgtatatacttactgctggaagaaaaaagaacgtaataaaacataacaaagaaaagttcagaaacatgatagcatttgaagtagaacatcaagaataaacttacattagaaagacgaaagggacaaaacttgggtttccctcttctcccatacttgagcaagcatgctcctttcttcaaggcagtaatggcctgtcgtatagaaaatcacattcgtaatttatgcatattcatcatttttgcacatggagaagaaactagaagcaaacatattagtgacgactaacgaagtaataatgacaatagcaagttatttgtactgcaaattaaatacaaatagtcaagatcactatgaaaacaaagagtattgcggagtattaccatgggcaagagctacaagagattcaacatattagaattattacatttaaatgttataccataaactttggctatttcttactcgttaaatgtctttttactattattatttgagctatttttgtggcaatactattgtataattggaacaaatttcctcttactcagtcttgtatcctgattaatgaaaactccatttggtgaaacaataacccataataggaaatcattttgattaaatatacaggtaggtagggagctatacaatatcactgatatcagattcctgaacaatcatgcatgagaaatataatttttaccaaataacgaaggcacaaaagtcagcacaaattaaaagaacaaaggtttaatatctaagagtggcctagcatcaagtattttcaggctcttgcaataacttaatctgtgtcaccgcactccctaataaacaaagaatcacaatttaattcttcaaacttaacatatcacagaaagcaatatagctaaccgccctagatggcaaccaaaggatagaatttatgtcaccagaatcaacaaaagttacatttggaaaagcgaaatgaccaattaaattgaggtttacagtatcttcttcactgatttaaacgatttctataatgtaaaatatcaagctaccgacatttgcatccaaacaggcaaagaacaaaaacaatccgtaaatgaatatgaatattacctgctcaatatccctctcaacgggaccagtcctgctaagatccgaagccattctatccgtccgcgacattacgcgataaagcgtgtttttcagtgaaaataaaaccctaaatctaaaaccgaatttgggaaagagacatgctcaatgccgaacaccgccatttaatcatcaatcactagctgaaactccaactcaaaccctgaattggcacacgcaaacggtccccaatcgtcaaaaacgcccgaatcagccaacataaccactcgtttcggactcgaattcgcccagctacagcttccaaaactgttctaacactgtaaagccgaaaaagacttcgaatcgctgaatgaaaaaggtaaagcctagtgcggctaaactgaagaaagaaaggaaaaaaaaaatatggaaaaaccctgagctgaacgatcagtgaggcttccgaactgcgaaaatttcaaaagtggaagcgaaagagatgagattgagtgagtccactgattccgataattccggaaagcaagcacaaaatcgttgagttgttgagtcgccgagttaccgagtcactgagctcgagagcgagaatctgggcaagaaagtacgtgaaaaggtgggaaaatctaggaaaactatgatctgattatcagttgcagaagagagagagagaaagagaggtattttttttccacctagagagtggtggaatttttttaatttttgtttttattgttattgtaaagagaaagaaagaaagaaagaaataaagcaaaaataaatggattttaataaaaaaaaacaattataaataataaataataatattaataataaatggttgtatcttcgtcgtttatggctgcgagctgaaaataaaaatataaaaggaaagcaaaagagaagaggaaaaggataatggccgtcgttttacgtttaatttccatattgacacttctcttttaaacccataataattcttcttcttcttcttcttcttctcccacttacatatttgctgtccattttctttttctttttctttttctttttcttttgtgtcctgtcagtgtcagcttcttaacaaaaattggaagaaaaaaaaataattagtttgataatgactttttatttatttatttatttattattaatttatggttagttttaattttaattttatccaggtgatttaagttgtatgaatcagtatcacactcaaaaaaaaaattatgaatcgaccattggctccatatttctttccttaaaaagaaggattgaattcatatttttttcctctcaaaacgaccttatttccttccttttcattaattagattcaatttttatttttaattcaattttagttattcccaaaaaaaaaaattacttcatattctattttttaacttttttttttaatttacggtttgaatttttaaagtagttgcagcactagttgcaataggagtttctatacgaattatatacaatttagattgcagcgctggttgcaataggaatttctatgtacaattctgtaaaaataaaaaaaataaaaaaataaaaaaaacatattcacaaaataattaatttaaacttattgtacaatctaattgaatttctaaagtgcactatatgtaaaaatattcaaaataaatggtggctagttaaggcccttattaaagcttaatgaagagagtaattgtccctcaatagtaaagtgatgaagtattggcctttgacgcctaggtcacaagggacgtcgtggtggtcattgtttagcttgaacaggtttagaatgctccaaagtacctcattattctcgaatatccatgaattttaatgaatttctccaattattttccaatgaactaggaccttaattcatggataggttttattgctaggttttgatagatttattgctcttgatattcttgaataggttttattagggctgaacattttgaacgggtttgacccgaacccgagcaacccgcccgaacccgaactagtgaacccgcaaaaaatttttttaaaaaaagtttcgggcgggttgggttcaacccggtacccttcgggtgggttggcgggttgagattttagg

SEQ ID NO: 378949 - DNA, 2515 bp, Cannabis indica
ttgatataatcaaaaatcaagtcttatatttttaatttagtaacggtcatagaatatcattcaatatttacaaggcaatacttgatggtcaaactatgtgttaaatttttttttaatatgtaatactattcacttaaatgtagacaaaaactcaaatgtttcacgatcatattaaccaaactaaaaaacatggttacaccaagaaaaacatatctagaatccacaaatattacatatatggggtgtgaaaataattcacaaaactaaaaaacaatgaattaagaattatttacttttctcttcttttttctttattatcttttcttatatataaataacatggttatcttaagccaaaagccaaaagttcttgtgacgcttggtggtgattaagtatcctccttgcttcttgtgctttctcctcacagcaatggtcatgcatgaagcattttctatgcaatactccactacatctcctcgaaccccatttcttgaccatctcctcattatgctccaccatatcgacctctttctcttttgacctaacactagtaatgacacactttgtctttttgcttcttccactattgctgctcctctttctttcccttgtagcatttctatcaccactttaacctattatttttcaacacaaaaccagcttaatttgattatttaattgttttacattatcaatctaacatatatacgtatatggatatgaatatacacttataattattgatttgtttaatattataaattctgtttttggcacttgttgttcatatctagttggcattaataactataacgattggatttattaattttatctatgcatttatttacaaatccaagcatattatgtagttgacttatcttagctagagagtacaattgtgttgttatatatccattaagtcattttctaaacacttcaatagaattaattaaatataaaattctaatggtttctagttattaaaaaaaacaaacaaacaaacatatttaatagtatactcagtacacataaattaattaaaggaaaaagtcatgtccacttgacttaccccaggctttttcttttcacaagtatttttcatagagtgaagaacttcagtggccctcagattatttactttcccacttaagtctacaaaaaacaaaagaatttataattaattaaaacatttacgtaagcttatgaaaatgaaaaacggtatgagatcaattagtaaaatatatatgattcatttaaccttgtttagaaggcttggtggcatgaagaagaacgacagtatcttggctctgaacagtgtgtgatagagcccaatcgagagctcctttggcttcaagacttgaatcaacgacaatcattatcttgttccccattgactgatcagccccattattaccagtactgatcttctcatcttcatcatcatctcttgctaaagttcctgtatgagtagctatgttattattactgttttggctcaaaaattctgccttctgaccaaccgatccaaacgaattggatctgggttttgaccgaatacactgaagggaatgaacccggaaacaaccactacttctgggccggcctccaaagcaaagtctcacatatttcttccccattttctcttaaaaaatttcttggtgtgcctagctaactagcttgctgggtatgtgtataatagtttgccttgtattggcaacgatcgttctctttgtgttggactcaaaagtctgaatttcttctttcaaagtcatcatcgctctgaatcttatgtaatatatatagaaatattacatacaataaggtacaaatgaaataatatagtcttacaaattacaagtgtttttgttttcttgtagtattttctatgtggtggggcactttgttgaacgtgcttcccatagtatatatatatgtgtgtgtatacgtgtcattgtaagcttgacacagtttgcacgcatttcatacaggcagttgggttgagacccttaattattcaaatatgcatttttcaatggaaatgagttattagtttatgtcgtattgcagcctgtcattttataaaaaattgcacgtctgtctttggcttggtctgccgattgggcttttcttcgcatagttttttatgaatggaaaaataaataaataaatttaaagacaaccaaatcatcaaagttgacctttatcttttataaataaatccaatcattattgtaatttattatatgtgaaaatatattaaataatccttacgattaaatttttagataaatatgattttctacacagagtcttcttactagatatcgcacgatctattgaactagttgagcggatttctctaccaaaatatacatatttcatcatcatataaagaaatttttttgtcttttggtaatttttttagattatttacacaaaatttcctattttttttacattttaaaaatattgtgtttttttttaaaaaaaatagtgtataagttttatatt

SEQ ID NO: 378950 - DNA, 4372 bp, Cannabis indica
ccagatacttcagcatttcttagactcaagatttagattgaaaacgaaattgtgaaatgcagctcaatgagccactgctgtattcatttcattaaatagccaaaaggcaaaagttacagaatattctagagtaaaatgccacctcattcaacggtacaaaatcctaacaacaatgagaatattctctgacatttaataaccgaaaggagagagaaaacgtgcttgatttgccaatcattgcacatgaaaaatgactgacagtaaaatagcagaaaataactaaaacagagtaaatgataaaatggtaactggtgacaattggtaacaggtaaccaatttcattttctaacacttagccttaagtacagttcagatgcaacctggttataaacattatcatattgcaagttttcactaccatagttgatgggtccccactcatgtgcattgcaatataaggtaccttaagatctgcaacaaccttaaacatgttggagtctagcccaaaagatacatccttgacaatatgagctcctttgccaactgcttctaaagcaacttctgagtagaaagtatccagagacaagttttccttctattttaggcatttgaagaatggctctaaaacagggattagtctggacgtttcttcttcaggtcatatcagagtagtcattgggtgggtagattgatgtcaatcatatctgcatcttcggtaatcatcaagcggacttagagattgcatccccaatagattgaaactttccaccatcactaaaactatctggcattagattaaggatacctatgattgaggttttctgtgaacagtcccacaaaactattattaatgggcaaaaccctctcatacattctttcccaattagagaattaccaccaagtttccctttcccaaattctttcatgtgtgatggtaagaatatcagaattgaacctaaacttttcatagaacaatatgtctaaatcaattggccttggtccataccttataccaccaatacgacccacgtccgtttcaagttttttgtgtgtgttcccaatagctcgattattatatgacttcactataagtttagaagaatttagattagcctttgtaacccttaccaaaattaatatgttgtgaaaactagatatatttcgtcggtataaatattgtgaaaacaagtttactttgctaattactattatatattttcttttaattttatatagattgcttagaagaaaaagtaggatgaactatcgtcatcatatcaaaaatgattgaaagaaaaaaaatagttgagtatattagaacaaattgactccaatttcgagctaacttcggacaaaattttgcatgtctacaccgcaggtgcaagagaagttccatgctcttcttctccattttccataacaccatgacactttctctcaaacccatcgtctttttcttccttctctctaccctattcttctccataacccaacaggtctcgatctctctcaacacgaccaccctttccaaatccggggactccgttctaatccaatggtccggggtcgacaacccctccaagctcgattggctcggaatctactcgccaccaagctccgaacaccgcaatttcgtcggatacgtttttctgtccaaatctccgtcgtggcaatccgggtcaggtagcgtctcgatccctttggtcaatctccgatccaactactcgttccggatatttcgatggaccgagtcagagatcaaccccaagaagcgggaccatgaccagaatcctcttccggggacgaaacacctgttggcgagctcacaggagctcgggtttcagcagggtcgtgggccggagcagatccatttggcgtatactgaccgggaggaagaaatgcgggtcatgttcgtgacggaagacggggacgagaggagagtcaggtatggggagagagaaggtgagcttggtgacgtggcggtggcacgtgtggggaggtatgagagggaggacatgtgtgactcccctgcaaatgccagcgtgggatggagagatcctgggtttatccatgacggggttatgaagaatttgaagaaaggagtcaagtattattatcaggtaatctctactacgaatggttttcttaatttcttggttgttgtttcagtttatcataagtacaaaagtcttttttgtttagattaaaactcactgtgacatctttgttatgatagtattatgttcattacctggaatttaagaattgtgttagcaatttagttaaagaagaattaggatgttctggttttagcgtttctttctgggtaatgttagtgacccacctcaattgccaatactaggatatatgggaagtcttttgatttgtaatgattagttagtgaccatttaacagatttatttacttaatgttctgtcccataaacttaccaacaggttggtagtgattctaaaggttggagtgcaactcacagctttgtgtcacgtaatggggactcggatgaaaccatagctttcatgtttggtgatatgggaacggcagcaccttactcaacctttatccgtactcaagatgagagcatctccactattaagtggatccttagggacattgaagctcttggtgataagcctgctttcatctcacacattggagatctcagctatgcaagaggctactcttggatttgggatcagttcttcaatcagattgaaccagttgcatctaaacttccatatcatgtttgcattggaaatcacgagtatgactggcctcaacaaccttggaaacctgattggtcctggtcggtgtatggaaaagatggaggtggtgaatgtggggtaccctacagccttaagtttaacatgcccgggaactcttcagagcagactggaacccgagctccggccactaggaatctattctattcatttgatatgggatctgttcatttcgtttatatatcaactgagaccaattttcttccgggaagcaaacaatatgagttcatcaagcgtgatttggagtttgtaaatcgaacaaagaccccgtttgtggttttccaagggcacaggccaatgtacactacaagcaatgaaattagagatggtccgatgagggagagaatgcaaaagcacttggagcctttgctagtgaataacaatgtaactcttgcattgtggggtcacgtccatcggtatgaaaggttttgtccactgaataacttcacttgtggaagtttaggcatagcaggcgagaaatggaaggcataccctgttcatgttgtgattggcatggccggacaagactggcaacctatttggaaacctcgagatgaccaccaagatgtcccaatcttcccacagcctattcggtctatgtaccgtgggggtgagtttgggtacacaaggttggttgccacgaaggagaagctcactctttcatacattggaaaccatgatggtatagaacatgataaggttgagattctagcatcaggacaagttctcaatggtggagttagtacatataatgaacacaatgatctaaacaatgatgaaaccactcgtaaaggtaaagttgaatccaatttctctgtgtttgtcaagggagctagtattttagttctcggggcttttataggctatgttcttggtttcatttcacatgtaaggaaagggaatgttgcgggaaacagttggactcctgtaaagagcgaggagacttgaagtggatgctacgagtgaatcaaatcactgagttaaccttatacataggatttgatttctccagtattatagacctatttgtaattggagagctatatctagtgttgtgtattgaggctctgctagtgtttagacttggcagacttgattctggggatggagttatatgaccagaatttgcttgtgcaaagattggaccctctatgtgcactttcgacgttctttttgacataaatcacacatgatatacaaggcatggtctagtgaatatacagttgaaacatgtaatttcgtaaatgtattatttgtaccattcgaataaacacagctgtatcctgtattgtatctctgcatctttccttcaaagcctcgatatcagttttgcatgaaaaaaaaaaaaaaaaccaaacccaatttgcctaatatagtgactttttttttcaataattttttgtcatctctgctgtaatgtaagttacgttgtaatcaaggccgggtctggtcttgaggcgaaatgggtcatagataaaaaaaggaaattacactctataccctttttatattgtcttcttttatttttaccttcttttttaaaatctatcatttttacttctttttttaaa

SEQ ID NO: 378951 - DNA, 5397 bp, Cannabis indica
aaatcctaattaacctaaaatttgttgtgctaaaaaataaaccaacattaccaaaagtaatttatcaaagacgcatgttttatcaagtttcccgtttaagaatgtggttggacgactagaactgaatttttctttgtttggttgtagagaaaatgaaaatgaaacaaaattaatgagtgaaaccaatggtaaaatggtttttgttttttaatcttccatttttaagtttcattttctctataatcaaacaaagatgttgtttatttcttttcacgctaaatgactttctgttttcaggaatttttttgactaaaaatttgggaataattagctaaatgaccttaattttttttttattaactacactaccctttagctcaatatctcaaaatttgcgtattattatgtttgcagggatttaagtggggttagtgcagttgctggtagtgaacttttgagtaaagtggacggtttgaactggaactgaaggtttttatcttacttgattttgagtttcagcgttctctttgcaaaatttgagtttctattggagtgtaactaaaatgtatatatataatatactaatattcctaaaatgcccttatcataacacaatcaatgtcatcattctctctcgacctaattgcaagacgaccgcagcagcctccaccacccaaccctcccgactacgactggggcaaaccagttgcacgaagttttcttcaacgtcgaccacacggcattctccgaaggggatttcatctgccatccataccgttgccggagtcctccattgaaagccgaaggaacccctaaatatttgagtctccattctcctccatttcaaggtttgtgtctcataacgtgcagaaaatggactcaatattccaccctccatacttccgtaatatcagttttttactttcgcataaaccaaataaacaagacaacaaatgatataatttccagtactctcgttttaccaattaaaaataaattaatggagtcgaagtctaatgaataatctaataagaaatttttttgggatatggattactaatagtgaaaaagtattgtggaatagagaataaatattagagttttgtttgctcttctgtagttcctgttgggcttactcagcttgtagtcagtttttctactggtttgttagtcttttgttcagaatcccttaaacagattcctcggtagaggggcttctgttaattggttatatctaattaatttttgaaacgtttattattgcttaaatagctaggcaagagcttcaaatatttgcatttgcttattattgcctaggtttggaaaaatgtaagggtatatatatgcatgcgtgtaataatataaaccaaagcttatatgaattattattatgtaactaaaatgatatcatatgttgtaatgataagaatatgatgaagaaacaaaggatgggcttaaaaaagttgtcttctttctctacagttcaatggttttatagttctagaccttgcttggttcttctgttttacatttatatagctaaagcttaagtggtacaagtttctttctatatcacattgtctcatatcattttataatttatataatttgtaggttgtgttgaagaattagcaaggaacattggaaacttaattaatttgctggtggttaactgcaagaagtgcgtacattaattctctctcttttttgactgtttatgcacatgttagaggagtttgaatatcttaaatatttacctgtagtgagattaaaattgtgtgttgcggtaataacggaggttaacaatttgtgtgtttttattgtgaagtatgttttagaaatgttgtgtgctacggagatatttaaaagaaaatttattgtgtgttcgagttgtttgaaatttttgtcttcccatgaacagccatctaaagttccatgttctgctctatgttagatgacccctcatatgactcccatgaagagtcatctcaagtcttacatgtattcttatgagagtcattgtaggtccacttacaatggctctagaaacactgactcccctggagccactatatacacactgacatcccatcaaagctataaaatccatttttttgtttttttttgttgtgtagatactgtttatcaaaattgccatttaggcacttctagcttacagctttgtatcctggattttttttattgttttgtttctactttctactcctttatttgctgagacgggactttcaagactaaggttctgaaaaaaatctataaggaattaggtttgagttaatgatgcattatgcaatgctttaacgatttcatttttggggctgtcaaataagatcatatggttactattttttttctcgtgtcgttgtcatatcttggatgaaaagtttgataaacatggaccttttgccagatgtgtgtcaaatcttttgtgatcactgggttgtgatgtgatattgttgcagtttaatgatgcattatgcaacacttagtttgctgtaccactttttttctgtgctcttagccataggttgttgtgacattggtactggtggtgcgttgcaaagcttttggttcttaggcattctaattttgggttacgagactgtaatcttaatatgactcttcttatttgtccattgtttcccaatttcacaagttttattgtctaataaacacaacaggagcctcaaaaagaaaaatgacagttttgaaacggtatgtattgcggttgttcatgtccctgaagtacattacagcgaatgtggtagacagaaacaatgggcgaatcattgcgacggcatcaacagttgaacattcaatcaagaactcactcgagtgtggtcggtcttgtaatgcaaaggctgcaacggttgtgggagaggtgttggctatgcggctgaagggtaggaaggaccgttgaaccgagggacgaaggaagagggattcagtgttagatagtaaataaggaggtagagaagaaaggttttaagaaccgtaccaaagtttgggctattgttaatgcgcttaaaaacaacggtgtcaaactcgttcttgaagataatgttgaaggtgaaaatccatctgacccaactttctaattactgcctaattaattgagttggctacattctctttcttctgtctatattttttttttttagtgaaaagagttgtaaatgttaaaaaaaaaaaaagaaaaagagttgtgaatgtattgctcaagtagtagatagtattatataggagagtaaaatgagatgaaccaaggtgaatgaatgggctagttgctcaatgcaaattatgtaccaaatctttatgtatgaaaccagaaactgcgtaaatttagtttggactagtaacaaagctgttagtactagccacagttttgaaaattggagcttacctagagaaaatggttttaatatcctgctgttcatgtaaaaaaaaaaaattatcagaccttttcacaaataaggtgatacgatttgtgtctcatttttatctttttaaatgtttaacgtgtttagaattgttttaacactttatgacttagataacatgtttatattgaattttattgtattttataaatgctaaatttgtgtaattctttaccaaagtatctgtcttttcattttcgaataagacatatttactcaaaaagcattgttattagtaaagtattcaatacaatactagtatggtacattatgaatggttagtatgccactttgtaatgcttgacacctaactgtgccccagcatttcttttactaaaaaatggctcaaatcacaaatctgcttcttggctatttacttctcgtcatccttttagtctatgataaaataatacaattctattttaatagatagacatattgcttaaagtttaagcatattactcagttctcaccaagaaaaaagagtatatttcttacaagctacaaagcttagagattatatattaaagacaatattattttgttgcgtttatggatagctggctgtataatgttgtagtttttgttgtttacttacacatttttaaatgaaatgttttggtttttcttcgaagtttgccacctatcaataatacaatgtgaagttggagatttatacatgttttgtatttttagttggagaaaatctatttggctctctaaatattattacaggccctctcttcccatcttattttgtcttctcttggaggaaaatagaattcaagtaaatacctcaatttctatgatgagatgaccaccctatttagaagtgttgcgaaaagaaatgagagcaaaattggacaattaagagaaataaaaacactgttttattgaatgaaaacgagtacaagaatacaaatatatatacaagagataaccaaccaactaagtcggtacaaggaattaatagaaataacggtcaaccactaactgacataataaacacaaaccgacttaaagacaaatttggagtaaagtctaatatccccccctcaagatagactgtgtatgtcatcaacaaccttcttgtggacatgggaaagaagagtagtagaaggtagtggctttgtgaatgcatcagcaagctgcaatgtagtgttaataaggataagacaaatcgttgaggcttttattttctcccttatgaaatgacaatcaagctcgatgtgtttggtgcattcatggaatgtagggttgttagctatgtgaattgcagattggttatcacaatagatgaatgcgggggtgtgtcttgaggtatatggaaatcattcaccaggtattgaagccaagtaatttcactgcttgtagcagcaagagcgcggtattctgctttagcagaacttttggaaatggttgtttgctttttggtcttccaggaaacaagacagtctcttataaaaaatgcaaaaaccagtggtggttcttctagttgtaggacaagatgcccaatctgagtcggagaatcctcaaagatggagagaagatttggaactgtatagaagtccttggccagggcttcctttgagatatctcaatagatgatgtacaacctgtaaatgaggggttcgtggtgttgacatgaattggcttagtgtgttaacgacatatgtgatatcaggtcttgagagagtgaggtagagtaatcgtccgatgagttgtctgtatgaagaagggtcatcgaggatggttccttgttggtcatcaagcttgttccttgggtctataggtgtaatgaccgctttagtaatttggattagttaaggcaattagtactaatttctgttatttttataattatttatgaattatttatttgcggactccaatatttaggaatgaatattagagttataatttctcaattccggag

SEQ ID NO: 378952 - DNA, 4453 bp, Cannabis indica
agcatataaaatcaaatttccctacagtaatgtgtatatatcaatatctatgtgcatggtgtgtacagtgtactagagtatatgccatatgcactggagcacacacaacaaattgaagtgtgctttgccgttacgtttgagcgcgatataacaccaaatttgatgtatgcatactcgttggtgttgctctaacgggggaatattattcgtagggcaagtatactttcatcaaatagttcagaatgcatcatcaagctcaataatattcatgagtcaaaaggattaaacaaacttacataaacttagattgcttaaacaaacatatgaatcctcaatttaacttgggaacttaactcacaagctaacaactttctcacacacggctcctccggtcccacttatcacttttaacagcatctcgatcattttgactctttgcccttcaacatatctatattgccttagtacttgactgttgctgattttcaccctatgactaacatgtaccgatgttaccttagtatttgaatgttgaccacatccacctagtattcgagtttcattgaatatacattctgaacaaatggtttcaatgataatttgcctttaatggcttattgaagcttgtattggacttggtccctctcctgattctttctcaaaaagaacttgttatcaaaaagtaagcaagtgtttcgaaccaacagaacatgaagctcaaatcaatgtcacatatgaaagactacaaagagaaactctaggacgagatttttcttagaaaactacgggcagtcaacctatgagttgcccctagaaacatgcataccattacagtagcaaattccagagaatacaacctaaaaaataccaactccgagttaagctttggccgtccctctatgtatagaaatttcccaattcagctatgaggtttaaatattaaaatatatggatatgttagtggcggaataaccaattcagaaattataaggaaaataaatagttgaaactacataaaagtacaagtcaaactggagggagaaaacattattgaaacactggagacaactaaaatatttggattaaaaatacatttaagtagatccaagcattgctcgaaccctcattggaagaccataaagcctaataaatccagcagcatcggcttgatcatatatatccccactctcaaatgatgaaatatcttgcctatacaaactatgcttactctccctgctagtgactgtgatagagcctttgtatagttttaaagtcactgaacctgttgtggtgtctgtgatcttctccatgaatgcatccattgactcacgaagtgggtcgaaccatctgcctgcatacaccaactcagcatatttcagggctagggagtctttcacttgcattgtttctcgatccaatgtcaaggattcaagctcgcgtacagcagcaaaaaggatggtaccccctggggtttcatagactcctcggcttttcataccaacaagtcggttttctaccatgtcaattcggccaattccgtgctttccaccaatttggttgagctctaacaacatatttgctggtgaaagcgtctctccattgactttaacagggatcccagaaacaatatcaatttttacactcctgaagaaaagaggccatgtgaacaaacaagaggattagcacatacatatcagcagataataagagaaaatcaaagtgaaactctaggataaactcactcaggttggttaggtgcatcttctgggtccactgttaacatgtacatatccttcttaggttcatttgccggatcttccaaaatgtcacccttcagttttgtagaaaatactcatatatgagataataagatcaagatttacaagttaaacaacacagtgagacctcttctgatgcaaagaaactgaggtaaaaccattatatttgaaatatttaaacaggccaagattctgctattgcaaaaaaagtattgaatcaagccagatgttaatattagaaaaatgtcattatataacatcttgttatggtttatccaactaatattatatttagtagaattctacctcgtgactaaggtgccataaatttccatctctgctgtatatagatttcttcgtcactggaacaggcacattatgcttcttagcatattcaatggcatcttctctgccttaatatcccactccctccaaggagccacaacatttagtttgggattcaaagcgaagaaggtcagctcaaagcgaacctgaacacagaacagatgacatcaatcgtcaaaagaacagatgggactattgttaaacatggaattgcaaaacttgcctgatcatttcctttcctgtacatccatgagcgacagcatcagctccaacttcttcagcaacatcaaccattgcctgtttatgggaatatgtcagttaataattaacagataacaatctataagaaaggaaaaggcccccatatatgaagcaatttggctttttaaaatctgacagattgagtagtggatgcataagaatttttgttttacagaatgtgggcacagtcagtttaaactaatgaatcttagttttctttgtagatacatacattcacacctagtgacttcaaaacagttcacagcaagaaaaaaaaaaagtcaccttagcaataacagggcgtgccattgaggttcccagcaagtattttctctcataaattgcaccagcccgcaggcaaggaaatatataatcttttacaaattcctctcgtaggtccttcacaaccaactgacaagccccactggccttggcctttgcttccagaccatccaactcttttatgccctataaaaaagtgagaacaaacttacacaccccaagaaaatgaaccgagaaagattgtcaattaccaagggccgttaccaagaagtaaaaaaacatacctgaccaacatcagcagtgaagcaaacaacttcacaaccgtagttctccctgcagagttcaaatgcataaggtcaaaacagggcagtataatagaaatagaagcacactactgcagttaaatttataaataaaacacaaacaaggtacatgccttagccagggaacaatgactgatgtatctaagcccccactataagctagaacaaccttcttcaattttccacgtaagcctttattgcttgttgcttcagatatttccggctctttataacttggcaaggttgctctaatgactgcaaggtaggtaaaaatgtcaaacgccattgagtcaaggtaaatttaatttatcttgtgaagaagaaaagtattcactagttcatcattaaccaagcactagtataaggcctgtaatcatgttcatgtacaagaaaatactgacaatgttaatgagtccacatcaagttagtttcattagatcaagagtaagataattgaaactaccaaagaagtaagaaacagagtaaaagaaccaaaccttgcttgttacgagagccaacactagggccattacttctaatggatacacaagcattcctatgaagctcatttactcttgcccccaactacgaacaaaaatagacaagagttaattaagagaaaaagtagcaaaatccaaataaaagatacaccagcccctcaaaagaaaaatgacgatatcatctaaagatatatgtgcatcatttaaaacacagtatatataactacctctaaagttgaattcaatttcctggaccaacaggcttggtgagctgaaaaataagaaccaaacgagcatattaatcgcagaaaagagaacaaaaacccgcctacatagtgattgttctacaaagaataaagaaaaccccagaacaacaattatatcataggtttaagctaaaacagtagcgaaaaccccaaaagtcgttctttttatgtgtgtgcattgagaaagggaagaagggaaagcccagtggttcaacaacgaataatatgaaaacaaagattgaaaagaagatgaaaatgtacctctttctggaccatgaaaagcgaaggtggttggtgagtgtgaagaagaaaatgacttcaattgcgccattacagaagtggctcagggacagaatgagaaagggtaagagaggtggagacgtagacgtagacggaggtaggaaagggtgacaacttggattaggggacggagatgggtggcggccgggcgagtgtggttttggacaacttggatcagggttctactacactataggtggtataagcttacatgctttaatcacaataatttcttttatttatttatttattatagtacattacttttgtttgtttgtttttttttttaatcacaaaaataaacataaatttgagtttttaatattgggatcggagtccaaaatattgattaacaaaaaaaattatttagaaaatttttgaaaataactttttttttt

SEQ ID NO: 378953 - DNA, 2078 bp, Cannabis indica
tggggtgtgggattagttgggaccggctagatagagagagaagagagagatagttttagtttgggggtattttggggttttaaaaaaaaggtatagttttttagggttttaattattggtttataaatcaaattttttgattttctaagcatagaaaatcaattttccctatgataattacataacttatataaatatgataattagtgaaaaataatacgagtgtttactcctatttttattggtgtaattaagtattaagttttatataaattaaaaaaataatttttaagaattatcgttaactaattgtaggacggtacttataaaaaatattgagtaccaggaatacttaataacaatactctatgatgaagaaaaataaaatattatatatatatatatgtgacattattgctttgaattgggtcaaatgaagaggctaccaatttgatctgttttcactgaaaagatctccatttcaaattattattatcttataatttcttattttattaaaaaaaaaaaggaaatcattcagaagaagagctaagatgacacccaactattaggataactgataatatggagaattgatttttggtttggcttagttaaaagctttaatttagggaaaaaaaattgtttttcaatattttttaaacccaaaccatattatagaaatatctgtcgtttaatagacaattttttgtgtaacaataaaattataataaaaatgaaattatgttaatagtaatcaactttggagactttaattaaatagatcaattgaaatagtattaaaagttctttcattagtatatcaaataaaatatttagggataatttaattcaaagtggagagagattgtactttagagatatgtagaaaataataagatataaattgtaatatgttgaacgagttgctaattatacattgaattgcactttccagacttttctctctcgtctctccagtatgaacaggggttcgtcttcttccccagcacgttcacacctattctctgcaagtttccacaaggtgaaacccatgcccagctccagatcgctcgatcgtggtggctccgattcttcctctactgagacacaacacagctcgacccgtccaagccgcgccagccgtctccctcagcagatacccaaccaccccagtcgcatcatcatttactccggccttctcccaatttcgtcgaaccgtactgagtttaatgcggctcttacaggtattgatttcctcttacaattttccctattcactgtcaaatcgtttcagaggaaatgactttttattgaacaattcaaatatatttttggtttgcctattaaattataccctgaaaattgtactttgcaaaggatttggggtaatgggaaccctcccaagtctgtcgacagaagggatttaattccctttgctagcttgcgttcgaatcccacatttaatttgatctgtatatgtgttctgtctattgcctttttcaaatcttttgtgcagcaaaactacccagtattaaatgccctcgatatgactgatattgctctgctttacccatacaccgtgagcatttctctatttatagtcaagactaggagaagctttgcttcgtgcgacttagctacatatattttcccctctctgcaaagcattctgtcctttagattttgctatattaatacttggttatcccttgctactacgtccatcttcccctttctgagttccaaacgagtgtcctcacccatatgtattcttgtgccttctagttttagctttcaaccgtggttcgtttgttctcttgtgcttttattttctcataatacgtccatattgagtaagagttgcttttcggtcagtttcctttcgtttatttgtgttatttttggaagcgtacattgggttagtctggggctttttcttgaagctgtggttctctttcacataatctccttgcctagttactctacttccctgtccaaccttgctatcaaccactctcctaatcatctcctatccattacccaaacaaaatacttgtgttctcaaactaccactc

SEQ ID NO: 378954 - DNA, 3839 bp, Cannabis indica
aataaaggttttactatatatattagaataattattatataaaaacaacaccatgaaagaaaatgagctattatatttatatatattgttagcctatatcactaaccaatttatcaccactttctaaatattaacatgttagaacattaaaatgaactcaaaaacaaaatcttcaacaaaaaataaaccaaaaatatatatatatttatatcaagagaattaattcacaatgcctccaaaaatcttcaaacttcttctttctccaattaatggagaattacttgaaaggattttgtgggccaaaatgatcatcttctcttctctttgaatgtcttttttctagtctacaaacttaaccaacacttagtttctgttgcaaggtatggccttttctttgtcaaaaaactctcttcttaaggcaccattttcatactcgcctaaatctataaacacaacccgagcacttgttcatcagtgaagtgtttcggttaagcaaattggaggaggaaaattcggtttttggtaattgtcaaatagaggaattcctccattcataacaacattacttggtaacttagtagaatcaatctcatttgcagcatttgtttgttgaagaagttgtacgagcgaccaaaacacatcgattcttgttatgtgattactcgcctacaacgaaagaaacataagatcaaaaccaatctagaaaaagccttacataaatttgatctcaaattgattgaaaaagcttttacctcaacaataaaatgagcccatattttgttattttcgcgtacttccattactcccttcaatatacttaacccgaatcctcgaatcatgtctgctatctcgagaaacaatccatgttcctcgcaaagcatctacagaacaacaaaacataattagtcattgagaaaagtttgagctaattaagatgtttttcgtgagatttatattacacttagtagctaccagtcatcaagcctgtaattaggttttggtgttcataaatctacgagttttacttacttcaataagcatttggcccggtggattaaggtcctcgacgataatagggcaagccatcgattgacccccaacttcgaaagcccatgtaactccaccaccaccaccactagtgctactgatgttgttgttgttgtcacttagaatcgcgccattgtcattgttgattaactgaatttcattaaagtttgttaatttcttgtactagtaaatgaaaaccgagttttaagtgaaaagttcattactttaggcttattggattgcttgagcttgtcagcgtattttgtcacgccttgcaagaaaagcatgtacttgatcgttcggtccaataaagaatcaatgctacactgttacattacaatacatcaaagcaaacataaaagatgtcaataaaaatttcgaaaactaatatgctgttgaatctcgaaatgacagcaaaagattgtacctttccaccactaggaatgatgcctcttaactctttgattcggtcttggattagctgacgatccttaggtctcggtctagtactctcccccggcctcgccctcttcctaataacctttttaggctcctcactcgccatctgcgattgagacagaacagtgctgctactacttccaccaatgatgctataactatcatcaatccataaaccaacttgtgatttaggaacctcctttgttgtgttttgaattttcctccttttaattggtgatgaaaatgattcatcttccaaatttgatttagtcaaacatgtagaagaactattagaaccaaccaaaagttgttcaattcctagctctgagaataacccttttcggggataagatttcaaccccgaaatgcattttcctgatgcagaacttggcatcataatctcattttcatcaccctgaatgataccagatttaacatagctttgagtagattcagttggtatctgttgaattgccttatcaccattcagatcaggtgatgatgaagaggcaaaccactgtgaaagatcatccaattgccccaaaaaatctgttctgaaatccattggctcaaattcctcaaacaacttctcgggaaaactctccaagctcttagcttttcccgagcacaggaattgctgctgctgctgctgctgctgctgagacacgaaagaatcttgattcgacgaagccaaagtaggatattcggtacagaacaagtcatgatcatcaagaaaagttgcattttttttgttaaaaaatgacatcttttcacaatccatatcagatacagagcaattgttttccccgaaaattggaggaatgaactcgctactcgaattttgtgatgagaataaagaagcaaacaatccatttatatcaaagttgtcaactttttcataacaatgagcattttccaatgtgttaaacacatcaacattttcggtttcttgaaaaaccctcattgtttcattaacaaaatccaagctctcagatatctgaaccaacaaaaacaacaacaacataggattaatcaaacaacagttcaatcacacaacacaaacactaatcaaattattacaagtgttcttctaaccatctcaacagatccgaaatgtactactcctcgcgattcaaccggaacaaccacaattgtctgcaaatcgagtttgattattactaattctgtgttctaaactaaaattcaacaaatttcataacactaacaacacaattttgtaataaaaatggtacctttattccagaagaaaactcataacaaacttcagaatcatcctatataagagtgaaagaaaattctcattaaggaaacattacaatataacaacaaaaattcaatcttttttttccttaaaaaacaaaacctttgtataaaaatatcaactttaacaaaaaaaaatacctgaaaaaagttattattttgagtagatctgaaggaattccattcctcattagcttgaatccattggtattttccattcaaagcagtttgaccaataattctacattgacacatttaatttatttataagaaaaatgtataattaattaattgaataattaaaaaaaaaaaagtttaggatcatacccttctccaagcatatggatttttagaagcatattttcaatgactgcaccaacttggtcctcaaagtaagcatcttcaagagacaacaacctaagacaattcaaaagaacataattattcatagaattagctaaattaatattgacaatatatgtattattttcttaataaagcttacttttttataatgttaattaaatgaaatttcacaaaactttacaaaaatgcagattaagaaaagaaaatcaacattaacttttcttctctttctctcttaataagaaaatgtttttaagagaacacaaatctcaaatgtgactgattttttttttttttttaaagttggagaattgatgaacaaaagaacaaaaggaatatgttgtaaaagaagaaaagacaaaataaacattaaaaaaaaaaacacttacatgggatttctttggtcaaaacaccaaaaaacaccataagaccaaccattactaacacaaagattcttgagtgttcttctaagtactgaactgttctcagcttcacccatttttcaccaactatgaaattaattaaaaaaaaataataataacaaaactacaaagctcactactccaaacccataaaacgacaccgtttaagccaaacccaaccaaactaagagaactgataatttgataaagtctcttacccacaaaccaaaatgacacaaactcaaaacccaactctcttttttg

SEQ ID NO: 378955 - DNA, 3185 bp, Cannabis indica
tatctatgactttttttttttttgcacataatttccaattttcattgaattataaattcaagattatagatttttttcattttccattgaatcatcataggttaatttttactaatagtagttgtttgaaactattcccattttcaatttaataggataggtatttggatgtgaaattttgagtctttagtatattagggttacaacatgaattggatattgagatatattgagttctcttttttagtatttttctataccgttttatttgatgtcatgttcaagtgattaatttgataataaacttattatttgatcattgtggcagaaatggtgaggctatgtgatttgccaaaggaaatcattgagaaaatcatgttgggggcacctgcagattctgtgtttcagtttaaatttgctaacaagttttggtattcccttatctcggatttcatcaataaccccaaatttgtttccaagcaccttctcattgccaaaaaccattcctctacatccttacttttcaattcgcgttccccccatgccgatcaacgcttgatcacattcccattgttgagtataaaccatgatgatggtaagaacaatcgttttataacatccacagaagctgtaagtgtaccacttataattagcaaaccaccaattagaaactatgataattatgatttttatgattctgattttggttatgatgatcatttaataacatcatcgcttattagcaaaccattttcggctataagctatgatgattatgatgactattatgattatgatgatcattttatgacatccccagaagcttttagtgtaccacctagaacctatgatgatgatgatgatgatgattattctgattttgatgaggattttatatcccgagaagcaaggtacaaggatatgagtcaatggagtgaggtttgtagctgtgatgggctcattttgctagtgaataagcttgggacaatgatgttatgtaatcctgctttgaaagaacacacgattctcccaaaaccgaagaatgccaagattaaatcaccttctcccggtataggatttggactcgatcctgtaaccaacgagtacaaatgtgttgccatttggtgccattatgaaggattaaaagttgaggtatacacattgggttctgattcttggagagagattaacatgcctgaagacaaaatggatgacataatagatgatatgatgtttgatgaagaattatataatggtttatgttgcagaggtgtttattactggctggtaaagaatccatcctcctgtcaggatgataatatgatcttcagtttcaatttgagtaatgaggaactccaactcttacatgtgccagatcttgaaactttgggcattgaccgtcgttattggctccacctctctgtctggaatgattcagtaatgatgtgtttgacaactcgaagcttaatcattcatatcttcaggatggatgaagttgaagacggttcttggaccaaatatgccgtcaaggttggaccaatgcacaatcatcaaaatgtgttaccttattggaagaatgatgagattctaatgagtatctggaagagagatgatatgcctaatgtgaaattggtgtattacaacatttttacccaagagatgagagatgtttgtgatatggataggagcatattagatagtccagtttgttcttatgtaaaaagtcttgtttctattaggaggtgaagcttgttcggttatggtcctgttaggtgttactaccttatgattgttcttaaacatatgtgtatgttgttttggaaagtgatctcaatgtaatgttttgtgtttgtggaatgattcagtttctttttttttttgtaccatttactctgtttcatatgataaagttgagaaaaaggatgttctctttcatggttaatcttctcttattctgttattcagttacaataattcaatttatagcattcaaatatatagtcatgaagagatatcattcatgggaatgtaacaataatggtgatctactgatctagataattaaaactaacagaacctttaattttagtctaatagatcccttctgtgttgcagcacagtcaatttcaaaactctctctaaaaataacaagaacacttacatatataatacttattatatattcagccatagaagtgatttacttggagtggagaatttggatgacaatggcaatgtgcatggtcaagaagatatataagttggatttgagcactatgatagttaaggaccataacacctcttgccagactttaagggtctgtttggttaggtgtaatgaagtagaaatgaattattatttattttactgtattttaaagtaatgggaatatcttttttaccattttggtagagttatatggccaaagatcacattctaccatcaagtgtcggtgttttctttcaacaacgccattttattcatgatttgggacgagaaaccttgtgaacaataccgtgagtggtcaaaaaactagcccaatcgttttgaagagctttaagcttgcaatctaactacagctcaactcgatcattaataataatatacaagtcaaaggactatttttttaatgtattatattattggaaaatggttggatagtgataagagggtattattattataaagattaaatagagtagaccatctctacatatctctacagctattatggatcaattggacagcctgtaactgtaaacatttttaaatgtttcattctctcttctcttctttctctttctcatcagttcatactagtttcaaactcacaatccaatctttttctgcaaacaatcaaaggtaaaaatggcaacttttcctttattttcatactcttttatttattacacctaatttccaattttcagaatcgaatgcttctttaatcacactgaacaaaaatgcatgattttagattcacaatgagtaatcttgaatatttatttatttatttatttacttatgttagtagcagtaagtaattgttagaaactaatttcatattaaatttaacaatatagatactttggatgtgaaatattgaatttttagtattgtatttgtcgttaccttacaacatgatttgtatattgagatattaagttttcttttcttttctttt

SEQ ID NO: 378956 - DNA, 1484 bp, Cannabis indica
ttttttttttaaaagaaaaaaacgaccaaaccaaccatccttcgttcatgacaaaaatatgacacgtgtctatatttgttggtgattgatactcgtacaaaagtattgatgactgctggcatttaatttttttttgtgttctttttctcattttctagccaaaattttccctggaaaaactttcttcatggcgaattggtctcaacttcccgctgatctgcttgtggaaatcgccaaacgcttagacagcccactttatctgcttcgtttccgatccgtttgttcttcatggagatcatctgtctcttccaggcttcgaaatttactgggtcgattccccctcccaaacgacggcatgtccaataccatccggggtttcaacctagccaaacgccggatttttctcattggctcgcctggaaatactaatcaaccaagctcaggtcactggcttatcaaaatggaagaaagcgtacctggtaccatacgtctaatcaaccctctttcaagatttgaaatcagacccttgccagaagatttcccgaaggtattggacgtttcccgatttagggtttatgaattgagtcaagaatacgttctccattatatgcattatcccacgttagctaatttctcaggcgatgttggtaatctgtatatggagaaagttgttttcaagttcttggactctgaaagtgataagtttgtgttgttgacaatccatgtttctggaaaattagctacattcaaatctggggataagcgttggactattatccctgatatgccttctccctatgatgatgtgatattgtacaaaggaaatttctacgctgttgatagcactgggcgtaccgtacttgttgggtgttcattaaatgtggttttggttgcaaatcctgtgtttggtggagacaagaagtttttggttgagtcacgtggtgaactccttatggttgatatgtatctaagtttgtctcctccagaagaggatttagttagtgatgaagattttgagcaatttgacgcatatttaggtgagaaaacagttagtttcagagttcatcagctggataaaaaggaaaagatgtggaaagtggtgaaaagcttgggggatcaagtgttatttttgggcgatgattgcacgttttctgcttctgcttctgagttatctggctgcaacaattgtataatttttaataattatgtcttttacaatggtggtcaagaagatggtgtgttcgggggtcgtgatataagcgtttatgatgtgggaagtggtaatattgtacccttagctaactatccagagtattcaaagctgttttggccacctccacaatggattaccacaaatgaagtgagtttgagtctattttattgtgctttaaagttttgatttgattctagtttctcttagtaatattgccgagcttggtagatatgcagaattgaaatgaatggtttagttatgtgattgaaga

SEQ ID NO: 378957 - DNA, 5319 bp, Cannabis indica
tactactaccacaatttgcaaagcctaaacattaatgataccatttaataaaaaaaataatttaatagtactattgatatattaatcatcatccattaacaagttttttggtatgatcattatataccctctagttttgtcgcgacattaagacaagtttccacgcaccttagctataggggggtgcgctaggcaaaagcattatgattataataccagaattataaattatatatgcttaattagcacaaattgcaaatcgatgaatgaagtgtatatatttatatatgtatattgtagtgggggtttcactttcactttcgaatctctctacttaagtgtttagagtcgaatagttatatatatggaccaccacacacaaagccacccatcattcccattcaaattttctaatccgaaaataacacaccaaaatatataaaataaaatcttcgttacaataatgccaaatgatcaagaaaaaaaaaaaaaaaaacaattattctatgtgttttagtttctctttccattctcaaaaaagcctctcaaactaactgaaccccccccaaagctgaataattaattaactaatcccaccacaaaatcatcatgatctatataaaaatatatataaatattaaatgcttctacatgcaccccacgggttacacgtggcaatccgccgacgcaatctaagctcttcaattaggtaaactacatgatctgtcgccctctacgatcgatgattggctatgattaattaaacactaatcagttggctagctactaactattaattataagttagagagcttttttctcgttaacagggatcatcaggtttgttaatccatgattagatattcgaagatataatatttttttttcctaatggaactcgccgactcatgtgtgtgtaagtacggtatccatgtgtagggtttagttatctacatttgtaatatggtggggttacgaatacttgtatggttttggaccaaatgaatatgtagtacaaataaagaatgattaacaattgtactacatatatatacatgtatatatgtatttgcgtacatgtggtcttttattaatgttatttatttaattacttttattaactgactatattattattaactatatatacgtgcagatatatatactctcttatgtgtgcatcatggcgtgagcctgaggttatcctaacgtggattggcctaacgaaactaagttagtgtatatttccattttgacataatattattataataactattattatgtaaaaatctaataaagatagaagaatgaaaaggctatagctagagagacaaaaaacacatcctataattaaaccaccttttgtctagtattattaatttcttttcaaaagcctaggttgatgttgatgatcatgatatgatagacaaacattccctaggcggccatgccatttattttatacatatataaatatagtaataagcaagtttatctctctctttctctctctctctctcaaatctccatgtgtatatatataaatgattataaccatcatcatcgatcatttattcatcgatcttcgtactagttaagtttctctatatatatataagtgtctttactactgtcctttccttattaagtgtactacgatctactccatcatcgatgaatctcatcaaaattaccaatcaaaaaagaaacaacaactgattaatttacctaaatcgttcaatattatacacacatatatttatttatatagtctagactctagtagtgtgtttgttatatatagttttgaatagaatgggattgaataagccacggccgataattcggagctacgataagcaagttgacagagctagagttgaagacctcgaacgaagatgtgaggtgggcccaaccgaacgaatttttctcttcacggacactatgggtgaccccatttgtaggatccgcaacagtccgatgtataagatgctggtaattaattaattaaattaattaattactctattattattattatttattctatatcaataaataaaatattaataatgattaattttaggtagcggagttggacaaggagttagttggtgtgattcaaggctcaataaaagtggtcacaatgaataaattaggagttagcggagccggcggagccaaggtgggttacatcttaggcctaagggtgtcccctcatcacagacgaaaagggattgggtcgagcctggttcgagaggtagaggagtggttcgtgtcgaacgaggttgattatagctacatggcaaccgagaaggacaacaaggcctcggtgaagctctttgttgagaaatttgggtacaacaagtttaggactccagcaattctggtcaaccctgttcagaacagggcctcacatatctcgtcgaatgtggagatttccaaggttaaagtggaagaagctgagtgtttgtaccggaaattcatgtcgtccgctgagttttttccaaaggacataaacgacatattgagtaacaagttgagcttggggacatgggtggcctacccaaaaggagagtcattgggtagtagtagtagctgggccatggttagtgtgtggaacactgggggacttttcaagctgtggctagggaaagctcccttatcgtgtttaatttataccaaaagtagtagattgattagtagattattcccttcttcttgctttaataataagtttataattaagttagtacctccttgcataccaaacttctttaacccttttgggttttatttcatgtatggagttcactccgaaggtccattgtccggaaagctggtcaggagtttatgccaattcgtgcataacatggctatagcttccaaagattgtaaggcaatagtgaccgaagttggtggtcacgagttcgagttgagacatcacatcccacattggaaattattatcttgtcccgaagatttgtggtgtataaaagccttgaagatcaaggaccatgaagaggaggggttcacaaaaactcctccatcaaaacctctttttgtagaccctagagaggtatgaatttaattaataataatactcaaatcaaatgaaatatatatataactttttactatataaattttctcattgatgtacaagtttcatacaataggcttattttaagataggtaagacattgacctttatttcattttttgagaatacatatataggtacgttaacacaaccatatttttcaaagcatacttagtctcttctctggttgggagttttctcttgttactttcaaatatgggtgacacaagatcttaaaagatttccttaattaggtgccaccctaggtgtcctttttatttgcaaagtccatttggctcttctccttcatgatttcagactaatcaataataatcaccctggtggtccaacttttgtccccatgaccctaatgttactactcaaaataatgatggacccctcaatataatatgctttattttctcttccttgtccttcattgaattgggcacttaattaacgtgatataattattaatatctatagataggctatatatgttggttaccacatgattaatttgcccttatatatatcctttaacatatatgaacatgtgaatatactgggttattaggccttttaacttttaagtagtagtactagtagcaatggttgtaaatatattaatatatatatatatatatttatatatatataagtatatagttttggtttgtatgagcgtacatttgataagattattacaattttcatttcatataatatttaaatataatattgaaaacacttgttttaaccactcttaaggtaattaatcaaggactatttagtgatgataatggtcacatagattatcatatataagattaatgcacgacagcgcaacaatacacgtaccatatggtgcatcacgcaactctctaatcactaattggttaaattaaaaatcatgatactccgcatttagaatataatcgattctatttgtttatcttatttaatttaatcaattaatgatactatatattgatacatgtacattatcatgagtatatatttaatcatattttctattatcttttatcagtattaatatttgggtcatatagttcaataattatcatattttctatattttgaagtaattactaattagtgataacaaaattgtgcatcaaataacacagcaaccttttctatcagcagttatagacatatatatatatataatgtgtcatcactatatatatattttagctatacataatatttaataaattactatgaattttttttgtttgtttttttttttttacaaaatagtgcgcactttaaattttgtttactttgtcatgattacaattaattaaaaatgctccaatatatatattcgtttgtgtgtctataatttacatgtatacatgttagatagtatttataactacagtgtacattttagtaattaatcatgctacgtgatatgcattaatattattaataataaatattgcatgggaatatattattaatagtactttcgcataaaaaggaaatagagataatatatgtatatcaattacattattagtgcgatatgatcaagtcctgaaaatagagaatcatggaaagaaaaatgtgtacgccatatacctgtataagctcgtggtggaggccaggccaccatcgtaaacccttttcacataaatgtcatgtatataaatcagttgtttttggctgatcatatatataaaatctaaaaaataataatgggtcatgatcttttgcgaagatttcacaaaatttccaacttttgatagagtcgggagtgtatacggcccttttgagcatcacaagtttagcatcataatgctgtaacaccttttttcttattctttgatatgaataagttgttttgtacgtgtatgtgtgtgcagtacttgttaaaaaacattttatagtttacaatcttttccaataccaagtgtggggcacatacattttgtataattggaatttcttttttttttttttttttggtaaatgtataattggaattagtacaacacactcctctcctagtcaaataagtaattgtttttcccacgactcagaccaatcatgcaccgcgtcgtgtgccagtgtgtttgggtcataaatgtacatatatatttgtatatattacatttatacacaaaataaatttacacccatagaacgatgtaaaaatcaaattatacatatatatatat

SEQ ID NO: 378958 - DNA, 6900 bp, Cannabis indica
aaatttcaacaattccaaatcaagttctattttccaagggttcaaccacaaaaagtttcaggaaaattcaatccctactatcaagaacatcccatggcatgaagagtaaattgccaattgaaaagatattaaagatttacattgtaacttgggaaatgatgacaaagattgaggacaaggttccccttgatcttttgaagctctcgactagaacaaagaaaggaaaaaaagaaacttttcaattgctaaaccctagaaataaggaaaagaaaatggagatgaggaaataagatttacctctggtcgtctaggttaatgagagtggaagagattttattgtctttaatcttgatgagggtctaaatgatgaaggagagaggttttgtaaggtcgcaactatggtgagttgtggagtggtttgtaaaagatttgaaatatgcaaaggagaatgacttaaataggaaaagagaaaatccctttgggcctgagcgtataatccaaagaagtaaggtattgcctaaagaatttgtggggggaaattatctctcaaatcaaaaatttaaatttttaccaccaaaacctatttaccacgtattaaaaagagtttttggcggttaaattgtcttaattatcattttacttgcacttaagccttatgaactcaaattttagtagtaaaaccctcccaactactaaactcttagcacatttaaggcatcatccaatcatctagttaaatgccaacattttttaatgcaaagttaaatgtcaacatagattgcttatgtgtacaattttatacacgtgacacatttatatcggtacatgtaatataattattttaaaattcacactaaaattaaaacataatttagcattattaagaaaattaaaaaaaaaaactaaacaataaagatattttctttaattaaataaaaaatataaaaaaaataaaaataattgaatcatcttcttcatgaaaacccattccctgcaaaaataaattctcagaaaatttgaagcaaccttattgcattcaaactccatagccactttaccttcttcggcaccatctgaagcttccccttagccaacagagcacctgagagtcactaaacaagcacattaaccattcgatattggtggcatcttgctggagtagatcgaaaaaatttttaggatatgaaatcagaaaaatatgatcagtgaccacgacttaagcaccattcttgccgtgaagccattttcgtcaaaaccaacccaaatcgactttgacctagccaccattattcgcgatcgagaagatcaaacagatccaaagttagaggctccaccacctcttcattgggctagactttgagttgcgacattccattgatttctatgttgagaaaccagcatgggttgcaccattctagatctaaaatttttttttggagggaatgggttttcacgaagaaattgattcgttcatctttactttttattttttatttaattaaagaaaatatctttatttttttaattatttataataacagtaaattatttttttaattttagagtgaattttaaaataattatattagggtaccaatataaatggtcacatgtataaaagtatgcacataaacaatccatgttagcatttaattaggtaagtagatgatacctttgaatttgctaatggtttattagtttggagagttttacagcaaaagtttaagttcagaggattaagtaaaagtaaaataataattgagagggtttagcagccggaaaatctatgaaaaatgtattggtaagtaggttaagatgattaagtccccacatgctcaaattcctattcattaaaaacaatggcttgaaaattaattatgtgaaagaataagaatttgtctcatgaaaataagttaatttattataaacaagtataatattcttgaaatataattaataaattcaaattaaatttcttgatttacaagaaatatttccttagtaaataaaaatgcaaaaatgcgttgcaaatctgtaaatacataaaatgtgaaaaacagattaaattcttgtctcgtaagtatctgactcaaacttgaatttacatgggtacttggagaactattctgagtgatgaacatagcgcccatgatttggtcaagatggaggcaggaaaactgcaaaagtctttctttaatgtttacgacaaacacttttggaggtagatgttgtacccgatttttttacaaaatcgtaaaagtcaatgataaaactttgaccaagacaaaagatgaaacagaggccaaactcgaatagtgtgtcaagtgacactttgtttgagttccacgtggcatgttaagaaggaatgcacgagcatggtcaaataggtccttgctcgtgtaaacctagggttcgcctaagggaaccttttccatgacctcgaacggagttgactcaaatccgttgttcatgacaaccatttgagagccctaataacactgaccacaaataaggtaaaacatcatgaccttgctcatgtggtaggattcataaaccaagaaagaattccacaaaggtgccaaaccctacatggttggaatatcatgacatgaagaatgacattaccaatgtcaaaacaagtgttcaacccaaaaaagaaactgaggtactcttgattgaatacattaaggaaattatataggccatacacaagccaagccctatgcatgcccttgcttgtgccttattaaagaaacataaggaggaatcttgaacaaggcaatttctttgaccttgatcgagtgtcaaactctaggtgcaccaaggtacacaagccaaggtactaatttgtctttgctcatttaaggaaatggagtaaagagctaattcacacgagtcaaggcacaaaaattacccttgctcatgtaaccatgaggataaatgctaacttacatgagccaagacaccaagatttccttgctcatgtgacacataaatgacaagggacacgagccaaggcaataatatttccttgctcgtgtaacatgaagacaaaagaagaatgcctacatcttagtacatgagtaaggctagagacatgtctttgctcgtatagatcaatggggattagagtttctggtaaatttagaatctcatggccatccaaacttggaccatgtctcgaggattagatcaaagcatcatcaaggtccttggtggggagtatttgatgaagcatgtgaatagggtgaagcatatgcccgtatttttgtatgttaagaaccaaaatttttttagaggttcacggtaatttctcaaggataaataagtgatatactcgaacatggtaggatctatggctttgtttgagtatgtgagtaccttctagagttcggaccttatcaaacagatgtaatacatttcttaagaatttgaggcttctaaaacatttcaaatgatagcaaactccgcgtatcaagagattcttatattttatgtattatatttattattatttaaatgtaaagtacaaaatatactattatctaaactcaaatcaaaattataatgtaaagattttcctaaatataagagagtgacatgtcagactttagtactatagaaagccttaacctaagcgtgcaaagggattcgattcaagtcattaaactctcagtcagacttaaaaaccctaaagagagaatccttacttattgtaatcactcaagaatagtcgcctcaggaacataactctggcactattcctaagcattgaaaacaataaaaatactaagtggagtagtctgttaccactaaaaataggtgaaccactataaaatcccttcataattattgttataaattcttcaaatcagtttcttttttaaaaccattgaagtctttagaacaagttgctcatttacattcttcttcgaccacttgaagaaaaaccgcgtcaacagaaaggatgtaaaagtaaattctcaatttgtaagctaaatgattataaattatgtttttaaacaaaaaataaagaaactaaatggaataattaaaaatatatatttttaataatgttgaattttaatagaaatcatactgaaaaatagttttaacaattataaggtatgtttatacaaaatgatatgaatatttttaataatgaaatctatttaattaagttagtaattttaattttaattttattttaatatatttaaataatattatatatattcatttgaagttgacaattttttcattactatatatgtggggtcatcgtcaagtacatcctttcaacgaatgcaacactagctctcgcagtagcggcaaacaaaggagtagaagttgaaaatttatttttatttctgtattaatggataaaggtatttaatttgttagattttttttttacttttcaggagtttccattaatcaaaactctattttgccaagcaaattttcaaccattttttttcattttacttaaaattctattttgttttgttttgtctttttttttttcttttttattttaccaaaaatattgtaactcataatcattcaatatagcataataaaacaatttttttttggtattggatgattgcgattgagaaaagaaatacctacaaataaataaattttaatgtaatattgttgttatatttctgaatataatcaattaatttagtatatcaaatctttttctccaaacatgtctaatattaatttaagcgtctaattatgtactttagtaacatacaaaaatgattgacaaaactgtaatatagtgagaaaaattagatagtttctttggatagtacttttaatagattttttttttacaaaattatattcaaaaaatttatttggacatgtattgttcttttggtaaatcaacttctgtatattacctcaacaaaactaatgcaagacaaataggttacttatagagctttattttgaagtttccacccaatttctatctaccctattcaacttttttagactcacaaagtctattctattacaaacatcatgtttcaccatttcgaacattacatgaatagtaagaaggaaaaaaattcacaaaactttgtttctacaatgccaaatactatacatcaaagcattgattacaccacaaaaatcttccttttaccccttgaggctttacaattctgaatccactttaagatttgatgaagctctattttaaggtacttatcatatcctgactccaacagtttttaacagtgtcataaaactactctaatgttttccaaaaagaagagtacttgaatggcttcctggtacttttttttatctccagataaacgaaaatcaacatgggtgaatgattaaagtccccttctagcaagaaggtaacttctccagtttcaaacttcgataaccagccagcatttgcaaggacacaatccaacttggcataattcctgtcattttcttcttgcttattgttccaagcaaaataattacgattttacttgacatattctaaactacaaaagcttatacaattttggagcggaaccatctttttaatatttcctctatagtttacccttttctccattgacaaaacagagttgaaaaccccacaaacaatccaagggtccttattactggcagtaatggaagtcaaagcactccacaaatcttgcttgcctttgctttcattaaaagcataaatcacagtaatcacaaactttttttctcttttcggagtcacaaattaatgaatcactagctagaactattcctaatgtccacatcaaagatgtttgggttccaagtaataacaattttaccattaggatgattagaaatgttggaagtaaagcaccaccattataacatattaaggtataagacccctaattcggaagccttaaccattatttcgaggagacctacaatgttcttataatttatcattcacatgacatctttttgcttattggctttgttatccctcaaacattccatgtgaacaatttacccaattattagtggagggtcaccctcgccatcaacaatagaattaaaattacaattaacatttcctactagcacttcttaagcaaaaatctcctctaaagcttcaaaaacattacttgtttccactttataaagggctactataacaacttcttttccttttactaccttaaaaccttggtcatccactttggcttccttattagtttttccttagttataggggcttttggctatcatcttttagaattgttctatcttttttcctttctttcatacctcttttgtgtgcccaatttctttgtgattctcacatttttctgggttccattcataagctacattaatgtataccatgtttcatttctcatcttcaaaactaagattgtatggaattccttttcagatatccattccaattaagacctgagcataatgtaatttgtctcttttcattgtagcttgatcatattttagcattttccctaacatactgactatttttgacatagattgttctccccaatatttcaatttaagttgccacaactgcatccacaatggaatttgccaaacttcctctctagtaaaacttgtgtccggatcccaagctttcattatcaaaggttcctataaaaaaattgatattctactttcaaaacacaatcccttgcctctaagtatggaactgaaccaaaaaaaccccatgagtttgcaaactcactttatgttgggattttatgccctaaataaaacccattacaatttaatctgatttgttaccaataagagaattagaagtgttttatgttaacatgtagttttcatgcttatggtttaatatatgaataaaatatgttaagtccagaacat

SEQ ID NO: 378959 - DNA, 3377 bp, Cannabis indica
tcacttgatcctacggcggaggcggcggcatggcaaaacctgcgaataggtcgcagagagagcatgttctaggaatcccctcaaattgaaacataacccctcatcgaaatttagatcctaaacccaaacatttagatgaaaacaccatcaccacacatcaaaaatcacaaaacccagaagaattagacaaaaatgagcatccgaaacatatgaatctcagtagatttttttccctttcccaaattgggatatgcccattaccattagctatattaaggtgaaagcagaaaccatagaaacaaaattggatacacacatttcagaagaagatatagatcaacccagttgtgattgtaaagctggttttttttttcgttggaacggtggagaaggtgaaggtgaaaaaccacttagaaatgggagatggaaagaatgaagattggatgggaaatagggagtggagtattgaaccggagcaagagaatctgggtaggggttttggggggttttggttttggttttaggtttggttaatcgttctttgtggactgtgattgtgaagagtggaagggtgtatggtatgtaagcgtggacccctcagataatcgatagtgattggttggaatattaaggagtccacgctgcgtaacattctattctaataggttattcatttcatagccgctcaaaacaattttaccattcaagtaactaattttttgttttaatgtttttcttttctttttcataatgattgagaaattattactattagttttcttttagactaaaaaaataatattagttttcaatggtatgtaacatttacatttcttttaaaaaaaaagattctcctcctttaaataaataacaagtttaatcctaaaatttatgttattatataataaaaaattattaatgtttttttaacaaatataatttttaaaatttattaacaacacttaaaattggaaaaggaagattatttttaacatttcttctagatttaataaattttaatcaatttattagattatttatgcaaaaaaaacacatatattttaaatttaaatgagggtactttaatttttatttactttttttttcctaaatgaaaagactaagaacatgttatggtgaaaaatatagtaaagttcccttaaaaatattattccaagtactctttccaagttaaatggtgtttggtactgaattataaccaagtttattgcaaagattaaattaacaccaaaataattggggttgacaatgctccatcataggtagacacgaaacacatcagatttttctgtaaatactaggcttaggaagatccaagtggataaatacagtggcagccgttaaccactttgtaaaagttattaagcaaaaccaacgtaccagattatatgaagcaaaacccctctttttcttgataaggaccaagttataagtaacatgataaaccatttactaacccaagttataatatgtgaggcttctgatctgattaaataagaatccaacaacaggcaatagggggaaactaacagaactagaaacatctaccaacatttgtgctattatatctctaaatcaacctgggtggttaacaaaagacagtaataatctaaaactcgagttaccccaggccaggccatggtctggtaaaattacttggcttgacccacgccaagaaattgcttcatttagtcctttgaagttataacaagcaaccctaaagcgccgatgagaatatactgcataaaaaagaaacacagaacggtaaatttatctcgtttcattcacatcaggagtatggggatggtaaggaacaaaggacaatgaaatctaaccttgataatgggtttttcggtcataataatagttacccagccaacataaggtaagaacctgtaattgaaaacaaaatggatcagagaaatttcaagcaaatcaaaacttattcgaccatgtatgaaggaaaatctaaacaaattcatggccaggaataaagtttataatcagagtatgcaacatcatttgttgaacaagatatggtcattgacaacctgtaatatggaacaccatttgttcaaacatgatgttgtcattacaaaaagaaatttcaagattttaataaaacttaaaatccaaagttcaatgtactgcaattatcactagtgtatgcaaccaaacagtcaaaatgagaaaaaacttcaaaattttaggtgatcacaattgtgtgtgtctggattacatatttgagttcccacaaaaagacactgaagcaaaacatttgacttttaatatagagagatgttggggactagggttaatgctggagatcttaccctacagctctgcccatgatatggtgccgctgaagccagagttggccatgagcatacaaaagcctgtcatccccataattattatctcctgagaaacaaaacaaagaacagagggttaacattaagtatatcagtgattagtatagcaccggtattctctacacaaagtacaggtactatacaatgtgtgcttgtttgggtgttgtgtatatcatttcagaaattgaagtaatttgcaccttttgttaggacatcaacttctccagtatcttttcgctcgtgaacctacaaatataattaaagattctcagaacacaaaataaggggcattagctcgagtaactgcataaaaaaaagttaccttgatgacacgatgcacaattggaatttcacggccctggaaatatacataaaaataatgagaacaattaccacttacagttatacataattctataattaaagggcaacataataacacacaataagaaaattccatagaagaccgattaacagtgatagacacgctatatttctctaaaatgatgcatctccaccaagaatacataacatagcacaatagagattagacattgagaacagatacagatatgaatttatagaaacaaaacaaaccacttacatcaacattaaaaacaacaatctcccctgcacgaataggttccttactcatgtgtaagaacaaaatgtccccctgcaaaggataccagcgattatcatcaggaggcaatattaagaaacataataaatcaattcatgatatccaacaagtaaataccattctacataatgtttacagatgaacatgttatacaatatacagtaacctcgaaagattcatgcactaaatcatcataccctcttgaagcccggttccatgcttccagacagaacaactacaacaggtgattcactgccggtcatgcacatcaatgccttccatattataagcgcagaagtaacgatcaagcctgtacaagaaagcaactaataacaatcatt

SEQ ID NO: 378960 - DNA, 2230 bp, Cannabis indica
cttaatttttacttttatactaatgactagttttaaactttaaaaaaaaacttattttttttacttaattcatagtacctaccttactaagtttggttttggacttatttttttattgtagtaagcatatagaaaaaaaaaaaaaaaaactttaacctcaattctttttatatataattgtaggaaaactatttaaattttttaaaaatttataaattattttaattaaatacaacatatacaattatgaaatgaaataaaaaaaaaaatgaactaaaaaagcgcacacacattatgaaaaccaacattttattgtttatttttttgaacaattttattagatatttttggtttggaataattactttagaaattaacgtgaaacgacgtcgaggagaggacaattcacgagaaacgacatgtcgtaggtctgtatgaaaaacaacagtgtacaatttcataggaaggaatatatataaacaacaacaatcatttctttccacaacaaatgatcatcttcataccaattttgtcaagttatggagatgaaagcactgtttgttgtatgaaaagtatacaatattacatgattatttacattatttttcatcctaatcacaaatcacaaatcacaaccacacaagccagaatgagaatacaaaagttgagaacaattcacagaccaaaggcaatctctttcctggtaagaagaaaaaccattattagtacaatgaacataaacactatccactctccaaccaaaggtgaataattaatcatataagagattatctcaaacatgattttactcacattttgggatgaaggtactcatctatagtgagaggtttaggaccaccaaaccaatctatcaagaaaatattctcaatctctaatttaaagaactggaagttgtgatacttaggccagcctgcaaaaacaaataccccaatattagagaccaaaagataaaaagaaagagaaaataccccaattggcaatacacaagtatttttaccctccatctctgaatgtttggagaacaaagcacttctagcaaactctacttcttccgagttttgatcgatcaacttcaactgaaaaatcattccaaatgtttgagttgacataattttacaagtaccaagttaacactaacaccataacatgtctcaacaaacaaagtaactctttgcatcatcacatacctttcctgtaagtgttaacttagcacaagtgggattctcaggatctatcttaccacaagttccaacagtatgttcactaacagtaagtgaagcccttggatctttcaaagcatctcttgcagttggatcaagagctgtcaagtagaaatatgggacacctttgcctttaccaggtaccccatcactaaatgaaaccacattcctggatagtattatttaacacaataatgtcagggttaatatattttggttgggaaaattgggtttttaactaatgatgaagtttacaataaacaggcaaaataagctgaacaagaagaacatataagagaataaggaaaaccttacccaaaaggtgctcctttcaagtcacttgaaatggtactacaaaattaaaacaattaactgtaagttacaaagatttagagcttatttccaacaaagataataaggcaattgggaagtattaatcaaactatgaacaactaagaataaataaccattcttaagcaaagcagagtagaataacaaaaattcattccagaattaaatgatgccccaaaagaagaaaaaaaaaatgggtttttgatcagcaacaaaacaaaattatataatgaatcgaaagcccagaattccaacgaggcagagaatacaagagagacgacccatataaagtaaaagagaaagagagggaaattgacatactttaagacaccccaggaattttgagcgaccaaccaacgagcagtagcagcagcatcattagggtctggtttcttgttcagtgataaaagccgtccctgtacacaatcttggacagccaagaaaactgaaaccaaacacagcaaatacagaaagggaacacctttgcctattgtcatgttgtttataccaatcatatattatttttagttcgttttctcttttatatataatgaaaagagccaaaggttgagtgaaagagccaaggttgagtggagtatttatttctgtattcaataatatgctaatcgataatgcat

SEQ ID NO: 378961 - DNA, 3323 bp, Cannabis indica
aaacacgtgttttgatccatgcagatgctggctgaccaaggaggctttgtttgaagcatggtcggccataggttgatttcatggggtctgattggccgtagatactgtatccttaggctggctgtcctatgcttggaattagggttcgtagctggacactagactggttcctgggatctgtccagccactaggacctaaaaccctagttggccaagatcaaggctccaagcggccaacaaatttttctcattcctttgaccactacaagggtcttgtgacacccttggaggcatatataattgtggccttatccgtggtttctctttgaaactttgtataaggctaggtagtgcgtccattatagtcaattgtacaatatatgacttactatatgtcttagtaagtgtacttaaaattgtacttggtcgttgatcggccttatacattttgttttacctagatggtacccttgggtaccgttgacttgaatgtgcttgtagctttgtaaggttgctcacctccccttatttcttccatgcaggtagtgccatgtgttgaataggggaggtgacagctgcgtatgtctcttgtataccttgtacttatagttggtatgaaatagagtacttaaagagtaaccccgtgagaccctcaagtagccagattggctgtatggggtcatgtcaagatggcaggaagggttaccctgcctcatgcgatgttagctctgggagtgaccatgaggatgagagtctcagatttgagtttagtcgtgaggaagttgtaccaattaagaggaagagacacaagccttgtgttgccctgtctaattgtcctttaggtcgctatgatagagatggtaatccgttgaataggctcggtgagccttcgacacttggcctagatatgtctcggatcaatcccctgagcttgagcttctcgatgcgggttcacaaggtgataggtggatttcccctatttatctctctcaaagggcagttttgagggaatgtaggctaatgggttagtgggtagtatccattgtaagatacctcttctgaaccaactagcgcatcgatttgctctcaaattgatggtgtggtcagagtaccacattagcaaggactcatactatttcttcatctctacttttgtgatgtttccgcttatttcaggatgtgtccaacacaaatccccccagaaggtatcaagtacctttcggtgatgtttgtcttatataaggagctaggtttgcctctgcccactccttatgagattggatacttcttcaacttggagtcaattttgcagcaacgtcagtcctgatacttctatttcagctaagttggccaccagtggctaaatgattccaacagctcatctatgcctaaagtgacgagtatgcttataagtacttcaatgcttgggatgttgaagaggtccaccattggtgctttcaaagagtacaatttttcaagtgttccatccccacattaaaaataagggatatggcaaatcacattgtgtctctatcagctgagcaaagaaatataatctgctcgactagtttggacaatttttggaagtatggcttgtattctccagctccaagagttgtgagagtgccaactgtacatggggcttgcccttgaaatgggaaaccttctgtcttagatgatgatgaacctttgtctcgtattgcacgaaacttagagaagagagagaaggctctttgccggtgcctggcctgcggaggtccagtaggtgatacttctcgtcatatcaagcctagaggctaggtttcttggagacctacatgccctgtgcccgcatctgggggcaagggcaaggttgtagttgaggactctgatagtccctcttctaatgatgatggtatttgatagttcataacatcatgcttttactcttgtattgaatgtttatgattgctttctgacattgctactttatttttgcagatatgtcttccaggttgagaggttttataggaggatgtttagaaaagtgtaccggataggtgaggaccaaggtggccaggacttcccgtggggaggatgttctcggaccatcactgcctccccttccaccaaggcctacaccagttggacaacctgtgataaggcttgtccatcaaggtactcaaaggcctaacagaggagtagggtcagttgcttgacagaaggctcttgaggtagccaactagcgcatagagagagctcttcctttcttggacgaggatctgagggagctaggtgatggtggacctgacagaccttactctgccagacttcaagacctttctcttgtaagttatactttcagctctgttcatcttctttgcactgtataggctggctgaccatgtggcttcttacatgtggctagctggccttagaagctctttgtgggggggctggctagcaaaagtagtcccaaagggggactagccgaccagtgttgtggtttttgacactgaaattgttttgctttgttttcagaccctaatgaaactaagctcagctcgtgatggctcttgggaatcttcatatgctttttaggaatgtgtgaagaccttggaggcttcccttatggcaaaggaaaaagccaattctgagctagaagtcctcttggtagagcgacagaggatggtttcttgcctagagaccatgcttggctccaggaatgcagagaacactgccaaggctgccctcatctctaggctaaaaactaaacttgatgatcataagaagaagttgctggaagctcttgatggctagtaggccattagggttgagtatgttgacctatcctctgaacatacctatgagttccagttgcacaaccctcgtgctagactatcatacatgggcaatatggcttttgtggagagaatgttggcctatggaaaggcactattagagagccacatggagaaaaacaaggttgctacctatcgagaggctcattattaaggacaaacgacaaggagttggccgacccacctgttgagtaggtggtcggccaagacattgaccactaggccagccagcatgctaatgatggggtcggctaggactttgtggatagtgatcttgtatctccagattcagctccttctgcccctacacacatttagacaacatttttattagtaatattcagaatcatatttgtatcacatagataatgttttcatgttctgcatagcctgtgtcgttttatgacttgtgccatttttgcttttagaaattactcacttttatgtttcatttaggcctttttggaactttactttcatgtc

SEQ ID NO: 378962 - DNA, 1138 bp, Cannabis indica
ttttataattatatatgattttacatttgttgtgggccacatttttagaaatgggcattatagtcataatttttcaattctatagattttattaaactctaagagtattatttatgctaaatataaattatgcaatttttatattttttgctcagcgatgacggaaaatgcgatggatggccgttagagtcactgggtaagtttagaaccaatttcttagcacgacaaacatttgagatatctagaacgccaagtttaagtaagaagggcattttgggaattttgatttatttgacaacatcaaatccaattttactcaatcactcttgtctattccttaatttccttttgttttcaatattttgttaaaaaaatattaagtactaatgactaggcatacataggcaatcataataatttggatccaaatgagttgtcttaagagaattttgaaaagcgttgccaaaaaaaaaaagagaatttaaaaaggaaataataaaaaaaatggagattgcataagccacggcaatgaggcacataagacactcgtcagccatgaggttccagctggtgtttgtattgtattttctaatgtttttagttttgttttgggtttacacatccactcaaacacaacacagcataataaatcaatacattaaatcacagaacaagaagaagaaagaacattgacattcgtggttgtttcgtttcgcaacattattctattcctctatttattttttcttctaaacttcatctctctcatattgtgcctttttaaatatagtatctttaaagaaagtatctaattcttccaaacatatcaatttcactgttcattatatctaacatataataaatgccttagtgataaagaaaattgtttattatgtttctggtctctctttctaatccttgctgatatttattataatagttatataattaatgacctagatttcgctactgataaaagttaacactttcactgtctgaactttaaccaatactaaatcttacccctttttatataaaataaaaaataataataattttaaaaattataattttctattaattctaaaaaaaaaattattaaaaaaaatatgatgaaaatattaaattcataaaaaaa

SEQ ID NO: 378963 - DNA, 3537 bp, Cannabis indica
gaatttgtaaaaaagaattatttgttgagaccttttaaaaatgtgttcaaaaataaaattgcaagagcttaagtctaaactagacaatatcgtagagaaaaatgatgtttaatttattccaacaatatatatacatactatataatttgggattcaatcccagcatccccacacataccctctcgtacccttatggccatttaatattccactaataatgtatgaatattagatttctctaaagtgttggacagtactataatacattaccacagtgctcataatcatgggcaaagctactcgaaattcaaataggatggttgtcttatctgaaattaagattagttctatactatttggggcttatgctgaaataaaaaaatttaacagcaccactataagaggattagtgattttctgtcaagagtttggtttttaagaccaattaattaaatgattataattaatattgaaaatagtgtgcccatgtagtcaacaatatttttttattgggtataaaagaattgagaagtttttgatgggataatcttacattagccgtgtctatcgattttgtctattaagttctaagaataagaagcaaaaactagaactataagctcttcttctatggatttactctgcaaagggagcaacatacagatacatacagttatacaaagtgccttttctatctatcatatatttatattcactatataaaaacaacatgactacagcaccaaaacttcccaaagagatagagagaaagacagacaaaaatataagctatatacatactgagagagtttaaacatggtagaccattcccacctcaagagttgaagcatgagggaagctcaaagcatagcttggtcccctaaaatttcttctcaagaagtcataaccaatatttataactaatcttttcatgaaacctgatccactctttgctctaacataggaatgtcctaatataaatgccattcctgcttccctagcttccattaattcttgcaactctttttgagtttctctatcaattcttggactctctggaagcacaaaccttactctcttcctcactttcttcggagaccttatttcctgcaactctgctgatgtccccgctctctcggaacaatctcctccgtcttctgaaagtctaatgccttttaagttagacgatgcagttccaacaactgtcattttctcatcactttccgactcttctaatctcatgtcacattctggtctctctgaccggataaattctgcaatgcttcgaacaagatccttctcgaattccaagtcatccttgtgtatgtcatggtaaccatagcgcgctatgcatctgtaaagtctgtactcctttggaccaactcttcccactaggaacctttcttcaggtctaacatgaggaaccggaacagacttgacacagaggaaaacaacaacctggtggaaagctgggaggttggttacaaagtgagaaaatactgctgggataccagaaaccaactcggtatgaattaggcctattccccttactctaactatccctaaattcgggcctagaccaagaagccaattgatagaaaccttattttgaacatcagattcatatttcttctgtgttccataatgccaaacatacatgacaacgaggaagatgaatgagagtgcaaccgggacccaagctccttccctgaacttgatcagagatgctgagaagtagagtgcttcaatggagccaaagaagaaaataaaacaaatggctaggaagatacttttgtgccagcacaataccataactagagacattaggcaagtggttacaagcatgacagttataactgcaagacctgtatgataaggtaaacaaaagacatcaagtaagtaaaaaaatgatgtcttgcattgcatagagccatatttttgacataaatatagttacctgatgcattgcccatgcgttttgtgtccctaaaaccaatagtcacactcaagcataacaacatcagagtccagtttatctcgggaatgtaaatctggccgtgtactttagatgacgtgtggacgattttcacctttggaaagcatcctaatgctgtacactgttttattatcgaaaaagtcccagtgattacagcttggcttcccaccactgctgccagaatggctatagccagtacaggccaccttattttctctgaggtttcagaaggtttttactttagctaaattccattttgatgttaagacattaagacaagttttacataagtataaacattagacacctacctggaacggatacatagaaaccaatccggtaatcagtttctagatcgtgatgcatggaaagataagcagcttgtcccatgtatgctagaatcaaggaagggtaaaccacaaacgtgaaagcaatctgcacaatgcatatttttgttcagaggatttgctgcaatatctactagtggaaattagaccaatattttcttgaaatgagccaagttcaattctactatggtgtatgtacctggattgaaagttgtgagaagtgtcccagatcagcaaacatggcttcagatcctgccaaagagaagaagtgatattagggagagaaatacattatgtaaaaatgaataggaaatacagttcaaatacatagtgtagtacctgttatacacaacaatattccacccaatgacatccaacctcctctttgagttttctttaagaatttgtacatgtaatatggagatagtgcttggtagacatgaggattccaatgaatgatattatacacaccaatggcactgatgcagaatagccatgtaattacaattggtgcaaacagaaatccaactttatgtgtcccataatgttgcaaggcaaacaagaatataagcacagcacaagcaactgggacttcaacatctgtaagaaataaacgaatcgagattaagaaattgatacgattcaccttccatatgctttgagacgtgacagtgttattaggcgataggagaaactgatgagagaaaaatgtattcagttattttgtcatatgctttgagattagcagcaaagtatataaagtctagcctaaatattttcttgtaattcagttattggtttaattagttaaaaacagttaaagggtttcttcacgaatcataagcaatgaaataaaccaaactttcacagcttacaatggttagtcaagtcaagttgataccaaaaaaatttcttgtcaccatgatgaatcagtggagaacaaacacattgggcactagagtaaaagacagaagaaatgactgatatgcttactgaacagtaagaattgaggcttttctcttttaaaagtaaatgaggttcatgataaagcataaatatagaaatttatcatctctttgttttgatggccataattgttattattcttaactctgtaatctgataatggctgccaaagtctagttgataagacaaatttttgtcaccatgataagtcagtggaaaaacagattg

SEQ ID NO: 378964 - DNA, 1276 bp, Cannabis indica
aaatggatttagagaacacaccttaaagtgcatgaatataatttgataatgtataaatattatatacatgcaggtggcaagtacaaatttctacatagtattttggagcaagttttactcggagtatattgtatttcctttcatgtaggaaaatgtagttaatttttcatttaattagttttaaaagtggaccctattccaaattaaatagtcaaaataaactgaaagatatgttgttaaagtatatataacagatcataacaaattccatactttcaataagagccaaagtctattttagaaattaaaaaaatgaaaatttctatttagaaacagacaaattttatttcatgatgataaatatatatttttttttataatattataattaaatcaacaaaaataaactaaacatgccaggaataaaataattctcacagcacttttaactaagctgtcagcagtaaagcatatatatactttcaacagctaagctaatgagaaactaatatggatcattacatacttattataaaagcagctattaaggcaaagaatttaatatatataaagagtaaaaaatagtttaatttataagtgggtggtgaatgaagcagtagcagggccttctagacgaatatagtcatacatgattccctggaaaggggtggtcgtatttgttctggtaagaaaaatggtgttattcccttccacaaacaatgaccctggtatctctatattgaacagccaataaagcccatgaattccatgccttgctatactgttgtcttttcctattactccactcgtaaataatggaatcttctcatctgctttattaattcttacctgcatcaaataagaattttgtgcatttattatttcttgtgaaaaaattagttaaaaagaaacattagttaaggttaaatgttgtgtaacatacttgtaattcggaaatatgtgcggtggcgagggctatgcgcaatgcataggtttgggtctcagtcctattctgaagaccaaatcttatttgccatgtagtatctgtatatgtgctattattactcctcctaaaaaataaataaataaatataatcctaatatatgtgtgtggtattactattagtttaaattagaaagggaaatttgactttctatacttaaaaattttcaaaatttcttttttgaatcaatacattttacactatgaaaaatatgactctttttttaaaacttcaaaaataccccctctatctactttctctctctctctctc

SEQ ID NO: 378965 - DNA, 3457 bp, Cannabis indica
acataggcagccactgcaaccctctttcctctcggtctctctctggtaactctaacctgcaactttgattcctggtaaatataaccttgtacatatatatacatgtataggtaccttgatacaacttccatgagttgttggtaaatcagaggtgtccatgattgtccacaattgtcgaatcactgctcatattttaaatattgaattgactgagcatggcttctttggtgaaatatctgtgctaatttgacgatgatgcccaattagttgttgtgtttcatttgtgctttgtgaatgaaagttttacatttattctagctgcttagttaatgtagctaaggtgtttggttaaatgtttgaatgaaagaaaaaaaaaaagctaatgtttttgctttggcagatggactagacatattagaaaacataattttggatcatgaactggaactatatatgtaatatgacatatatataatgttagattatggttttgcttttgttaagataaaatgtttataagcttttttagctagctaaataggccatggggggatttcctgccccaacaccaacccactcccacggggaacttatggggacagggtcaaagggatggggaatgcactctcctccccgttgacaatcactgctaagtgaagtgagtggtgtgggctatttcgcgccagaagtttgttaagttactctgaatctctttttattcttctcaaacccaatccttcctcttttgttttgtttaatggtaacgtcacatatttctctggtgagatgtagttaggatattgcttgcttttcagtcttcttgagaaaaataacttatgtgcagcttagttgaattgttactctgttattacaatttttttgccttttcaataagccaacattgtgatgctacattgtttctgagtctgctgtctagttgatgaagtagagtggttgcacttttaggtgattgaatgttttctggtctgttagggatattgtttccaaagctatttagagagaaaaaagtgaagtttgagttctacttgtagatcatgcaattggatgatgaatagcttgagataattagttcattctggaactatatatccagtttgcaaggttttttccccttttgtgttaaatgatggaaagtggtatttgagttcaattccagagcatgtaatttggtgatatagattatattctcattacgcaactatatttcaattaaaaatgataatttgtgttgtgtttttcatgaagagttatgctaagagcatcgaagtaacttcattcttattgtctcagaaagattagaatcaagtgtgtgaacaatgttgccacctcggatgaagcaggccatcacagataacccaaagaagctggcaaatttgattgatcttataaatcttcctacgccattaagggagttcatgggggcagtctcagacttctcgtcttggctgtttcatgcgtgtctggtcatatatcaaggagaacaatcttcaggttcttctgttctgcacttattttctttttctgttagtaaagtcgtaaactttgtaatgatgggcaacatacaaaatgtttatgctctatttaataccagctagtgaattatatatatatatatatatatacttgtattcttttcaggaccacaagttttatctaaaatgtcttagcatatcatattactctaaactaattgatcgttgagcatctgtaaaatttcaatacatggattgttggaatgtctctatgcattgttttgattcaatttatagtgattcattaggatgagaattttatgttacaatataaaagaagctaaacttaatttttcttcctaggatcccaacaacaagaatgtggtcaattgtgatcataagttgaggagtattttattgggcaagcctcaagttgagttagcggatcttccttcattgatcaagcttcattttccaaagaaaacaagctaaattggcaattcaagacagcgcgccttgccttccttccacttccccaaggcgtatctcaagcaagaaacatcctcataacctcaattttggcatgttgtcataagttttgtattttgttttcattcttatacttgtaataagaaattaaaatcagtaatgctactttcctttcaccacttttgtattgagaacaagccgaacttttcttattaattacttgtcaaggaaaaagtgcttttctttacggagctaaaagtaaaaaccaagtgtttgttctagtgaaagttttaccattatcatgtttgtcataaaaaataataataaacaaaaaaaagtatagtaagagctaaacgtgaaagtttttcatactatgtaattttaatcaaaactcttaaattatgtaaaaacagtgtagtcaattatgaccgttacccaataacccatgactttcccctgcctagctattataatgaagagtacattaattttcatgctttcctctagacattacaattacacacgtgtgatatatacatactaatttcttttctttttatttttttcctacgtggcaatttattaatgcgtctatataattacatatgctgattcgcatctcataggattcctcctctgtcccacaaggcacaaatactaggccttggttttaaattgccttagtaaatttctagccgttggaaccaaaaattagacagcactgaactgtgtctcttcttcttcttcttcttttctcgaaagagtcgatcttcactttcgtccaatcttgttggcatatttacactaagaaagggcattttcataaccgaatcaatctaccccagtttaaattttgaaagctatatttggtattcacggccaagaaaatgaagggcgtgaaaggaaaactgctcaagaaaatcaaatcgatcaaacccgttggctatcttaagttccaagatcgagttcttcaggtgagtttctcaaatgggtttgtagattcttctcccaataatgacaatattcaagctccgagaaagtgtagtttcgaaggaacagaggtgaagaaaatcaaccggagttgcgtgacagtgcaagaaccagatgttatcgatgtggaagagctgatgaaagaccttgaagatgatgaagatatgggtgaagacttagacaacaaggagaacattggtccgaatatggctaagaagaactcgttttatctcaagcccaatccagagatttctatgagagctgaccaaggattaagtgagaacagggttttgaaagattcagaactatcgacaccagaacgtaaatcaaccccattatcagagatcgacatctcgtctttccggcggccttgatttcgaactcgcgtagcctattttgatccggagactgctcgatgcatttcatcaagcagtttttggaacatataagaatgagtgaagcagagagaaaaaacagagcagagg

SEQ ID NO: 378966 - DNA, 3390 bp, Cannabis indica
ataaactataaaataactagaaacataacctcatgacaactataatacaaatataaaaaaactataaaaaatcaaaaaatggtttattatttttattgaagaggtatttttataaataaaaaagttcaaagatcgtgctttagcttttctagtagaaaaaatgaaaagagaaaaaaaaatatatattttttattttgcatttttcttcaattattatttttatttttaaattaattttattgtattttaataattaaaaaggtatggattaataaaaatatgccacgcatgttaatatatttaagtgttacacaagttgtatagttccaatattccaaaacaaaataattggttctatcattggtatatttttctatacttttttttttggcattactcagtaattttaattaattgttttttaggagttcaaaaaaaaaaaatgctattctacaaatatttatacctaaatatattaggtattagtaacatacttatgtttgcttaaagttgtgttagttaattattaatttaaattataataatcaaaattaaatctaatacaatttaattatattttttaagtatataaatttaatttaattttaaatttatttataagaaaatatctataactaattttattaaacaataaaatatagtaataagtttagatattttaaacaatataattaataaatttattataacgtgtgattaattaattgcattaacgtctaatttaaatttaaattaatatctatataaaaaaaattatttaattttgttaatatttttaaataattatcaaagttatatattaataaataaattaaattagatatttaaaactattttttttaaaaaaaatgatgaataattaattaatttgacgatgttagttttaattatttattttaataaaaaattgaaaaaaaaaagttaaactaataatttttattagataaccaatttaatataaaagagatatatataataataaaagaattcattaatatatgtatatttttgcttaacttagaattcattaatattttttaggagaaaatccttaatttatatagtattgttattgagtatcaatgtgcctaacactttttatatgtggtcctttatttttttaaaagttacttttttaaattatataagactaaatgcttaattataccaagagtactataacaccgaagaggatactaaacaccactaatattttttagccgtaattaaaagactaaggctcgtttggtacgtcgtattaggtcgtattgtattgtattgtattgtattgaattgaattatatatcatatttttatgtaacactattttaaattttaatttatactaaaatattatatatttaggtgcccataaaagtcaatactacatataattttacataaaagtattgtatgaaatacaattcaatataatattatacattacaatacgatataatacgaggtaccaaacaaactttaagtgggtatgctttcattggtaacgtttaataatttataaaacactatcttggaatataattattaactttaagcttagtaggtcgatataacaaaatcttgttctgctttaagaagacagtaattaatattatttgaaattataatcttattgcatgtagctaattagtttactttttagtaattaattcttttaaccaaaaatgcagtattcaacactaacaccaaccacacagtgatccaaacctataacgaaacgacatacaaactctgcaattacatctacgcttcagacgaagacaccagccagtggtccacgatggacgcttcaaacaccgccgctaccagttcgatcacaatagcagttccgcttgtagaagaaggcaaaacgttcttcttctctggggactacgacggtgaacagtgcttcaacggtcagcgattccagatctccgtagctcacggcctaggcctccccaagagtctccaagaacctagtactgaagattcccctggtcccgtgtttggagaagacgaggatgatttggctccaaataccatcatgccttcaataagtaataaccccaaaattcaaacttttaaaagctctaatcctattgaccttaaggatacttcctacactatatattgaattgactctcttcaagggttgttatactctaccgttcaagaagcttaaataatttgaaataggcttgaacagtttcgataattgttaagcctatatgttccttgatcatgtttgatgacttgtaaaatactctacatctatattacatattaagtcggtttaaatcgttgttgtatatgatatgtgaacctataattttcgacattagatgcgctcaatatggtctttatctttcctctttataggaaatttagctctgatacataggaattaacctctataaattccagattcaagatcacacttaaacaaacaaaaattaaatcaaaacaaacaaatcaagaataaaaatcagcaaacacataaaccagaaaaatataacacggatgaatctaaatggctgttagacacaataacacagagatttatactggttccaatcctaagttcaatgtgaacttggtcatactccagcttgaaagcaatgccaccaatctttattgataatgagaacaagagatatcaatctcagaagctacaaggaaataatcatagcaagtcatccatggtgtaatctctcaacacacattaactcactaacccgagtgaatataatcaataatgttgctcaatacaattttccaatcccaaccctctctctctcagatatctctctccatttctcactctaacttctattgtattgtgtctctcttgtgtttgacttattctcttattccttattacgaaatgagaggagtagttctctttatatagctaagggacccaatatgtaagctgtccttttcgatagttaagttagttaaagactaactaactaaccgaatcttggttgttgggggttaaaagaataataccacaaattccaccttatttcttcaagccccaacaagctaagcatatttgtccaatggaggtggtaatgctttcatgtgtagctacttagcaactaaggttgagtaagtccaagaaatgcttgaacttactaacaggtaacaccttagtgccaatatcagcagggttctcttctgacttcactttctccagctcgattacttcttcttctatcttctttcttatccaaaacaatcgaatttcaatgtgttttgtcttctcgtgataaattagattcttgcacaaataaattgaggattggctacctgaatattgttggaaatatattttaccaggaacttagatctactcacaagtat

SEQ ID NO: 378967 - DNA, 4567 bp, Cannabis indica
tttctttctttttttttttgtttcaacatctgggattgtgtatacagtacagatggaacttgtaattgtgttttctgcaacatgttcagcttaatttggttagcatagtagtttggatttgaaggaacttttttcccatactcattccaaagtagtttgtacataacaagagctcgtaacctgtcatgtgaagggaaaaatttgctgtcttaactggcttaagggcaatgagcttatttttcaacttataagcatgcaaaatatattatatatatatatatatatatttatatatattacttccattgttacaaaatttcaatacatgtgtttgaacaaaatgagtgttatatcattaaatatcaaaacagagtttatcagccatttgctacatacaatcaaagaacatacataataacaataaataatcaaacactcaggcttttgattctaaatctcacaggctgctacatgttttcctattgtcaatgcttcctttcccacttcccctcacgtcttccatctcgctgctccctacgttctactacctgcctagacttgctccctcgagatccatgcctctgagatccaaatccaccaacctgtccatccaagtctggatctcctacactacccgtgtcaccggagtccttgcttccatctatattctcttcataactacttccacattcatctaaacgatcacgagattgcaaaatggtaggaagctggccagtaaattgtctggacccagatagtacaactgttggcattgacaccatagaactagaatcaagctgcaaactgccacttgtacttgttcttgtgctcccttcatttcctgctcgtccattatccctttcacgatacctttccctggggcggctgcaggagaagatgaaaaaccttaaggatcgatatatgtggcaccttaacatttttatagcaaattaactttaagaaatgaattcatttatattatctataagaacaatcataaggatacactaaatgataacatgataaagttcgttccacaaattgtaaatatcccaaaaactttctacaagacaaatgcagcatcaatgttgtaggttaacatttctaaacagccttgtatgtggcatccagatagcaaacacaacacgaagtcaattacggtattacatactggaaaaaagcatggtaacaaaaaaaatttagagattgaactaattacttcaagtgtgaagaaattttaacataaaagagaatctcaaaatgatgctgctactgaaccccttagggttaggggctgttagaccaacatctatgatccccatacatttgtagaggacctattagcacagtttcccaggaatttgttgcccctgatactccaatatattaaacaagaaaacaacttcattatactatcttaaatgtttaaaatatactcctccaacaatcagttttgggtggacaaagagattgtagacatctgtattaaatttcttaacttcataggtatactgtaatatgtgtacatcatttttgcccctattgtagggttgttttctatttttgacacttatagaaattataacctaaattcttttgtgcaacttactatttgaactctatttttaataccataaacatttcacaattttctgaaaaactaatgagatgtctgttataactacaatatacaccgtcatataaaaaatctaaattataatttctccaaatgccaaaaatagaaaatgttcctacggtaaaggcaaaagtggtataagttgtaaaataaacaaaaaatgtctacagctaaaagaagttataagaataattaaccactttgtgactgactgaacttacccactctgagcataggaagaaaactcgcgcctagatgaccttactcctgattcaacctgctccaattcccgctgaagttctctctgcacagttttataaaataaaaagaaatatcaaaaaacaacttactaaaaaattatcacttccagctgagactaaacgtatatataatcctaaaagtcaatctgtttttcattaggctgatagaagggacgtatttgaaatcaagtaactgctatcctgcaagagtggtccagatcaacgatgaaaaatccacaaattaaaagcgcaacggagataagataaaacagctgaactcctaacataataaaacagacttactaccattaatctttcaaaagaagggaaaaaaggcatgtataagtatgtgtttgtgggcatgcacgagtgcgacgtatgtagagagaggactagcgcagtctaaccatagttctaaaactgcagatcataataaaatatcttccaatgctcttttaggcaactggttcgaaaaaaaaaaagacgaaaagatttgtattgtgctcatataattagaactaaaagtcatccacccgttactttgtattagattcttattaataatactagatttttgtttcttcataagaagtattattagaactgaagaagctaagccacgtgtaagtaatagtgtaactagcagtttatctcttcagcaaaaatgtgaactgaaatttagagaaccttctttcttttataaaaattgagccagtctttggtcatataagaaaaccttcataagataatgcatctcaaatcccaaaaccaaatgtgttaataaaggtttctacctgtgtttgtctctccttctccatatcaagattgtgtcgcaattccctggtttttgcacgctcgagttctagcaatcgctgtctctcaatttccttctcagcttcagctgctctctccctaaaggaatgaagctcaataatattgtaatactagagaaatttatttctcaaaatcatgaattcagttgaagaatacaatataagcatattaaggatgcaacacctatcaagttcttgtaaaagctctgcttcttgtacagctgcctcttccaaatatttctggcgggtgtgtctcataagaagtttcttctgcctgcgcactgctacgtcttctcgcagtttcgacttttctctaacagaagatcataaaatatcaatatgagaaactgccaatgaaatttccaataaacattaggatagcaccaatcaatgaaacagtaacacaaataagaataatatggcagtaacctgtattatttactaaagcaccagtacaaaagcttttccaagtggttccagactacactcgtgcttatcattacaaagcataaataccactacaccttacacagctacgtaaccaaccaatatacaaaggaccgcgaccataagcaaatgacaaaaccgcaccatttttttttctttttgaaactaagatccccacctaaccctacaatatttagggaccagaaaactataacaattgctatataagtactcaggagggactcaaatctcaggccttgtgagagcaaaccacttgtctgacctacgcctttacagtaatgtacatcataactaatccttatttctcctgccaaaagtgacatgtattggtatcgaaagcctatcaatttctcaataggaaagaatttctcttatgaagatcaaatccttccaagcattggcaagagacttagacttcacctttatattcatttgtggaaacacaagactaattacagcagtaaaaggaacttttattattaaaataaaattatttactattataacaaacttatagtgtagccaaaatgagaggcaatagtaagagcagaagcggacagtctgtcctccaactccaaacaaggattaactacaaaataggaggaatcaactaaataccaagactcctattttcatacactacatattgccaaaataaaagagagtaaaattagtacatacagggagcaaatggactccttgatttgttgaaggcgtgaatcaattttcacagtagctggaaaacacagtaacaaagataagcacatgagaagcgttgaaaataaacttttaactgcaataaagtacttggatagcgctaatagacataactgacgctaaggaaaacagaatttacatgttaatgaaggaatctgacattcttcttttgaattactagatgatttttgcagagcctgttcttttttaagaaaatccaattctatttcagcctcctccatttcctgtaattttcataataaaataacaccacaaataacttgaaataaaaattgacatctgtaataacccagtttaccatctcttcttggtctactttgttggagaagaaatcaaagtacgacttcacagatgttaaattagccatgacctatcataagttataaattagtatgtgggaactcaatacaaaattacatcataaaatgagtcaacgaagttatgacaatatgggtcaaagggaagaaaagaaagaagcatccatgagtagctttggtgtagaaaagcacaagaaaatcaagccaatatatatttatatatacagtagaacctctatctaagaatactctattcaagaataacctttaatttgttataaaaaaaattaagtcctaatttgagctagttataaa

SEQ ID NO: 378968 - DNA, 1164 bp, Cannabis indica
aaaaaaaaaaaactgctacagacttgtaaaccaatcggcctctacttgctgaatttttttttttggccaattacaaatcactctattcatcacagcttctttagtggcatgaatcacctgatcttgtgcaatcttccctgagttccacaacaagtcattgcgatttttccatatgttgtacactagagcagtcacgacagcagtaaagactgcttttcgaaacctgtttatcttgactctttccagccaccttaacagcttattcgaggctgttgtttcaactctccaacctagccaagttttaacttgagaaagacaaagaatggagaaggaacattggaaaaataaatgctctgaagtttcagattgagttttacagaacagacaatgatcttctccaataatattaaatttgtgcatttctctagttttaagtctgtcttggattgcaatctataaacaaaagctatgtctaggtgtgtttagtctatcccacacctcatggccccaataaactttgttttgagtggggcaaagggttttgtagccattagatatcttgtatttggttgctgcaaactgttgaatgtctataacagttttgatctgatttttgacagcattcaatttcctccaataccagcttgcttgaggtggagcttggtaatcccaccaatgctcctctttaatgtacatctaatccacagattattttccttatttgctattgcccacacatattttgtcatcgctgcaatattccattctgaatatgtataaaattcgcttaaatcgtagtttcgaaccaaacgaaactgttcttatttgttagatttggtttgagaaatttattggtctagttttttattatcttatttattatattaacaaattatccaatatatattattttacagtttgggatacagttgcaatacgacgaaaaaaaagacttgtcactgttacagtaagaatgcttaacaaaatattgatttcgcacattctctatgatttgaagattaagaatatttttttcatgtttaaataactattgaacactaatataggaataggaatgggaatgagaatgagaataggaatggaatggaataaaatttaaaatggataaaaaaaaattgataaaaaaataattaaatttttttc

SEQ ID NO: 378969 - DNA, 10992 bp, Cannabis indica
ttttctgtatatgttcgtattaagaatgatcttcaagttggttatattaaagaaagttgtcaaaaattaatctcagagtcctatttgtactactttagaaaatacagggtctattttattatttaacaaaatacatattccaatcggtaacttttacaaaacacagggttcaaaatagtatttaccctatattatattaaaaaatattataattaatgagaaaatattatatatatatgtgttagatttgaataagtggaacaaattatttatataattccttgaaggtgagagagagggacacatgttatatatggcatgtactataaattaattacatataaaatgagttttgaagaattggagggggggggggggggggagtcatggcctctttgagctaacacatacctccgtccctgtacataaccattacaaatttccaataaaagttaaatttctaaaataatatttacacaaaaaacctaaattacatatttaataatcattttcatccaaaaaatttaacaacttgctcaaatggaggtcttaagaaattttcaagctattataaagttgtttgaaaagtattcaacatagaaaactaaaaatatacaaagcaaaacacgcacataatgaacaaacatgactcatttttttattcaaaaaaaacagccattttcagcaaaaaataatatatatatataaagtagttcaagactaacctaaataaaaattcaagcaattcacaagcttcctttgtgttgtactgatattgcccaaataaatttaaacctaaaatatccaaatacaatctagtattttattattttactaacgttttttttttaaaaaaaaaaacaaaattaaaagctattttcaatcaaaaacataaaagaaagaagaaataatcaaaactcacacaagtgaagctctaaacaattctcaagcttcctttatgttgtatgaagcttacccaaacaaattcaaacttaaaaaatcaaaatacaagatagtattactactattaattaaaaactatttggaaaaagatattataaaataaatcaatagttacattcaaactcacatttgcttcttagagtgattgtgatgaaatagagtagaagaaaattaagatttagtggaggaattttcagacccaataatggctgcctttttcggaggtttagagaaaagagtgaaaaaaattggggagaagaaaagagagggaagaatgggcaggctggcaggctaattgaggttttaaaattttagaagagaaatcacaacgtgcatatattggcccgtcgtgattggtaaatctcagcccgaatttttttaaaaaataaggcactaatcttagcgggccttttgcggcccgtcattattggtaaacttcagggcaaaatttcattttaagggaccaataacggtaggcgacaaatggcccgccgttgttggtcaaatttttaattatgaaaaatttctataatgccagtacactcaatgcccaccgagattgctatactcgagaattttttttttaattttcaagcttaactcggcaacacacatgtgccaagccaaattgaaacgctgagataggccatttttttgtagtgatttatttacatataatttttttcttcttttctttagaatttgttagttatattttacttaaatattataatttattgttggagatataaaacaataataatttgctttattttgttagtgttggattaaatcctatttgtaggtacatatgtaaaatgtatatgttattataaattgtgatacaaaataaagtgaccaattatattatgggtattgttgacctcacttttatccaacgataatgaatcttaattaaagggatgagaataattaaataacagaaagtaaagagcatcaagtaaagaaaagaccagatttgtagaggttcggccacttaaagttggtaatagtctactcccctttatgttgtattgacatgtgagaaataatgaactactctctcttgaaagctcttacaaagatctcttagtagtttactcatagatcaagaatattttactcttgagtgtgtactctctgaatagttttgtgttcctaaatagtgagatgatcaaacaattatttatagggatgaattatatgaaaatggtttccattaatctataacaaattaaataagaaactaccttagttccataattacaataaataaattaagaaatttatgttgattacctttattctttatagatacgaatcaattccaccaatgtagggattacatcgtgacatgcaagcttggaaataacgatgtgcatatctaaaattgctaactcacacatccttgtcaatgcatgtgagttacctatgtgatcaacttggtgggatgtctacctgtaactttgtttggacatcctatcatctatgcttggctttgaacaccataacaatttacacaacctgctaggagtagaatcattcacccaagttatgagatatgatacacgtgtcacctagattgatgccacgtcatagtacagaaattaggctaacattttcctcctaaatctgcgtggaatcttcttggtcccacgtggacttattcagccaggaagctgtccggatgggttatgcatgtctagttgtcaactttgatccgatgtaacttgatcgaaggtcctttcagtgtatggggcattaaatactgcttgaaagctatacctcgaatcacacattgacggttgagtgatatcgcatgcatgatgtttgtacttttgcaatgagtactaacgttcattttttggtggaaacctcaaatatttgaatttgaaatgaattaatttccccttgaagatgcccataaaagggaatcaaaccttattgaaactcttttagccattttcattcccaaaaaacctaaagccatgaaatttctcttttatttccaaatcttcaaagaaaattctacttgaaacttcattgttgataccctatgagtagatctataaggttttgaattgtgagtaagttgtttttcccttaactttatgcaatatttgtcaaatatgcacattatttttttgaattccttgctggaaaattatctattcttgaactattcttgacttatcatagaatataagatattagagcttgtaactttgactaacatttgattaggccttctgattctttaactacgcatcatttttgacctaaaattgatcatattcacccattccagagattttaaagatttctagtaatttctttgaagttttgaacttctaggtttgggaattccattttagaatcgaatccttcctttttgtctttaatcggcctagttggcattttaaactcgtttttcaaccttccctctatccaactctcatctcttatctcctatctttttttagatgaaccctggtgaattctagggaggcaaacaccatattgaccaggatctactttagcttttgtacgaagaccctcctcggctccatgtaaattcatcttcatccaatgaaaatctttcaaactctagctttgaggatgggaagtgagtagtgagcataaagcgtctccagagcctgcggtgcaacacaatcagtaccccgaccaaatacgtggagaaggatataggtattttatttgggaactaaagaattgttggaggccctatcttcctacatcttggatgtatagggtctatcctggggttgctgagatactacttgaagcccgaccatctctatctgctaagggagctgttgtagatgatttaattgtgactattgtaagacataccaatgaatcaaacaccctccccgaacatagaatgatggcacggacaaagaagaccataaggaaggctttagaaacaaaccttcagtttgcttggatgtttgctgcagctagagaagaacaagctaggcctttgaatgaggaaaaaattataaatgatagggacgttgaggtccaagcagtggaggaccagggcaatgtctgtcctaccaccgctcctgcggctgagggagaaggaaaagaagaggagaaggaattttgggtacaaccctttggctgtttcagtaaggatgaagaacctatctctgaggacggtgaagttctagtggctagttgtaattacgttgaagaagaatacactgaggcccgaattataaacaatcatcgtcaaaggggtgctcggtgggtcaccaccatccgtcctgaccttttagagattgactaatctccataaagaaggtcttctttggaaagctaaggcatttctccctagtcccgggtagttggtgactaataggtggcttttgtgcatggtcaggaccacatgcctagcaaggtgtaatgctatcgttgcatccttatttgaaggaaataacaaactattatcacatctgatcgtcccaacttactccaaaaggtataaaatatctttctatgttgttcttgttgtatgcttcacaaagatggggtcagccttctccccacaacactaattggttgtttaacttgaagtcaacccctaagcagaatagatttaggtacttttacttttctcagatgagcataagtggctgcccaaaaccacgaacatgaacgtatccaaaattggtagatttgtagaggactaccattttatcaaggacatgggcaccaatcgtattaactttcagaatattccatcttactgccaacctccctttaccctagaacttatgaacagagcccaaaaaatactgtaacttcttgaataggctcggaatatcaaaatcttggccaataaggccaatttcatcaagtgcgcactctatccatctgacaaagtccatgagctcgagcacatgattaagagtgttgcattcgagtagaaagctttgaagaaaaagaagaagaagaagaaagatccccaaggtgaccaagtacctgttgagcagtccattaagattagagattatcttgaagaggctgctcgtccttctatctaggtggaaggaaagggaaaggctattgtagttgaggaagaagaagatgactcttttgatgaggatactccttcattgcttatttgggaggctgctcccgttcatgtgtagggtagattattttttacttttacaccctgttcgttcttagttaattatgctttctgacaagtgttcattctttttatgctgtcatgtcgtagacagcagtgcgtcttttgaagaagaggtcaagtgatgcttcttgtaagaaatcttcgaccaaacgtctgaaggtgggtgatactctgctaaagagtattgctccaagcactaaaactcctaaaattaccactgagggaaacctgactgttgtctctgtggatgttcatcaggtggtggttttaattaaattcctttgaccaagaaaaattctatgtctcaagcatctactgcttgggccaaaatctctaagggggcaaacactgagggacccagtttgccaagtccatttgctactctgtccgcactaaatctagagaccaatgctcactttctatcaggattgagtgatgcatgtggtgaatgagcaacttactagggtggaggagatgtcggtggaactgctaatgggtggtatgttgaaggaagccacccgagtcagtacttttccttccattattatatacaggttttgcgtcgtgcacgtttaaccctattttagcgtgaagcttaatctaaagatggcatagacttattccagagcaaaatctgctcatctaaaagtcacaatagcccctaacactctgaagaaaacactagaagatgccaaaaaggaggtcgagcgtcagacttttaagttagggtgaataaacaagccgattgctgctgcaaaaaagctcatcaaagatctttagtaatagattgatgatacatcgtccatagccaagcttgaggaggacctggaggcggtgaccaaggaagtgaacacttagaaggaggaaaaggaaaacctcagtattctccttcaaaatcaagaagcgaaggtcactacgctgattgaagagaagaaaaccttacatgagactcttgatttttcacatataacctttaattctgatcaagaaacttttgaggttgaatgggaggcaattcaaaaggaagttaagagctttgaatcagctgccttggatatttttatgagttttggaaggagaatctcaaagaaaactttgactacctcaaggacaacaaggatgcttatcttggcttttgcaaggcacaaaaatctgaggaggaagctaagattgatgacaacaactcttctaccatccaagagcctgggactcatgatgtttgatattttaagattttttcatctgtttggcttactggcctatttttcagtataataaagctgaccaagcaacttttaaacttggaaaatattttgattttgtttaagacaactggctgtccacacatcttttaatcttggacttatctttctttattatcttaatatgaatattttcttttaagtctgaaattttagttttagtttttgctcgagcttgttttttaccaatgcttgtacagatgtagttgcccctcaagtgaccgagcagacttttgactcttggtacttgcatttcataagttttattgtgtccatcaagtttttaggtctaagaaaactttttgtacgcattttaggtaattaaataatattctataattggcaaaaaagatataaaatctacacaatttgaatgataattaatatctttattcatttattggtcgacatgtactgttactgtggtaatgtacatatattgaattataaaagctattatatgatctaactgatctttagctaattaaaacataaagcaattcaacagtatattctagccaaaagacatactcaagagtaatgattttgaaaaatatgtactttgaaaatggtcatccgaccttagtaccagttattttccaaacgtttgatcgaggtctactcagaaggccaccacttaagagtaggtagtcgagcattgtgcaacttgtgtggtcttcagaccttttgcactgtaattgcataattgttcttgtttaattaccgagattttcaaaaaatgaattaaaaataattagcaatgaagaaataaataattcaaagagaaagagtaagaataatacaaacaatttttacgtggttggagcgttaatgagccttatcaacaagttgatattatttgtaattaaagctagaaaagcctttgggaatacaatgagcataaattctccatttttctcgagcaagtattgcaagtgaattcaatccttaatcaaaagaattcattagatatttatagtgtttagagaattgcacttatttttcctttttccctctaatggagagtttacattgaattacataatttgggtcgtcttgtgaagtccagccaactaaggagatgattgctgacttggcagattagatacagtttaattagtcaaaattgtgtcctatacttgtgggcaattaatcatgaattaatttcttgatttccattttaggtagtttcctcttttatcttgatacaatcttttgtcgagatccgaggaacatttattcccttattttgtgtgcttgattaaaaagggaagttggacttgtcttccaagaacacactatctgacctttcggtctcaagtaccgaaactgcttctgggtagaggctgtcactggcgaaagtccatttggtcacggagctaagatattcttggaaggatctatatgatccgggcttggccaaaattatcatctttgggacccactagtgagttttttatgcaaaccttggttctatgtgtcccttgttggaaacacagataacatttaccgcccaagcttcaagaatgttgcgtacggtggaagcttgccgcattctatcaatgtcgacatgtggaggtttaaacgtattctttcatgactttccagatggtaattgatcatggaaggtaacttccatcttcagttttggtaggtcaacgtggcagttacctagtggcggaggagcacatatattgaggggttacttttaggtaaagcttttgttttgatgactttttagtttttggcgcgagaattaaaaaatagcatctttatcattgatttgtgcctcaattctaaagtgcattaattatgttgacatgcttgactattggagtccccaaccgtcgagtgtattttgtgcttttagagatacgatcgtggatcgtccatccctcttacgtggatagccatcttgggtataaatacccctaaaagactctagttatcacttttcacccaatttcaaatttttatctttcagagctctagttttctctgtaatctttgagagttagaactgaacagaaagccaaaataacctaatcgatctggattaggagtcgagttttgcacccaacttctgttaaggattagggctcaagaatttccaaattatccacccctagtgatcgagagttccatgatagaagaagttgtgactcttgatttccacacaaagattgattcgttaatcaccgttgcccctcgtcttgcaaaagatgtgctcaacttccttaacaaaacctagcaacaattagtttgctacctttgctttcattactaggtacatattggcttcctttctcgtcttttaacggtgttatttggatttactattgcatgttctgtttttaaatgaaatcgggatttctttgcctagagactgatattgtttgtagatttatgaattgtaagctatattgccttctagttttgggtattttgttgattccattcctcctcttcaatgttcctgactttccatttggaacgaatgacccctgaagtttttcgtttcttaatgatatgtctaatagggacctctccaagcagtttatggaggtggacttccctactcccattctatattaggtagtttgggtagttgattgcttagtcttctgtctttttacagaaactatgtctaagaggatctagaaagaagaggttgaagttgaagaagaaattctagagcaggaggatgctccaagacttgttcttgatgatagtccatggaagatggaccaacatgtaaatacgtttaggaattacaataacttaatgaattacaagatcttgtaagggctcgaaagtgttttgggattatactagaataggctctgcgttcatggagagaagcccagtaaatgcacggatgggggcttcgacatctagagctgggcacaagtggaaatgggtgcaaaccttccgttgaggtgatacttcaccaacttctgtgtcatggcttgagtggcacctttccagttcattcccaaagtatatcgcctttattttgggtggtatgtttaatctgctcagcttaataaatctgcaccaacactagaagagatcttgtacttccacaagattaaatcccagcctatgtagggtcacaaggaaaaggtgggattctatagactggagcgccattccaagagtgtagcttgccccattatttccacaaagtacaagcacgacttttgggattactggttctacacttttgacttcccactaaagagagtcactgcacttaacttggactttaatacaacaagtaagtgtttcttctgttcttgggtttcacgtctctttttttccttttgttatattttgatttacatttcatgtcttccagattgccttccataatttccactgactctagagtttgaggagataatcactttctataattccttattatctaaggagttgcaggtggctcacatggtgaccaccgagaaccttcaaagagttggcctcattgctcctcattaaaaaaattattcaatgtcagtccaggagtcaattcaggaatcacacaaggggatcttgatgaggtgaaggaggccattgcgaccataactattgaatagtccttaaaagttgtgaaggttgatgaatagtggctagctgattggaagagcaaatttctagaaaaaattaagcgaggttgtagagctcatgatccgttttaaggacatagtccccaatgaaggtgctgagggagcgagcactttttttagtgatgagacaccctttcatataattagggttccttccttggcagatttaagtagtactgaccaaggggcatttgatccatatttcttaagcttagacaagaataagtaccctagcagcgacttcatagataaacttgattgcatagtaaggaatccaaactattttgttccaccagtgcatcaccacgttagagtggatgtacttagtaaaatatctttcccagggttcttctagcagaagactaatttatgtcgagaggatattgccctttttgcaataagaaaaattaattatgctaagataaattgttcgtatccttctggcatattatctggtaggttgtatttgtaattatctctgttgtaatttgatgtgtgatatatttttcttactccttgcagaacaacctgccacttttcaaatgagtcttcttaacaacttcttagatgctaacaggggagttcttctggccagtttcctttggcatcttcgagtttcttctttagtatatccttcaaggttttgttgactgcttcaacctgaccatttgtttgaggatgtgccactgcagagaaacttttgatgatactatggttcgcacagaaatcggtgaaagattggctgtcgaactgtttgccgttgtctgagactattttgtacggtagtccgcaccggcatataatgttcttcactataaattattgaactttctttgatgtaatggttgcaagtggttcggcttcagtccacttattaaactagtcgactgctaccactgcatactgcaccccgcctttacccttaggtaactgcccgattaggtcaatt

SEQ ID NO: 378970 - DNA, 7558 bp, Cannabis indica
taaaacacaagtattaaacaagtagagcccacctaagtttttgtttcatgatcaagtggccacaaattcccaagtgaagaaatcttgaatctcaaaacttcaacttacccacatcagatttcacctcattctcctcaaatctcaaagctttttcgagtttagactcaaaaagcaccgatctttgaggagaagaatgaaaatgggtttcacaatgggtctgaatcttcttcttctcttagctatggtggccacaaacatactctcactttaccatctctcttccaatattcaacaaccgaataatctgaacccttcatcaaaccccactcaaaaccaagtccctgattacctaattcaccaacttcaaaccatacgcgccaccataaaccacctcacgcgccaccacaatcaccaccccgaacaacaacactcaaaacccacttcaatgccttcagatctcattctctactctcaactttctcctatagcttcatcttgtcataacaacccagaactactctttacttacatgaattacactcctttcactctctgtccacttggatcggatgatgttgttgaggccctaatcttacgtggttgtcacccacttccacgccgccgttgtttctctaaaaccccacaaaaaccctcttcatcttcactcccacataacccttttccagctaagctcttagatgaagttgttatgtggaaaaagtactcttcttgtaagagttttgattgtttgagtaagctaaatcccaacatgggttttgatatgaacaatgaagtttcaaactttttgagttataagtctgaattagaccttcctgtgcctcaacttcttcagattgctaaggctgctaattcagtcattagacttggtcttgacattggtggtggaacaggtacatttgcagctagaatgaaacttcataacataactgttttaaccactacattgaatgttgttgctccttacactgaggctgtggcattgagaggtttagtgcctcttcatgtgcctttgcagcaacggtttccaattttcgatggggttgtggatattgtgaggtgtggtagagctattaacaggtggattccttctgcaacacttgaattcttgttgtttgatgttgatagagtgttgaggagtggagggtatttgtggttggatcatttctttagtaaaagtgtggatcttgataaggtttatgcaccattgattgggaaattgggttataggaaagttaaatgggctactgctagtaagactgattcatctggtttgaagaatggtgaggtttacttgactgctctgcttcaaaagccaataccaaaatgagattttttactctttttttgaggtaatgagctttatatctatctgtatatatatctatatctatatcatttactgttttgattagtttccatatgaattttagttggtggggttggtggtgtagctataatttcagctacttaaagtagatcaatgagtttatgatactcaaaactcagatctttgtgagttactagttaggttattttgatggtttaatgttggccttttttgtattttgaactcaattgatgtatcatttgagatccaaagaatatacattttaggaagtaaaatcttgaagagagtttatcatagtatgttgatccaattcatagtgatggctttgtatgagaatttattagttttggtgtttgaatagatagtgatatcagatttggtaagcaataaaagatctgatttattgccccagctcataaaaaatttcatgtttatttttgggtgatatgttctttatagtttcccctcatttgttgggatcttcttagagtttttgaaaacaaaaatgaagaaaaaaccacttatagtttattttatgcacttccaaaatttgagcactgatagtattatgcatcggtaaaaaaaccgagactcctacccaagaggtgtagctcaaatggttaggcatgtggtttgctcccaacaagttctaaggttcaagtctctcctgggtacctacatagcaatttctatggtttcctgatcccaaaatattatgcaccagtaaaaaaccgagctcctatcctagaggctcaaatggtcaggcacgtggtttgctcctaacaagttctgaggttcgagtccctcttgagtacctacatagcaatttctaaagtttcctgatcccgaaatattgtagggtttggtaggagtcgtagtttcggaaaaagaaaaaccgagctccttgttgaaccctacaaagattttaggtaatcaaaagagactcgaacctcagatcttgcgaaagcaaatctcagatctactaactttttgaccaataacatattcataatcataattaaatcaacaacaactcaacaatgaacatggccctacattatttttagataatgatcttacttaatccattttcttgatcttaaactttttttttatttgcaggaagactttatagaaaggattacttctgttcaagatttaaagacttgtcttttctcactttgagaagatggatataataaggctttgaaaatggagtaagaaagaaaacatatttatttccattgaaggtgggttatattatactttttctaattggtttattaagattagggggcaaaatttgtggaatagtagatgaacatagttgggataaaaggtgaatttgtaaatccaccaaaagatccaattgaagaaagaaagaaagaaagaagtgataatcttttgttggcatcttgaatgttttgtaagataaagttattattccttaaattttttttagaaataaaatattgtgaaaaaaagttaagctttaatttgagacaattcttagcaagaaaatggtgaaagttgtatgtgaggttattattttatttcattgcaaaagctttgagtccatgttagaaaagtttagaaggaaaaactcaataaatgtcttgtcatgctaattgcttactccactttgtcttcacatttttctttatacttttacaaaagcttttattatggtaatattactctaatattgaatgtacatcttcatacaaatttttctattagatattgaaaattattgatccccattgtttctttcattggatgtcttgaagtgtaaatcttagcaattaagttattgactattgaattaaataacaattaacttctttacactaaaaacaattaaattatatatatagatatataaatcatatgttcctcatgtgttatatttgaaatggggccatttttattttttttcttaatttttttaaaaaaacagatcatgttcttcaatctagttagtatttagtagcaattgaacttggatgatatatttgttgaaagaaattattattttattattattattatttttaaaagaaacaattataaatagcaatcgatgccatcaaatacacttaaaatttaagatatcataaatttatatttaattaacataactgtaatgattaatatttgattaaaataagagaaatacttagatgacacaaaacaagacccattgtgtctaatgtctaatactgtttaatatcgctatttgtgtaactcaatatcagttctcttgttaactaattagtaccatataatgtcgctattttgcttatttgtataattcaatatcagttttctgttaaccaattaggaggagtagctttatccaaacttttattttttgatgaaaagctttatccaaactcagtaagcttgtaagaaccaaagagaggagattggtttggtggtgtggtgagtgagaggggtgacccatggaaaaattagagggctctcagtctcaggtgtcatgtcactatcaactcccactaatacaaaatagtacaccatgcatgggcatgctacttcatggaaattattcacacaacaaaacaaacaaagcccatcacaaaaagttatatcattgacaaaacttttgacaaattagataatgataatgattattatctattatattgcttactcaaccactatgcaacaatgtcatgcaaaatattttacaaaaaaataacacctttattgaggtgttttgatatggaatataaaatttaaattaaatttgaataataaaatatttgtatttttaagtatattttattttttcaattaaaatagtggtgatattaatcccctcaaacgcaagagtttcatattcccttcaaatctactccatccaactgtattctctcaaattaaaattcacacaataaacaccctcattagatagcgtttaattaaaaaaaatgaaaatatagctagaacaaaaataacattctaatactttaaaataaaaccaaacaaagaaatacaataaaagttatttcctttctattccatttcattcattctgaccaaagccgagactctttttaaactaatacaaatggttgaatgtttttgtacacaagtgtgtcaaatttactctatatcattacttaattttggatacatttataagaattttgactttgaccaacatgataaaatttatgcaaatttatttagcttggaaggtaaacattgtcaacacttcacttaaactccatagcatgagatatttaggtgtgatagaacaaaatattactcaatgtaactcaaaggaaacatcaattttgtaagagaagagaaacatactaacaagttaactaactaagtacctcttagatgtctacttaagaccaaagcattaacatgagaagtagaataagaccatctttattggtttcccaattatttatattccacagagttcggaaggtttagtcggaaactttcctcctcagcaggtgatgcaactcgagtttattgatcttagcagcaagtatgaagtcattctcggtcaatccacctgattacattacaattttaagagtacagcaaaagatgtcagtccagtccagcaaatgcttaagctttgcaatagagaatttgaaaatttcaactagagttcataaatggaatatggttaagaaaataaataaatatttggtgggtcacattcatttatgtacatgatcatccaacctatgttgaaaattccatctacaattaacagtactataattatgttgagccaggagataaaagttctgagccaattgaggaaagagacaaggtatttcgaagggcaaccacatgcaaaatgaagaatttcacaccctaaatgtactaagacttagatatcttaacatgtgtgtgacatattcaaacataatttaaacatcaaatctttaaccaaaaagtaatttgatgtcatatgtaacaatcaaccactacagaatatgattactaagtaattaactacactcaagaacatgatagacataatttaaaccatagtttgatcaatgacaaagctcaccaactgcatgtgtccagatctcaattgtgacattgttccatccaacaaggtgaaggtcaggatgatgacctgtggaagcgaatcgacataattttcacacaattgaaacatcaatcatacatggaagattagaagcatatttgtatccgaaaagaatgaaatttcaagataccttcggcttcagcaacatcacctacaagcttgaataattccaatcctttagtgaaactcttaactttgcatgaatatttcagtttcagtttgccatcttcattaatcagattccaaccatccacctgaaagtgtgtaacaataaacacggaaaatttttaacctttttttttgacattagaggaaagattcgaactttggacatgacactaatctagatgtaagcaaaggcattcaaccacaaaccttttgaatcagatgatttgctgattcttcggtcatgggtcgcaaatctttcgcactgcagggcacacatttctttgttgacaaatctgacataggcaaaaaataagatcatttttttttctaactataattagaagaatatcacaatctaactaacacacttttgacttttatttcattgtatatgtcttaaaagggccaatttccattacaaaataaggtcagtatcttcaaattctgaaaataaatagacaagcaataagtgactgaggctaatagaatcccgaaaacacacattctattggcaaaagatcatccatggaaagaaatatcaagctacacataaaggttgtaagtgtggctcagcgcacaaaggatggttaattaaaggtctacacgcaccttggccggtgcaaaaggttctaaatccagaaactggctttctacttgatgacatcgcttcattgtttggaagtatctcagataattgggtgctggcactgtaagtatgtagaaatttatctacatattatactttaaattccaaaaatggtgagggaaaaacaaagtgaattatgatgatagaatacttgtaagaataattaagagcctcaaatttaagtctttagatactcttgtattaggaaaccaccccaaatgcatggaaagagagtcagagcaataaaatgtgttttggaaaaccagaacaagctttaaaatactaccgtgggttagagaattatgtcttaggaaactgaaatgctaccgaaaaagaattattagaatattgattttagttgagcaaacacagaactccaaatacaaaacattgcacacagtgatggtataagctacacaaactaatatcttttagcatcattctttaaatttaaatcaaattctttaaatcccaaacaaaagtgtgataagactgcaaaaatgtatatgttagtagaatattgaagacatttcctttcaattagcttctcttttccacattcagaccaaatagcttatgcttaggacttaggagatgcagcacataccgatgctcgcgaatacgagcgggtaaacaaaatcaaatccccataaactaatggtgattagctcaatccaactacatcttgatatcttttttcacattttgttgtctcaatgtatgtctaacttctcatacctcttcatatcggttcatctacttcggatatcagaacacaaattacataactactacaacaccctaagttcaagttcaatttcctgccagtgaagacatcatcatgaagagctgataagatatttcaatactattgagttaatcaccattatttccaacgacttaactgaaaagtacccaatgaatctctctgctgatcataaatgcagccagattataagcaagctaaactctggacctaaacatcttctctcttagacatttcaacaaacacttgttgttcaccaacccaaaatctaagtaccaacaccaaaacacaaccaatacaaacacccaactcaatttgaacaacccattaatcttcattaaataccaacacaatgtctaataacacaagaaataaaactctaaatcatattctaaacccatcacgagaagccattattaaaaaaagagaagctaattgaacaaagatggttccttattcataactcatacagactatcatacatacatatatagc

SEQ ID NO: 378971 - DNA, 2322 bp, Cannabis indica
aataaatatattaattgaacaacaaaacaatttttatttaaaactgtatatgtccacaccatgtgtcaattccatttaaaatataaatatctaagattctaagagtggtagtgctgctatcgtatgaaaccaaagataacaagtcaatgaaacccaccattaaactgctcacacgattcccgaagcaaatgttttcttcgattgagctgccctaccttagaccaaaacgacgtcaattgagtcttctaacaaaaaaaaaaataagcctgtagtaaacagtcgaagagaaaatgaagttgttattttactcatctgtaagaaaataaataaataaactggtactaaaaacggcatcgttcgtatggatctcaaatatgccattgccaaaatatgccaatggataataataatttccgttgcacgatcacctctttcagctcccacgtggcctataagaaacaaatttaacggtagaatggtccaaatcctgaaatgacgaaaataccctcccgtcttcaatgccctccaaacttccaactgacaaaatgccatacatagtcacgcggaattaacgcctcaactgccggtgggacccattatagaatggcagtttctgtaaataaaatcaaacaccgaggctcaaatcgacaaaccgtattttctcaacagttatttatttttatattattagttaagctccgctatacattatatatactaatactggcacactcgcacccagaccaagaaaagaaaagaacaactcaaaaagcttcttagattaaggggctcactccagtctataaacactattagaccttttgcctattgactctaaataactgtcggcaagccattctttctgactgttcacccttatagtataaggagtcagaaattggtggtagcgccgcctagattaaccggagacaaacgacaatgcagttggtacggtcagtttgttttggtgcactaacactcctcttggtcttcaagtatagtttgttggtcgatgcggctaagcctcagtcccacagtcacctcaccgacactcgttggaaacccgccaccgccacctggtacggaagccctgaaggcgacggcagtgacggtaagagtcccattacattgctcaaaaaatgtccaagccaaacccatttatttttaacaaattgttcaccctgtattctcctacgccaaaaacatgtttttttttttcccttaccgagttgggtatttttaactgcttctcttctctccgtctctttctttttttcactgcttaggaaaaaagggtttaatttggcttttcaaagaaaatgccaggaaaactagccggctgaactctgtttccactcattttgcaatgcttctttaattttagtggccattggctctttttctacttacggcaaacaaaagcaaagtttcccgagttgggtttgttttctttttctttttttactctttttttctcagtgaaaatttctataaaaaaaaaaaaaaaatcatcctggtcaactctggtttgaccgactttttactaccttggtctggtccaattttggtgacacgttatgttgttaaaaaaagggatgaatattttgtcaatttccaggtggagcttgtgggtatggatcaatggtggacgtaaagccgtttcgggctcgagtgggggcagtgagcccagtgctgttcaagaacggggaaggatgtggagcttgctataaggtgaagtgcctcgaccacagcatctgctctcggcgggcagtgaccataatcgtgactgacgagtgtcccggtgggtactgctccaatggccgaacccactttgaccttagcggcgccgcttttggccgcatggccgtgaccggtgacggtggtcagctcaggaaccggggcgaaatctcggttgtttaccgaaggtatgtttgggctttttttcatttgtaccatgttggtcggatctccttcattccctctatcgagattatagttttatttttattttattcaactgtcactttttttgtcacttccaaatttcgtttccttcctttccttttactttctctttctctttttgtttttttttttactaaactctaggtattaattggtattatatttgcaaccaaaaaagttacataagcattaggcactctaatattaaaaaaaacattaacttaaactaatttttaaaatttgttctgaatttttttaaacaaaaaaaaaaaaaagaattgtgtatttttattttaatttattttgtcttagtgcttaatttttttttttacttttaattatgttttttttaaaaaa

SEQ ID NO: 378972 - DNA, 5092 bp, Cannabis indica
gtatattggcctagtagctatgtggttggtgcttccaaatttcattttattttatttatatatgttctttcctttaaattttctctcatacaattcatcggcataataaatgatattataattttgcagctaactttttattctctttaaatgtcaacttactatttttacatcttttttttcttcatgcatttgccttcatttatgagactttctatttttaccagtttgctatgcttcatccatacctcgaagattccattgcacatacattcttaataactatatgccttcgccaaaaaagaaataaaatctccattaaaaattaaaccaattcttattggaagagtcgtagtaatttagtagattacattcaggagcatgtgactcctgcgggaaccctaaagccatctaaagaaaaggctaggtggatcctggaactcatcgcgggaccgcgctataaaagtaaggcagggctcgcggaacatatcgttacttgttaacataatataaagtaatgagcattgttattgaacaccagtgatccttagtattttctagatgtgacattttgcgattagttagtgatactctatcaaaattattatattaaattatatgagacccgatacttaatttcaccaataataatattaatacataatagtattctctagtatttctcgtaaagtaatagcatgtgttgtatgaggttgtcttggtgactggtaagttttaaattttcttagcttccaagcagtaattcctttttgggatacctgactactatgctaaggtgtccttgctaataaagaacttttacatatttcaattctattatatatatactttcattctgtatatgtttttttttatataattattctaataaaaagttaaaacactagagatctatagcatatagtttgattccatttataatttatatactaaaattaatgaaacgtgtgcttttctttatgccttcctttgacattttctactagtaaagctgcaatagtgatttttttttggttgtcgtacggtacggtatgattaattggattcattttgcttataattggatagtgaaaaatatcattactttctttttattggacagcaaaaagtgcaataactagttcatgacactataattaagatatattgctctatacaatctagggactaatctctttcgatttcttcgaccaaaagattatggcacagatcatcactttggcttctgttacaagctgtttgttttataataaaataattcacctaatactgaaaaccaataaaagagaatcaatacatctttgccaatcataagctttgtttgattgtttccacatttctgttacatatatgcttacacaattatggaaatggtaatgatagtacatgagcttgccaatttacatgcttgattcgagtgaactcaattatgaatgagagaaagtaagagattctaacgttaaaaatttctcacacttcatagttcatacctgttgtttttcactttattggtatagctatcatttattatagccccaagctttactgaaaacctttccttgagtacaaaggagaacattctcaattaggaaaacaagttattaaaaatatatcatatcccaaaattaacatttcctcattagactaaaaaaacactaattctatcttatctttttatctccacacactttatggccacctgttattctatcattggaacagttagttattttgattacccaaatccccttctttcatacccctctttttgtcagtttgtagcccatagaggaagcaaggcataaagaccaattattttcttcaacaactacctacttggtctaggatggcttactagaaaccccaataagatattttgagataaaaacacttctatggctcgatctgaaaattcccaattttctcaagtatcaatctacaagtatacaaacagaaaaaaaaaatatatttatagataactgtctgaaacatgaaattaaaaaggttccttgaattcatgaagaaaaaagagaaaaaatagacatgacttgagaagaataatagtatcactaatgtagtgaaaccccatttatttcagaggaactgaataagagagtaaaagggggtctagatattttctaaatacagaaaagaatcataggagataagaattatagcaaaccaacatgagacaaactcaaaaaacaacatcccaatacaacacaaagagaaaaagaaaaagaaacgtggtatatatacggctaaaaaactcaaagaaggtcccaattgaacttaggttggaccggtggtttattgttggttgtggctggtggggatgttgaggaagctggcatcggcaccaacgctgctggacctgcagcatcgaatgtctcccaattcgaagtaattacaactgcacccgatgatgctgaatgcctcgaaggctggtgaggctggtgtctcggcgagtggccaatggaatgcctagcttcctgctgatcttgatatgttttcgggttttgaccagtggaatgatgatgccttggctgctgctcttgggcttgtgttgctctatgcccattggattgcctttgttgagattggttaggtgtattatttactccattggtagcggccattgaattcttcacctttaacatatccagagtttccacatacttttgtactctccttaccttcaaaagaatcataatgaatggtattcacaaatttagtactcaaatgggacattatatcaaagctaaataaaaaactacaaactcaacaagaacttacctgcattttcctctgcaatttcacatcaccctccgcaacaatcccatctaacttaagcaactgattcatcaatagttcgatcaaattaagaacatctgtttcaacaactttaccgcctttcataattatcgattcaaaagccgaaacctgtcatatgtttttgtgttcaaatcaaaagaataagtaactacctgaaaacgaaatacagaaatcattaacataaaaaacacaagaaggggaattaagctttatacccggccaccaagtctgtcaacttccaagctgatctctgagatagattttgaagatttctccatcttggaatttcttctcatctcaaggaaccgtttctcctggctaagtgggtcttccaacaaacaaccttcgatcggtctttcactcctgaagtgtccaaaaacgctttagagttcctctctttgtctttgaacaacaatttctgatcttcatggtgtaagccagttggacccaccaacaatttcttcaattcccctataacacaatcaatccaaactcaaattgtaatttaatttcttacttttttttggaaaagtaaaagaacaagaaaattaagaagcgagtaaacttaccgaatgtagcttgggaattgatatagatatcgtggtaagttgacccatatttgactcgaacccgaatcgttggtggcggggctttggtgtgatcagagtcagtgcgtttctggaccaacattcctccaggtctaagctcccactctgacagcgtggactcggcttcagctccagctccagaggcggctgctgagccgacattcatttgtgataatcctggacctggggtcttattcttcatcttcatcatcgtcttcacttgatatttctctctcaataactcagatcttaaaggggtttcggaccctggtgatctgcgtcaaaaattgaaaatacccagtagaaaagggaagatactagaccctgtttcacaagcctctgacccgagcattccccgagtcaaaccccccaacaccaaaacgtgtctttagaatacaaaagcttttcttttacagaatcaatggcgtcttacaaaagtaaattattgaaacacacttagcaccaaaccaaaccaaactccaccgaaccggtttgtttgatgttggagaagctgttgtaatgtacccgaagaaacccagaaccttccagatcacagatctttccagcaaaatgtaccccaattgctctaactttctcgggtcaaaactaaaattttcccagaaagaattgtaacccaatagtaataataataataatctcaaacctgtagaatgaaaaatgagaaaccaaagattaaaaaaaaggtgtatatgtgtatgtgtgtgtgtctctctctctttcttaattcctgttcttaaaaacacggagacataagagagaggaagaaaaatggaaattaatataaaaacgagtggccagctaactgagctcgttgggaccttcttatataacataatattaataatgaaattaattataagcctataattacatatacattatttataataccaaaaaatattaataaaaaagaagagacgaagaagactacgaaagccgccaatgcttcacttcaacggtgaaaacaaaagagattaaaacacaaaagcctttggggtttcctcacccaactaagtatgtttctggtacttggtcaaacgtggcgtagaggcttcatttgcagtccacgtgttttgttggagggtagttttgtcaattcaaatagcttataatcattgtcatgtttaattacagtggtaggacacgtggcagcttaagctggggtgtgcggcgctaactttgtatgtagtggttgcattgcactggttggcatggttaactaactagtgatgagaagtaaagttcatctctataatcgagaggtaatgtgtgtttattgtatatttttttaattttatttatgaggctgtaatttttccacggccatgagagtgaaagtttttctacttttttggtcattgtattatgttatacggtgtaattatgctgttatataacttttttttattttttttgaaaaaaatgttacctaaacgccaatattttgatggagaaaaaaattgtcctaattaaagatacattgctagagtgaggatgttcgtccggatttcattgaacgctcacttgtgggcaggggcggacacacattgtagtattgccccctgaaaaaaaaaatcgagaaaaaaaatgtatatgtattttaatta

SEQ ID NO: 378973 - DNA, 3283 bp, Cannabis indica
ttaaaaaaatctctcatttttatatcatataaactgagattgttcaaatcggtaaaaaaaaaaaatttaaaaaatgttttttaaccagaaaaaataaaaaaagaaaaaaattgggtttgagttaaatatttttgtatgaacatatttttgatatagcgtaaaaaagaacgagaataaagagagtgtaactagtaaggggatgaagttaggtaatggggtatcatgagcgttcctagtgagaactctgaagtatgttatatataatatataaaattgttgggatatctatagttatttttaatatttttggtatatcacatattataattatttgtataatatagttataggaatctaccacaaattttttgaaacaagccaaatttattttttaaatagctagttagttatatttcgcatgcatttatcttggtatttatacgcttgcaataatcagtttatattatgatttttagcattctatatattctgaattaattggtgagaattcttatctaactatactatatagtcatgtaaaaaaaattagaacttttctatttacatgattacaagtaatcacaagtattatagtgaaaaattggtattgcaattttttttattaacaatctataaaattgcaagaaataaaaacagataatagaaaatgtaattaatttagttaatattaaatggcaaccgatgcaggaagacgacaaggcaaagctggtggaagaaacaggattgcaattgaagcaaattaacaactggtttatcaaccaaagaaagcgtaattggcacagcaactctcagtctgtcacttctctcaaatctaagcgcaaacgatgatctacatcaaaatatacatatatatatatataaatattatcttactataatcaatctcaatatataccgccaacatattactgatgaacttactttactttacatataaatgatatcatatatcatatcatctttttctcataaaaaaaaaaaaaataaaatataatcatatatacctcttgctatatatatactatatataaaaggtgtatatatggctgcttatacattttatgtagagtttttgtagcaacccatacttgtcaaaaggcatatatatatatatatatatgtatgcattacagctatatatatgtatgtatgtatagctcaggtcaactactgatcaaggctgtatatggctagccaatatattaaagtcgaaaagctttggaagtttgatccatgagtacaactgatcaacatatgcagctatactcaacccctagtactgtgttgttcacagatattgggtacctaattttttctttttaaaaaaaaattgtataattttttatctgttgttgggattgagtatattgaacaactaattaatgcttccattaatttggagctgtaaagtcttttttgttttctgtagaattaatagctattaattcatcctgtagtgttttctcttttatctttattccaactcgtttataataaataataatcaccatatataaatttctctttaataagatattcactactaaaaattaagaagtattttttcagtgtattttagaccgattgcattgtttttcccgtcgacccataaaaccgacacttatgtggggcctttcttccgggtcggttattattatccgacaaattagggagctgcatgcatcggattggaaccgattcaatagggtttcagttccagtcaaccatattccaccgctctgtaaccgatggcataggagcctgttggtttgtaaataacggaatagaattgtaacatggtaggggaaacattgtagttgtttctgcaattctcgcccttgcattttcagaatcacaaaaaagacaatatcacaatttattaatattaacaatgattgcaaataataaatggtcaacttataaaactaaacaaccttttaagtatagtgtatatatgtattaggtgtttttaacgagtattacccaggcatggagagtattaggaaaatttgtgattttatatttaatatctaattagaaaaatttctcgttcttatattatatgggtagaggttatttctttggctaaaaaaaaatcaagaaaaaaagtttttcagcaaaagcaaagtaaagataaaaaaaattgagtttaacttaaatatttgtatataaacatatttttgatatagtgtaaaagaatatgtatttttttatattttttttattaagtaactaaattaaacataaaatttcaaaattttcttttattattggtgattagattaaattaatgagttaatatttttaaaattaatatttataattaaatttatttagtaatcaccaactagtaatacccattgaaaaatatttcatatatatatattatatatctaaaaaaaatcaaatgtcttaaaaattataaatgtgtgtattttgaaaaaaaaaacctcttaactaaactataatagactactagtaatactttgcatcctactactataaaaatattatttaatgacacttatttaacaatatttaataaaaaaaagtattgctaaattatttatttttataattaaacacacttaaatataaaaatattgctctgttaaatatatataaaatgttgataaaaaaaattatattttaaactaaataataattactaatagcaacacttattgttattcgtatctttgtaatcgcaacacgtggattgcaatcaatagaggttaagaggtccttagtcgatcaattgatactccgggatgatagaggccccaaactcacggaaagggcttccgtgatggggagtttcctgactgctggcaacgcgaagggtatccgtgagccaaagtcttcctcactcccaggaaccaaagccatcaactctagagaagagtatgggtttttccaaaaggaccaaggcattttgagatgagctgaaccgggctacactcttagctcgtggagactctgcctgtacgtgttagactacagacttagtgaccagactttttcaggtacgacgtcagaggttgtctcccacgacatgctatcgtacagagcatgtgtgtttttatgtacctgaccaaatgatccaacgactagggataagaaaaatttaaaaaggaaaagccctgggatgacacgagtatgaggcccagcctgtacgatctgacacgctggcatatgggaaaaatgtcacctaccaatccaacggtcggatttcgcccaaagatgatcaatccaagccaac

SEQ ID NO: 378974 - DNA, 1987 bp, Cannabis indica
ctacttccttggaatagaagtgtttagggatgagatatgccttcacctaccacatattaaatacatagaagatttggtaagaagaacaattttacaaatctaaaaccttgctctacaccagctactacaggaaagcctgtgtcattaactgatggagaaatactgtctaatcctactacctataggagcataattggtggcctgccgtatctttgtcacacaagaatagataactcatatgcaattagcaagctcagtcaatttttaaaggctcccatcgcagttcaatggagtggtaccaaaagagtgttgagatatcttaagggaacaatgcataaaggattgcacatcagtgatgaaccattaaatacttcaggatactcagatgcagattgagcatgtttccctgatgataggacatcagtggcaggatattgtgtgtgctttggaaacactctagtgtcctggtcattaaagaagtaggttgtggttgcaagatcaagtactaaatttgagtatcgagccttggcacatgttgcagcagagattgcatggattgaatccttgctaagagtacttgaatttccaatacgtatggcagttagttggtgtgacaacatgggagctagtgttgtagcatctaatctagtttttcatgctcaaatgaaacatataaaagtggacatacacttcattcgtgacaaagttttgaataagtagctagatataagatatgttccctgttcagatcaagtggtggattgtttaaccaaaggcttatcaagcttcaggtttcacttcttaattgataaacttagagtgattgaatcatccttgcctttgagaggggatgtgaagatataaaacaaaaggatttttaacccttactttgaattctattatgcattgtggttctaaatggacatgagtcaaaaatgttgattcctaagaacattgtgtcattcgtactgcaatgatgtttgcattatggtgtattattattattcccttttatgttagaattagtgctatttgtatttgagccttgtggctctagatattttgtaaatagcctttaggctttagtctatataaaggaacactttggctccaaaatatgtgagttgagttttacaaattgctttcaatctaaattttttcttttaagatctttttgagtgtccatttgttaaaattattcggcagcttctcttgggctcaattgattgatgtttggaggaaaattcttgttaaggtagttattcatgatcatactatgtggttgcctaatgatgaagtagttgttttttttattcatgtgctctggttgctttagtatgaacagaataaggctcggcatggggagaaggcaggtgatcctaaaggggttctagaaacagcttctttttgcataaatttcaagagaactcaaaacttttatccttatcgtatccttccctgaaggttaaccattaggttcaaacaggggaggaggttgcagttggttccgctatgttcctgccttcgcagagtgttacccggttgccaatttggaagcctctagaggtagggacttggaagatgaatgttgatgctgtgatttttgagtagcatggatgtatcgggatgggggcggttgtgcgggacaatagtggtattgtgatcagctgttataaggtttcttttgaagttattctgtctcccatcactgccaaattgatggccattttagctctcaaatggattcaccatgagactattgctatttttcttttgaaagtgattgactaaatgttattagagtttttaatcagaaaggggagatgacactgtagatgaagtgattgttggagatattctctatttgatgaatctttgctaaattggttcttgttattttattcctcatgaggggaataaggtagtccatttgttggcaaaactgattctacactactacaatgttggcctttagaggctgtttttt

SEQ ID NO: 378975 - DNA, 2782 bp, Cannabis indica
attttttttttattttatttctagatgttcgccatcgcatccaataaaatcccctcattcccttcctctctctctactccatacatccttttctttcagtccactttttcttttgatcttcgttttactcataaccggccattttcagtctggtatttttttttccatttctttagttgttttgtaaaaatgtgttctttttattgttgtgatatcacatttctttgattttgttttgttgttatgtgtgggggtcatggctgggtgaaagtagcgtttgagtttgaaaaaaaaatccagtgtcgcattctgttttgatctgttgatgttaagtgttttattttgttttttcttttcttcttttgattgtatttttccattttggggttttgatcttacaagttttagggattttacttgagattattgtatttccttacgtaagaaaaataaatcttttggtgacagtgtattagtattgtaataatttcaggattttgatttttcattttattgatgcaattctgcttaagtttaattggtccatttgttatgtgctgattttttctttttttgtttctgcagttttgacaggggagaatattattaataaataatggaaaacaaggatcagtacaaacaagcattggaatcaaaatacgactgtcttctctttggtaaaaccttaatttataattttaaagcataaagttcatggttattttattttatttttaatacatgatgttattttttattctatagatattgaaattgaatataacttagtctctaatattttactttcagatttagatgacaccctttatcctaaggcttcgggtctttcagcccaagtcactaataacattaaaggtaaatatgcttcacattcttgcctaaccatttacctaattttttttcttgttatgtttttatgtgtaaatatgtactgcacttgaacagtttgaataaagattaaatttttgctatgtttccattacagaatatatgattcacaagcttgaaatacaggaggataaagtccctgaattatgttcctctttgtacaagaagtatgggacaacaatggctggtctcaaggtatatttaaacaaccctttttcatatcccattgatttgaatgtagaaaatatgtcatctagagaacgttgattaacaagtttgatttttttcttttttttcctctttccaggctatgggatatgactttgactttgatgatttccacaggtactgaatcatttttcatttaattttctgaattacaattgaatatgtatttgtctagcgtctaatttaaagctaattggcttgcagtttcgtccatgggagattgccttacaatctgcttaaaccagaccatgttctgaggagtcttttgctcagcattcctattcggaaaattgtgagttctctcacttttgatatcaagcatttttaataactgcccacctattattttgtttatttgatctttagaatgagattctttttttattagtttattatgaaaggatgtcctcttattactttgtgttgttgagttttgtgtagatttttacaaatggggacaagaatcatgcggctagagcacttagcaggcttggattggaggattgctttcaggaaattatatgctttgagactctaaatccaaattataaggaagctaagcctgctgttagcgagggtaaatctgagttgggacaaagcagtgacaatggagattcagctcttccaaagtctccagttgtctgcaaaccatttgaaaattcatttgaagaagttttcaagatgctgaaaatcaaccctcaacgagctgtaagatactaagataatagcttggtcattggttgtatgtatgttgaccaaaacattgtctattactgctgtttactaactattggttccccttgttcaggtattctttgatgataacatctacaatattcaaactgggaaaaaaatgggcctcactactgtttgggtaagtttctgccattaagttttgtataatgatatgtattgactgttgagctttgttggtattttaaaagggcctccaggattgttttctcatcattttggtatgaaatgtttgtataggttggttgttctcaccgaattggtggtgttgattatgcactagagagcattcataacatcaaagaagcattacctgagctgtgggaagccgaagagtccaaaaatgtcaaatattctcggaaagttggaattgaaacaactgtacaagcttagttttaactattatgtgtgatgttaatgtgacagacaatatgagggtagctaattatgctttgtttatatgtatttttatttcttcttataaatgctttgtattactaagttgaatatcaatgaataaacggtatattattcaatgagttaaatttggtagagaaaataaaaaggtcaaatgaaatgactggtgcatttggagttggtggctaagtttgaaatgaaaaatgggtagtgggtgggggtgagggtgggggctaactagattccttctcctttctagtcactaaggaattaaatttcgatatttttcatcgatatatctcaaaagatagtgaattgctttaagcatgatatcttttttctaagaaaaatcggagatatatattgaaatatctatgaatatttctgaaatatctattgatatttctaaatatatatatatatggatattttttatttgttataaaataaaaaaagaaaagaaatttttactttt

SEQ ID NO: 378976 - DNA, 3405 bp, Cannabis indica
taattcttaaagtccaattttcatgtaatagcggatttactagagaaacttatattcgggctaagacatataaatctcaacttatatgcaaattttctactctcgtgataagtttaaaccatatgagacattaagcataaaaatcttaattgctgcataaaccatataggtcgtcatatatcgaaatatgtgtctattttattataacataaccaatactcacttatcacatttcgtattgatatcataaacatttaattgatggtcagacaataaaaagaaattaagtacgaataaaatagatgcacataaaaaattggagaagaattaaatcacattaaaaccagaataaaatgtcaaacaatctctatttataccctaaataaaaattcttgctactcattataattgaaaatatctgataacaattaactagaaacatagaaaaagagtagaagaaaagaactcgttgaaaaaatattgataacaatctccagaactgctttctgcttcaattttcatccctccttgattggatgcttaaaagtgttaaaaaaaagatctttatatagttttggtttaggcttaaaaccctatttttcattagattggcaggcgggtcacaactctacattgtagtgtcgcggcctgtgttttccaagcacgaaatatccttcaaattttcccatagcgggtcgcggcactatcttgtagtgtcgtggcgcttgaagcccattttttggcagagataaattaagagttccatgaccttgatgcgaaatttttgcgttttagtgccctgacactgaaatccaatgttggcgctactcctcactttccagttcttcaacattagaaggtttaatcacagtgaatcttttggatttttatgtgttgtcaatgaccaattggaatcgtgcatgttgatcttaaaattgagaagacctgtaggaaaaacagaagaaacatgaggttaaaaagagtgtctacaagagttgaattagaaaaagtcatggctaataatggcaataatgggggtgtcgtggaagaccaggtcaatggtcgtaatccacctaatagaagcttgaggattatgtgctacccaccgtgacaggggtctaatcctgtataagactacttgccattgaagcaaacaatttcaagatgaagccaatcattctttagatggctcaattcatagtccaatttaggagacgaccatcaaaagacccaaatatggtgtgaaaacccagcaattaatcttcaaagcttcgaggggaaacaaaagaaaattagctcttgaatgaaatgactaaaattgtataaagtcaaattttctcctttatataggcggttagaggggccataaggtaaattgaaatttgaattttcgggttttcctcctaagaaaagacattagtactcattagagagtgcaaacgtcacacatgcaataccaggtaatcgtcatcgcgtctttcaagataggatattaaatgtcccagacatcgaagagacattcgatcaatcacatcggctcgttagtgaagaccggacacgtgtcacccattcgattagattggtgaccgaataagtccacgtgcaactaggaagttcccacgtgaatttgggggacaaatgttatcccaatttctacacaaggtgatgtagcatctatctgggtgacacgtgaaaaagaccctatgacttggacgggcgattcctctaacaacgtgccgtacagagagatttgatacctaaatcataatagaagctgggaatatctaaggttagtacacaataacatctgacaagcttccattacgtagacaactcacatacacataccaaagaatgtgaattaaatgcatttatagatataacttatatatttgcaagcttgcaagtcacgacgatattcctaaatttatgggataaatttgcattaacaaagaagatagaaaactacttagtttctcattttgttgtatttatttaagaaacataaaaaagtttcctgttttaattcttattagctttagaaaattattttgatgtaattctttcctctgaatagtagagacatttcatattcagtggcacgagaaaaatcactgagaaaagaatcatagattcaagagagaaatactcacaattcattgtaagagctttagagagatcaagaacttcttgtatttcttctcacaagtcaatacaaataaaaagagagtaggctattaccatcattacgggaccaaacctctataacaaccttggtgttctctttgctttatctttatcatcattattattattattattgttatttaattatttttaatcgttttaattgacttattgtcattggctaaaagtaaggtaaacaaattaactttctcttaaagaatgtttatattttctcttaaaaatatctattttatcatagcacgtgtggacctatatgaacttgccattttttataggttgaatggaacttgtataataaaatactcaaatttcaataaaattaggtaaattgatgtacaattaatttatcaaaatattgctagatcaaagaggtaagtaagtatatacctactgattttttgtaacaattttattgttagatttactttttgtcccataactgataatgtagtaactcatttatttgctagatttgcttcaacaattactacaaatacagtttggtgccctggatttttttcttgtattagaaatagtgtattggctaatgttttggattaatgatatttttagctctcctccaagttgaactctttgctcttaggtgatattctttgaggttattttgtacaaaaaaaaaaaaagaagagtatataattctgttactctgtccattcttcaccaatcaaaataaaaacaattaataaacgcaagttaaaaaatattgcaataaaaaatacaacaaaataaaacaatacacactacatatagattcatgtaataatttaatagtgtctctaatctgaatacatattactcatcaatcctaaataaaattgagctctagttaaattttaatgtgtgactttttaataaaggtagcaaaacgggtttcgactgttggaaaaattctcattacaagagagaataggaggattacaatcaaaatacttaaaatacaaataaaagtatttcatcaagattacaagaaatctagaaaagaagaaggataacacacaaaaagcttgaccaaggctcaaggacctttgtcctaaaagtcatttcctccctcatatggacacttagggaaactctagaaatgctcttaaggatttatcaagcctcatatgctcagcctagtgtctaaggatgagcatatcctcacaaggttctaaacacaacaaatggtttcaacca

SEQ ID NO: 378977 - DNA, 4711 bp, Cannabis indica
tatttcattttcaaaaaaaaatacgctgagtttcaatgggtgataactaagattaagataaatctaaaaaaaatgacaaaaagtattagtcccatcatagtaaaaccgagataaacaacacctataattgctctggacttgacacacccattcgaccgacataaaccacaggttcggaccaccgtacatatgagcgaccaaaaaccaagatatctagaatatccatagttgactcaaacttgacatattaggtcgaccaaggtaacgatacatttcggctagtacttgagataaatatctcggttaacaggcgaatcaatcaagaaattaattaagaagttaaggacgggatgaggtctttacttagatcactaactcacaaatttaagctgagatataaattaaagaataaatttgagatacagaagtaagagataagacaaaagagaaattatgggaagaactaatgagagcaagaattaacatcaatgacatatgtcattaagagagaacaatgcatggcaacatggctatgcatgcatgcaaaggagggagatataaattaaaaaggtcttaggacgtaagggaccaagaaaaaataggagaaaaatccattatgtacaaagaaaagaaagaatcccaaaatatacaaaaactactattcttgagaaagaccaaagagtgttaattctcatatccatttacagggattaaggatataacacttttgggtcaaaaaagtttggttccgtctgtgagagattccttttattttcatttgaagatatataggcttcttgtttctccaaacccttggttaatcaaacacagaaaatattcaaaattattgaaagtgctagaaaaaactaaatgataatgatcaggatgacacaaaaatggtgctcgccgcgaatggtagtgaaacggtgactgcaattgttgaaatttcaaactagtaacaaatcttagaaagattgaaagcgcaagaagaaaaattgtagcttaaggagtactagcccagtaaaaagaacacgtaaggaacatcgaagaagaaaaccacctgacgaaggtaatcctagaagggtagactgccctccgctgtctgaagataggactgaccaccaaaaggtacgggagaatgcactatcgaaaaccaaaatgggaataatcggcaacaaatggatcaatacggtgagaaaacaaccacactagagaagagcaacgcgcagaagaacatgtgcaaaaaaaccattttgatgtggagaccagtgttgagcaagaggcattgatgactacatcctaaagatgcacaactgtacagatcacaccaaacagtacttatcctcaacccaaagattcaaataagatgaaatgatatggaacaagctcctagcattggaagcaaaagatgaactacagataaactatgaattggctagaatagaaaggaccatgaattcaccctccagtattcatattctttgagtggaagcacaacctcatttacgtggccccaaaaattcgtgagtacaatggtattgttgttccctttgaatatatatgctagtttaagcagaagatgttaataaccttgatccctttggaagacttagaagcattcaaatgtaatatattcactcgagaattgaggggtctagtgttgtgatggttccataatttgcctccaggcttaatcaacacatatcaatactcgatctttaaattccaaagcaacattgtaataagcgtcacattagagaagctagacacgtacctaatttgccagacgaactattagagaaatttataactaggttcaacaaagattatgataatatattgaaatgtttagatcagtagccacaaaggccctctagcagggtctagtccatggatcttaattgaaaaggctttgatagtagaacactagaacttgagttgaccttaacacgagcactcaccatggcatggggatatgtgactttagaggtcgaagagaattgccaaacgaaagaggtactaaggggaaattcaatcctagaagactctcttcattacaaaatcaaagaaaggccactaataacttgcctacctcgaaagaacaacactattcagtttggcgatagaggaatagtaagggttgctgcaactaacgatacaactcaaggacgaccacagggtggaaagcgagtggaggaggagatactgccaatgaccataaccttgtcagaactcattcgacgcttaagagaaatgaaggaaatgagatggctcccaaagatgacaacatatccaatgaaaagagataagggatgatactgtgctttcaatggggaacacgaacacacaatatacgaatggagacaactgaaaaaaagaggttaataaactggtaaaggtaggattttttaagacaacctaacttcgagccaaactatgcatgctcaacaggggagaagtcagagtcacacctttccgccataaattaagaaaactaggaatgttatctctggaggaactaatttaagcagactatttataagggtcttgtctactcattcattttattcgaccagtgactatcatcgacaatgacagtccggatgtgataattaccttttggaaaagagaaaccacaaaactaagaaatcctcatgatgatgccttgataatcacgctggatgtcgcccatgtcagaacaaaacaaatgttagtagaaactagaagctcaatcaacattttattcacagaggtcctcgaagaaatggagatagaggacatggaaactcaggatacacaagttactttggttggattcttcggggaaagcaccgtggccaaaagttatgtggaattgcctatttatgccaacagagtgaacaagttggtaaattcctattcgtagactgctcataggcatacaatacaatcttggagtgcccatggatccttgcaatgaaggtagtggcatcatcataccattaggtaatcaaatttccctacaaaaggaagatacatgagatacaaggagatcaaataagttctcaaaagtgtcataccttggctctacattgtaagaaaaaattataacaattaatcagatctttagacccttcaaagcaacacactccaatggtcaaagagttgtgagaggtctcaattcatccaactaatcatgaaagaccatattcattggaggtcgaccttacaaaagaaagtgcagaaaaaaatcataaaattgctaaaatccttctatcaaatcttttcatgggaccattctaaatgatagagatcggtcttgacttaatcacacattggcttagcatcaacccgagttacgttatggtcaaacaaaaaagaaggaagattggcctggatcgtaagaaggttatgaatgaagaagtagaaaagatgttgaaaaacgaatcaatagaagaagttcactacccaacttagccttttaacctcgtcgtggtcccaaagaaaaacagaaaattctaagccgcattgatttcacggaccttaacaaggcttgtccaaaggatagtttccctttttctcatatcaacatgttgattgatgccaatgcgggacataaattaatgagcttcatggatgcttttttgggataaaccatattatgatgcaccccacggaccgagacaatacttcattcataacaaagagagaaacttattactacaaagtcatgccattcaaactaaagaatgttggagcaacgtaccaatgattcattaacaagatgggctctcaatagctaggctttacaatggaagcatacatagatgatatgttagtaaaatctaaggactatgatgatcatgtgcaacatcttgaggaatgtttccatattttaattgttcattccatgaagttgaaccctaccaaatgcgcattctgtgtgagctctaaaaagttccttgaaaatctagtaaccaaacgtggggttgaagtaaaccctaattagtttttcacttttcaaaacataactcgacctcagagagtgaaagatatatagcgattaacattaaatgtagcagcgttgagtcagtttatttccagattgttcaataaaagctcttttcctatatcttgcttaaaggaaatagaaagttaaaatgggatgaaaaattccaaacatccctagaagcgctaaattattatttgagctggccaccagtgtaagcgaaacttgaacctgaagaaactttgctcctatacttgactctgttgggcagtacagtaagttcagttttggttcgagaataagatggtgtataatatccaatttactacatgagcaagaccttttgtgaagcaaaaggaactgaagcacgccctttcaaaatactgttttcccttaaggtcgatccacatgcacgtctttgcaattagacgagctctcatttctacgcttttggcttacttttgcctacagcaaaaaacaattaggtatgccgattttcttagtaaattaatcgaacaagtacaaacacacatatagcatacatttcgcggcattcattcgaaaagtttattttaacaaatattagtaacaagagtcagagaatttatcggccagaaaagtttagggagatttttaacgatcagaaaagttcaggagtataatttagtacatgtcaaaattggaaggacaaaaatcttatttaaaaaaaaagaaaagaagaga

SEQ ID NO: 378978 - DNA, 2922 bp, Cannabis indica
gttagtctcttttaaattcattttgattttgacttgcaacagtgttctatggctgttttgtacgttgcttttcttttgggttatgtgtttctgttataaattttattcaatattgacagagggaataaaacaaaataaagcgagaactatattgcaacatctgagtgaggcttggcgttgttggaaggcaaatattccttggaaggtaataaatttggcttcatttattatatataatgttaatattaataaataagttacatttcttttgtgtgcccttcatatttctaactacaataacttgtaggttcctggtttgccggttccaattgagaatatgattcttcgttatgtgaagtcaaaggcagactggtggacaaacgttgctcattacaatcgtgaacgtataagaagaggtgcgacagttgataagacagtctgcagaaagaatctaggaagattgactcgcctttggctaaaggctgagcaggtatttaattttcaattaatacagagtggtgtttctactagcgtgctgcattatttttgctaattttagcaaagaacaccaatgtactttatcttctcacattctttttttaattttcaaccaactgtaggaacggcaacacaattatctgaaggatggtccttatgtcacaccagaagaagctgttgccatttatactacaactgtgcattggttggaatcaaggaagttcactcccattccattccctccattgtcgtacaagcatgacacaaagctacttattcttgctctggagaggttaaaggaatcgtatagtgtggctgttagattaaaccaacttcaaagagaagaacttggtctcattgaacaagcatatgacaacccacatgaagcattatcacgaattaagcgtcatttgcttactcaacgtgccttcaaagaagtagggtttctttttactttaataatgaacaatttggttttgacctcgagattcctgactgttgtagtatatagatttggactaattggtttaattggcaggttggaattgagttcatggatttatacagttatcttattccagtgtatgagatcgagccacttgaaaagattacagatgcatatcttgaccagtatttatggtatgaaggtgataagcgccacctcttcccgaactggattaagcctgcagattcagagcctcccccgcttctggtttacaaatggtgtcaaggcatcaacaacttgcaagatgtatgggacacaggtgatgggcagtgcgtggtgatgcttcagacaaagtttgagaaattctttgagaagattgacttgactatgttgaataggtaaatgtgcttcgaaatttctctgtatacatttggcggtatcacaaacttttgaattgacatgttatgtaacaaactattgcaggcttctacggttggttcttgatcacaatattgctgattatgtcactgctaaaaataatgtggtattgtcttacaaggacatgagtcatacaaattcttatggcctgatacgtggccttcaatttgcatcttttgttgtccaatattatggactcgtgctggatctgttgcttttgggtttgactcgtgccagtgaaattgctggtccaccccagatgcccaatgagttcatcacctactgggacactaaagttgaaacaaggcatcctattcggttatattctcgatacatagacagggtgcatatattgttccgctttactcatgaggaggctcgggaccttattcagagatatcttactgaacatccagatcccaacaatgaaaatatggtaggatataataataagaagtgttggccaagagatgccagaatgaggctaatgaagcatgatggtaagggtttcattttttagttggcttgttagatcctcctctcgtttgattctgtagctaattttatttatatttgttcagtcaatctggggaggagtgtgttctgggacatgaagaatcgtcttcctcgaagtatcacaactttggaatgggagaacagttttgtttctgtttacagcaaggacaatccaaaccttctcttcagcatgtacaacatctcacttgcttcagctggattttattattttttatctagttgtatatttatttattttttttgcatgtgtcatgtctttgttctttcaatactataatatggcctgagaccagtacatctccacctagtttgacttgcattcagtatgctatgaacagaagagttgtatgatttgttttcttgaatctccaggtgtgggtttgaaataaggattcttcctaaaataagaatgactcaggaagcattcagcaatacaagagatggagtttggaatttgcagaatgaacagactaaagaacgaacagcagttgcattcttacgagttgatgatgaacacatgaaggtgtttgagaatcgtgtcagacagattcttatgtcttcagggtcgacaacatttacaaaaattgtcaataaatggaatactgcccttattggtattgttattattataaaataattcttttatctactttgcttaacctttattttatattatacgactacactctcagtcttactctagcgttttctttgtttattggcttccacttttccattgataggtctgatgacttacttccgtgaagcaactgtgcatacacaagagttgttggatctgcttgtcaagtgtgagaataagattcagacacgtatcaagattgggttgaactcaaaaatgcctagcaggtatgtgctttcctttcgcattactttgtttagtaaatatttaaagtatttatacctaaactgaaatgttgatttttttttttttttctattcagatttccccctgtgatcttctacacaccaaaagaaattggagg

SEQ ID NO: 378979 - DNA, 1871 bp, Cannabis indica
gttgttacccaaatcattgtagtaatgttgttagtggttcagtatgtttggccccttctaccaccactactactactactaataaaccattgtcatcaatattgtcactaggtgttggtgatgaatagttgaataattatatgtatgtatgtatgttatgtgtgtggtttttgaattgtaataagaaagtatcactacttatgtattagggtatatgtcaaaccatgttattataatgtggaaatataagatgtatgcccaagttggtactttcacatcaataaatgcatatgtttgttctattggttgagatatatttttcgtttttgatatatatatatatatggagaaattgtatgatatttaaatgatgatgtatattataattataacatgaaagattttgaataatttatagttgtgaaaacaaggttcaaaacaaacaactgcacgtacgcgtattagttttgtaatttgttattattgttgacataatttttcgtaagctaatcgaaaaagatcgtaaaaaatatagtcaaagccttagagatcacaacatagtctttcttggcaaacaaggatggagacttcttgtacgtcctttctctttggtattaaagattttcgaggctagatactaccctcatggctcttatctctcagctcagttgggtcataatccgagcttcatctagcatagtgtttgggaggcacaaagtgtggttcgtaatggggttaggtggcagttgggggacggccaaaacattgctgtaaaaggagaaccttggctccccttggaggataacctgttcatcacatcagttaacccagatctcgacacggctgtggttaaaaaactgatgctctccgaaggtggtggctgggatttggagctcttgaatgacttgtttaacgacagggataaagctgccattcttaggattccgctccaacaaagtccggctgtgagtgaatattattattggtttcatgaattaaacactattaaaagctgcaataatttgcagcagaaattaaatggctagtggaacggttgtttctaatttttggaatgaattattgcgcttgaagatgccactgaaagttaaaaatctgatgtggagagggtgtacgaattgtttacctactatggtcatgcttctaacaaagagagtagttgttaacagtttgtgctcagtttgtggtcttaatgatgaaacagctatgcatattctagtcacttgctctctggttgtacagtgttgggagaaggcaggtgtgacgacaattttaactactgatatgacttttctcgactggtgtagcagcacttttcaggtgtccaatgctgaaagtcgtggtctcattgcaactctttgttgggtgatttggggtgcgagaaatgacaaagtatggcaaaataagtcaatcaatgcctcttatctttatgcatttgtggttagttaccttgcacaatgggaggccactcaagctcctagtttggagacttcacaaactagtttattaccaggtgatggtgttgagcgatggagtgcccctaatactaataacattaaggtaaatgtggatgcatcaatatatatggttgtaatcaaggttatggctttggtattgtggctaaaaatgacaatggatttctggtggagggtacgacaagggctcgtgttggagtggttagaccaaagcttgcggaggcgatcggtgttagggaggcgctaagttagatcaagcaaaaacaatggcaatatgtgatccttgaaactgactgcctagttgtaatacaagcaattcgaagcaacgttgacatgatctctttatttggtcacgtgattaaagattgtaaaaatttg

SEQ ID NO: 378980 - DNA, 5143 bp, Cannabis indica
gtttgtatgaggaaatttgaatattgtagatcctccaagtaatggaatattttggatttgcggattgaggtgtatttaattgtaaattgctaagttttttgcagaggacatggccaaatttgtggacaattatcccgagtataggaaaatgcatggaaatgtttcaaagcacgtgacattggtcactgaaatgagcaggatagttgaagagcgaaaactcatgttagtttcagaaactgaacaggagttggcttgcaatggtggacaaggggcagcttttgaggtactgtaaaagatcttttattcgtatttttttctctactttaaattatgtaatcttgaaataattctaagatacggcaaatgcttatttttatttatttattttccatcctttcatttatgtttttgaacaacgtttcatcaaaaattcccatttagaatctgatagtattccagcaagaaaaccacacaaaaataactgaagctccactttgttgcactgaagtaagaaaatgttaaatgttgacaccaacacaatccaacttctctgaatctgagacattgtttgttaccaaatacctctcaactctgaaacctagtcagctggagcctgtgaaatccccatctttcaaatctgcgtatctccgaaagaaactcacacttctggacttccattgatagcgttacatgattgttatttcacaacaaagctattgttgctgcccctgtacgtactcatagttgttgtgtcctagcccattgctgctattcccattggtcacggtccttctgcgtaactgattatggcaattccaattctagcctttgggtgatcttcacattgttgtatgtcctttattcatgtttcttctttgattgttccctccatcatcttgctaacaatttgcctggaaaattatctttgacactccagcaagaaaactgcacgagcagatctaaaactcctcttatctatttcctacaacatcaaataactgaaaccactaaaccagttaactttccattatgcacaagttgcttatcagaatctagaacctttgtatggaaaaaattgccattttgctatgccaaagtagctgggaaactcctttagattcccagattcccccatgtggctagtattttgattacttctatcttatttgtgcatatttttatgttgtctttttggagtggctagtatatctaatttgattttgataaatttaagattatcactaatttattttcagtctctaaagacttacaaaaggtttaaatgaatagtttttgggttaaaattaggtttccattggttctgtttgggtgtcagctgttgttgatttgtagctgtcttccacttggtgcttttttatttatttatcgagtagttggtagctaaaaatatgtgcagttttatctgttatattcttctatcaaattctttgaacattgaagaactataatataaataacttggatgataattcgtaacactgaaagttgaaggaagcttggtgcaaaagccattgtgctttgctgttcaagtggtattagtagttccttgtaattttagagtgctctcaggattttgtgtttgctacattagattgttgaagccggggctactttgtgacgggtaggggccatttagctttgttgaattcaaatacagtgtgggcagcaggtgaatggtaatagaacatgtaaaatccatctcacggtgctatggtccttgggtttatatagcacagatgactatttctccttttatacaaactttcagttatcatgtcagatacgtttaacatattttagtgaaaaggatgaattctaaagttattcagacaatttgcatttaataaatttatatgaacatgccacgccacattaaccagttccatgctacaaaaaggaaaaaaaactacatgctttcactcattctgcaacaattcatcctatttattttgcaactgtagataatagttgatgttgagataagtacctgagttttttttccatgtgcgatcacttgaaactaaattaaataacatacaaaactcagcttctattatttgactctgcacatttgatgctctgtgtaggcagtgaaaactcttttagacaatgcaaatgtatctgatttcgactgcctacgccttgtgatgttgtatgcattgcggtatgagaaggaaagccttgttcaactgatgcagctttttgacaaactgtcttctcggtctccgaaatacaagcgtggggtataacactttcttttccctttctactggtagcctgtgtggtataggccctgagcacttctgacggagattgaaccttttctcagaggctcaatccctgaagcgaagtcttcaaagctgttctacctcttgctagtggctgatagagtaaatcactggttataacgaaatgtctgtcttggcttacagcttgtccagtttctcttgaagcaagctggtgtagataagcgaactggggatctttttggaaatcgtgaccttttgaatattgcacgtaacatggctcgtggattaaaggtatgtcctggaaaatatagtttctgttttgagtgtttgcttttgatgctaaaattactctcgacttgtattctagggagttgaaaatgtgtacacacaacaccagcctcttctctatcaaactatggaaaacatcaataagggtcggttgagagatgtggactatccacatgttggaaatcattttcaacagggcaggttagttgctgtactaacagttctcctgtggctgacatcttggctggaattttgattgtcgtgttcttttactatcttttgcctgcttgcaatttagtatgtggataatctatgctctaaaaatgttctgtaaattttcaacaagagtgctttctgataggcaaatcttgtttctttttcttgcaatgggagacttattgcaaggaggtgtagttaaaattcagctgtagtgagatagttgcaggtgttttttctttttttgatatttgaaaagtgaagaaaaaaaaaacctggaaaaggctatagtattctgaagaatgacatgagaagttaattatagccttttatttattccgaaccattcatgaaagtaattatgtgtaattacacgagtatcagaaaactgtaaattagtattttcaaagaaagctactaatattggtaatgtcatgtgattctaggccgcaggatgtaatcatattcattgttggtgggacaacatatgaggaatcgcgtgttgttgccttacaaaatgtgtccaattctggaactcgtttcatacttggtggttctgtggttctcaattcaaagaggtatatgcattaactgatgtctgtttaattcattagtcattgtttaactgcttgcaagaatcaccaatattgtttttgcttaccccaacctacaatgcaactgtatacatacaatatttgtccttaaactcatttgtaaatgttcaattcaaaacaatctcataaattggatcagagaagcgaaacgaacatgttatttagacatgcatcttagaagcaataccaagttatacagtttatttagtaggtgtaaatatgtgttcttccctatcaatatgttcatctttctcttcttaaagtaaattccaaattgttgagtatactaaaacctttaatttttttctattttttatttttacttgggtggaaaattgcaggtttgtgaaggacttggaagaagctcgtaggatagctcatactagcacctccatggtatgaagttaaccatcctgcaggctattatgtagataaacaagtgttgatgattcttcattcatacaccgatctccgctcaaatcatgaaatggaagcgctctcgcatttgcatagacatggtaacttgttttactagctaacttgtcattccatccatattggatgatcttagctgtagtagataccaaacagcaaaattgaatcaaattttacctctttcaactagttcgctaatcaactatttgatctttttgtgctcgttaaaataggaatatagtattgtgtaaagtttgttaaaaaaattattgtattttttgtggttataatacaaattttctggtgtgattaaacccattaatctagtcttccttttttgtaagttgattacattattttttcccctttcctcttgttcgaacacaccatttcatgttgtatgctgtgatattatcttatattctttcatatagtttatttatattgataaaaatgcctgtacacatgtatttttatgataaatacgatatcacattagcaaagtcatattttatattgattcattaaaatgcgcaacactgatctcgttttaatgaatatgttctataatttttatttagcttttgggacttggggaatttaaggtttttcaataataataataataatatggtttcacactgatctatgtctgtttcacatttacgccttaagtaattaattttaaattttcaaaattttgtgttgtaattgtgtgtattaaactgtgattaattcaagaggaatatgtcaataatttattaaaagtataatgattaatcatgcatatttttttttttgaatgaattaacgatgcatattacttgtcgcaagtttataacttaatttcctcttatcttattttattttaggatggatgaagtgagtattattgagcggagagatcaaaattctttaaattttttttctgaaagaaaagttacaacaacataaaccacattggatagggagagacagaaattgtgtttaaaaatgagaatatgaaataattttttgtcatttcaaaaatttaatgatatttgactaatgttttgtaaaattatttttagattttttatatgaaaaaaaagtttcaatactgtacaccataccatgatatgaatccacctaggggtgttcatcaaactgcttaaactgccgcattgtactgcaccgcaaaaaaaaaaaaaatgtagtttaaaaattctttgcagtgcagtcgcgatttaaattttttataaaaccgcgcggtgtggtgcgtttggcagttttgaattgtaatatgcagttcaaatcgcaccgcaccgcacattataaaaa

SEQ ID NO: 378981 - DNA, 658 bp, Cannabis indica
gaagcgtatctgacaatggagcttggtcttctcagatggcaaatgtgatggctatattggttggaattcaattatgtaagggtctaagatatcacaacattaagatagagttagattattaagttgtcataatacttttaagtaaaaaagattcttatttcacaacttatagttcagtcttagtgatattttattacttagtaaaatgcttaatgtttttaagttttattttgtaatcgctttgattttggccaaaataactctctttagaaaaagcaaaagtttggtggctagaattaccgatttctatgcaagtctttagacttttttggcattggcgtaattagtgagaagaataatattatttaatatttaataattaatataaaaagctttttagtaattacactaatatatttacaccgtaatgactaatgagaatgaagagtataattatgggatgggactacttcttaactatctttttgggtttaaaactgtggaattcgattaatcaagtagattacatgaaacaaaaacctatttaaagagtaatgaagacttagacaattaaactactcattgtgaaaggttgtatatattaattgtatttctgtctattttcaaaaaagtgctttaattagacaaacaatgctta

SEQ ID NO: 378982 - DNA, 5266 bp, Cannabis indica
cataagaggagagaaataccacaattttaagattggttcaacaaatttctaaagtttgtcctaacaaattctttgtccatgtgtagattgtggaaatagaatgaaaatgaatattactatgataaaggatcacatatatcgtcggggtttcaatagaagctacagtacatggtattggcacgcagagcgatcaaatagtgacccttatccattagggtggtgggggtagatgatattaagtgtaacgatgttgatgattatcatatagaattgcttgatgaatcacaagaggagtttcttgatgatcttgaaaattttgaccattttcttagtggtgtggaaacactattgtttgatagttataaaaaaataaattaccaacattgcttaaattttgttcagccaaaacacgcgactgaacacagctagtaacctcacgccaatcacttctagcagtagcaaaaagattggaaaaataatcaatcataacttcaactaaaccagagttccaatccacccaacgatcagctgagtctttaagtttatggattgagttattacgtcttcgatgggaggctaaaccatggaagaatttgctattgttatcacctttttggaaccagagttgcttagacctttgacgccgaaaaacctccctttgagcataggtttcagtcaaattttgtttcgcctgcttgtaattttcaatagatagatcatcacagcctaacttccatttacaaaactccttcttccatttaacaattctttctttaaaattgtcggtgtaatctttcccccatgttgtagctgctgaccataataagcaattttgctttcaacattagattcgaaacatacctcccaactatccttaacaacctgaacacataatggttcacgaagctaggtatttttaaaatggaatcttcgcacatgatgactttctacctcggacgttaactccattaaaatcgggcaatgatcagaagtgaagaattctaaattatacagctttgcagaattaaaaagcttaagccaagattgactaaccaagcctctttccaaacgaacttcagtccaattatttgcccccttcttctttcccaagtgaacggatatccacacaagtccatgtcttgtaatccactctctgataaagcttgttggaatccctgaattaaaaattcagggtacgtaacgattccaccctgcttatcttcatgcaacactacattattcaaattccccataacaaaccgaggcaaattggaacgacctgccaaggtgcgtaacaggtcccaagtaacttgtctttgactcctattgggttccccatagagccctataaacctccaatccatcctaccctccacaactatttgcacatcaatatagtagtcagagcccaagaagagaagcttcctctgcataactccaaagcaaagctaagcctccactcctacctttcacgtccacaaccatcaacccttcaaaacccaaagctaaacaaactttctccatttggtcacgtttacagagcgtctcacagagaaaaataaatttgggcttcttttggatcacaacatccttaaggaattgtaaagcacatgggttcccaagcccatgacaattccaagataaaagactcataatgatagatgggcctgaaaaccgcacccaccaattctccattttttgaaccatctcgaacttgggctaagacgctatcacccaatacttcatctaacccattattaaggcccaactcagtcttatgcctctttatatcagccaccatcaagcaatcctcatcaacattaatgccattatcttgatcacaatccacatcagacaacaaatctacccctacgattttagcctttccatttacccccattatcacaatctttatgacttaatcattaacccacgatatgctccatcatcacagttgtatgattggatccaaatggcacctaggctgtcgcaactggagtcatacgattaacatggtcagagtttggagtagttcccctggtgctacaatcttcagccgctaccatgaaatgctttagctattttgtattgatcatatgacttgtacgtcttggcttaactctcatctaatccccatacagtttaacaagtattccattcggagcatcgaaacgttgaggacaaaatctctcagagtggcccataatgccacatatgaaataaaatatgggaagatgttcatatttgaagtttgtccaaaattccactccctctgagttacgtagcctcatacgcctttttagtggtttagtaacatcaatagtgacactcatccgtagaaaatccctccataatcccataaagttcttctcatcggactcaacaaatctgctaatataattggcaacatccttaaccacaattatcattttgaactcgatcttagatcatgaagttgtacccacatatctacttcattcaattaaatcaacttagggtcttcaccctttttaagccttgaaaatactagaagaaacttattaaacgtccaagggcttcgttcgataacactctgaatatcaagttcatgatagagctgaaaaaggaacagattagtttccaattctttaacaaaaagcccttttccaggttgccaaagcgaggccgaaagatgttgcatatcatcaaagtcaatggatctctccgtcaagaatctacccacaagacaccaccgatcatcataatctctttcaatttgatcacgagtatcataagctaaccctcatctgttccttcctctaaccaaatattccctccttcctccacctcttccagtataggacaactactggaagccatagtagttccacttctcaaccaaaatgacaaaaaagacttttaacacaaaacacataaaacaaaacaaccaagattacctagagggaactttcacaaccatgtcacaagacaagacaatatattaagaaagctttttacctttttttttatgttattctttttagtttcatatatatgtattaaaattattgtagttcaagtgggagaatattagatttttatcgattttattaaaatttaggttgattgaatagttctttcctgtgttagctcatattgatcaatagttaatgggcttagcattgtatgtctaaagtctagttgaaacagaagtgtggacttttctagttaactgaaacctttgatgagcaggccaagtctaactaggattatgttatgtagctaagtctcctaactctataaatacatattctcattacaattgtatactttttaataataagataaataaaactgcttctaatttaaagatctaaggaggaagacttagttgatagtattacactatcaaattgtggtaattgcatggatcaatcaagtatgtatatcttattattatatatactatagtgttctatattatatccaatttttttttatcttgcaattattaatttttctaacattcgtacagttctttaatttttttaaagttttcctattttaaaaaagttattgtgagtgctcttagacttgttggtaaaaataataaagtagttatagatacgtgttagtgatgtggtttggttaattcactttctaagattattataataatataatttatttataaaaagtgaaatatatatttgtacatattttttgaatgtaaaatatatttaatgtgtgaaaattatctcaaatttgaaacgttttttaaaaattgtgttaagttgagttatttatatttagagtaggccaattcataattatatggtctataacatttcagcccacttctaacataattctttattataaaaaaataagttatatgttggttgggctgaatagttttgtccatttatgcacctctagtaatacattgtagaagaattagaaaatccgagttaattactaattaaattaaattaacttcaaagaagctaacaatagaataaaaaataattagtgaaatcttcatagacaaatcatgttaataagaataatccatatgatattattttaatttacagtccctttgctatcaagtaaatatacatataatactttttgtactctctctctctgttttttgttgtgttcaagttaaaattacataaaatattattacgtacacatttcaaggcattgcaatagcaatgttgaagatcagattcagaacgaaacataatatatgcggtatattaaaatattattgaataatgaatatataattgtatgtatatttttcatttaatgcaaaatcaaagaagaagaaaatttcaattcaaggcagcggtcaggtcatctcatctcatcttatgctataaatatattatatttatttatagctttaacttcaaatggttttgttttgttttggtcaacacaaaaggacacaaccacatacaatgaatcaatgatgcaattccaacaacttgctatatatttagactaaatcttatcaaattttaattttaaaaaataaataaaaatcctagctctcccacacgtaaccctaattaattttctttttatcttttcgtaaccctttattttgttaatatatatatctatacgtatcacagaaagtctaacataataaacaaagaaaaaataaattattaattcatatcagatgataaatattaaatgatactgtgcacgtgcagacaatatgtaattatatcatgaaggttaattagtccactcatcataaaataatactaattatatgttaattaattataaataaatgaataataataatttagacaataaatttagtaaagataagtctatttagtgaaggtacttaggtcatataagttatgtactcccattttttaagatgaaattatttatgtgacgtttggtaatatttttgttttctaatttttaatcagaaaatgaaaataaaatttttgtttttaaaaattttatttttgaaatacgaaaatgccattttgattatgaggcacttgatgatgaagccatgaaattaatggaagacaacaagaagaaacttgagagtgaagccaaagcacatagtgccatcttcctcagtcttggtgatgaggttttgaggtaattttcaagatgaaaacaagaccttgggtctttggaacaagttggcatcaatctacatgaagaaatctcttacaaacaagttgtatcttaagaagaagatgtacacacttcgaatggatgagtcaaaggaatt

SEQ ID NO: 378983 - DNA, 4522 bp, Cannabis indica
aaaatggattttgccgattgaataacttgagagggatcaagattagaaattggatttgagttcaaagaattaactctttgttgtgcatctgatatatcccttttaagctgaccaaacttactgatatgccatttttgtaagtgatcagcacacctatcaagatatgaaacaagaccaagagagagatcactatctttgtgataaaaccaacagtctgaaattaaaccagaacattcttcttcattcaaccaaaaacattcaaagtgagatcgggatcgacgtaattcgtgaaattttaggagctgagaaaaacaaattttggccataattgctctatggtccgatccaaagtaatccaaatgtgtaatagttggtgaggttatattatcttgccaaacatgattaatgaaacacgaatccaatctctctttcaaagttgttgggtttttcttattttttgcccaagtgaaatcatccccaataacaggtagctctaataagctacattggcccaatgtagaacggaaaccttgcagttggttatcatttctaagtggaccaccatttttatgagtatgggaaaaatttcattaagatcaccaattagcagccacggatcaaaaggagaaacatcacccaatcttttaagtagaacccaaatatgcttttatttatagcttcaagaaaaccatatacaacacaataatgccaacgtgggccatcatcaaacaagacacatcaatcaaagtgatttgtattcatagagagtaaagttacattaacattttctttccataataacataattccacccttcaaaccaacccaaggaacttctaaaccatagctaaaatgtaaagagcttttaaaatgagagaggacacctctagaaactttcatctccataagaaacaagacatgaggagattgctcacaaaaaagcaaacgtaggtggcggaacgcactttgactccccaaaccacgtgcattccagcttaagattttcatgacgaggagcaggattgctgagcaatcactgtattgtaactaaaaccaaagaatccaaagaagctttagaaattggttggtgaggctccactttaactgacaaggaagaagcttcaggtccatgaattgctcaacatctttttagagtttgtctcatttatttgggatcatgttgcctctttaggatgtacattttctttgtcatgattgactacaacagtaaaagacaatccaggaccatgagaagtagaaacaattgatagtgtaagtaaggatgtaaccctcatcagtagggaaggccatattaactgtggaaggcttaaaagatgaacttgtaataagatctggagataagtagcatgatgatgtgaggaagaagacttaaatggagagttaagagtgttgtctccaatatctggtataaagacatcaaatatatcaacaatagaaacactaattgtggccataaccatgggagtggtagttgatggaaaaagaggatcaataagtacgaatgatgattgtgatacagagaggaagttagcggtggaagtggcaaaggaacacgactggtttaagacagtatgggtgaagaaagttgatgtaaccatctgtgtaaaagtagcagtaatggcagtagtatcactttgtcaattttggccattaaaatgctgagaattagaagcctcaccaattaaaagttgtttcggttgtggaggaggcctagtacataactgtgggattgatgcagtaagagaagttttagccaatcttgtgagaggtggccaagcatttcctttagagaagttcgaacgataatggtcataaggtgaagtaaggagtgcagatcccttcagtattggtcgataagccaattcgggttcaataccattgctgagattccttaaaaaaataggacacttttgatataagtgaccaatcacgccacattttgtacaataatctggtagacgttcatatcgaaatttcacccaaaattcatctcaaatttttaggaaagtaatcattttttctcttagcaggggtttagttatatcaatacgaaggaaagggccccaaccctcatttaaggagtctttatggacagccaagaactcacccaacaaatttctcaaaaccttagccaatgatctcaatttacttaaaaaaggaagcctataagcctgcacccaaaaaggagagaagatcatacctccggagtgacattttgcataacagttggaggatagagcacaatatgatggtttttggaagggccatggttccttctctaatgaccgaagccaatcgccctcacaaccaaaacacactaagaaaagactagagcggtgctccttgatattcactttaaatcgaccgtcccaatgctcagccatttgacgctacagtgttgaaagccagaatttttttagtaacaattcgtgcaaacagagcagatttttaatgaacatcaacctcaggagaactatcatcaactatagcaaacactaaactttcattctcagttaaattcatgattgatttcatcttatggataaaaaggtccatggaaataagaagaaatttggaaaagagaatgttgaaacaataaaattgaagaaaactaataagaaaaactataaggacaataactgcctcaaagcaataaaaggtagacgctctaaatataattaattttttaattatatttatcatggtcaggtatacttgtttacatttggtcagctcactcactatttaagaaatttttttggatggaaagtaaaaattaaaacaatatgatagtttaaagaattttacaagtaaaaaattaatttatgaaatgaagtatgacaaataatataattcacgtaattttttcaacaatatccttatacacaattttatattatactaattagaatttgataatctagctttggactgaggcaaaaagtctgaggatgacccaatccttgctaaagaactatccgaaagccacgtgtgtgtccatgagcttcaaactttttattaagctatgagcatgcgtccatatctttgtagtacacgtaaaacacataaaattaaaaacacttatgtataagtcacttttattacttttgataagtgtgattcattttaaatatatataatggtagttgaagtgatttatcaacataggtgtatgatttatgttacatatcattactcaattgcattaatccatataaaatattccaagaaatcaataatataatatactacttgtatagaaatgacataattctcttatatatatttatttgcagggtttagagaaacgttgaaatcagatattgatgtagggagatttcagccaccaggggaaagaaacacaggaatgaatttggtgatagtttcacatggtttgactcttagagtttttctaatgagatggtacaaatggactgtagaacaattcgaaggcttaaataactttggcaatggcaagatgatagttatggaaaaaggttatggtggaaggtacaagtatatatatatatatatgtatatttatatataaattagtttagtcttgaaaggagaagaaaaaaaaagacagagtacgtatgaattgaccttaaccttattatcttatatttagcaatagctaatcatactatatgactgtgcataggtatagtttgttggttcatcacagtgaagaagagctaagaaagtttggattgacagatgatatgcttaccgatcaagactggtaagaacttcatttatatagaatcaagccaaatatttgataaaaaatgtacctagctattatttcgtatgtttatatacataatagtctaacttttgtggtggttggcttgtgatttaaggcaaaagtacgcaaaacctggacagctgaactatgactgcccaactttgagtgccttctttcctcacttagatgaagagtgtgctactgtaccataattgtaattattatagctgtaatgacatatagtcgtgtagtactaattaagagcactcccaactccaatagcttctctactttattttttaaaataaatcactaaattttaaattttttattttacatttattgcccaccatacaacttctctattttttctcactaaatcatttaaatattatatcttattaatgaaaataatattacataaatcataaaaaggaaaatgcaataaagaaatggagagagaatgaaagaaaaataattgaaaaatattttgagatgaataaataaagatgatgtaaaacaatgaatgattttagggcatctttggaagaggtttgtgcttttttttaaaaagaactctttaagagactaaaaaaagaaagaattagtgcatgtttggcatcataactaaaaaattattttttgtttttaaaaacaaaaaattgttttttgaaaacaatttgacttgtttggtcttgttttttgaaaacagttttcagaaaacaaagttacaaaaaacaagaattttga

SEQ ID NO: 378984 - DNA, 2774 bp, Cannabis indica
ttgaaagtggttgttgcagtctaatttatttttgatttagtcccttctaaacttacaaaatggtttaagggtggatttctatatagtttgctaaaacgtgttcctttaactagattttggcatttgttttcttgcaaatgtagttatccccaatacaatctatcctattgtttttgggtacgagggtttcgataacgtctagagatgacatggaattttcggggtcgagattgaaaaagtaggcaattgtgaacaatcttttggtttagacttatgttcatttcatttggtttagtcctgtttggtgtagtggcatgatatgcaaagagctaaaactttatccagtctggtgtaccggcgtgatatacatacatgagaaatacttgacagaagtcaatggaggtttacattaatcagaagtcctcgtatcttttggaatctaaacacttgattgatattgtatctcagacactgcaattgcacactttgtcctgaaagtttggttcaatggcactattcctggcatattacaactgctttttgagatgctaagggtattagaattaagatcaggcttgtaaagccatacacttaggcaacataaaagtgacttcctttgatagtcaattgttttgttttctttatcatgtagtacaaattggctagtaaattaattatgattctaaggctaaggttcttttgcagttttgcatgaagccatcctcagggaagaatattttttagtttgaatgaatcatttcaacgcgtttctttccctgaatgaatttagttctgtggcgtggtactgtggctgcaggatgaagctaagaaagcattagaaggtgcacttggtggaaagaaaaatgaatttgagaaatggaacaaagaaataaagcagagagaagaggctggtggaggtggtgatgctggtggcggaggttggtttggatggggtggacggtttggatggtccaatgatgacaatttctggcaagaagcacaacaagcaagtcttgccgtgttaggtattctcatcatggtaagaaattacttgtttagctcctaattttaagtatctcgtgatttttaatgagtagagtaaaactcattattttccatttatagtatcttatagttgcaaaaggagaagtaatgcttgccgtcgtattcaatcctttgttgtatgttctaagagggacaagaaatgggcttacttcggtaacatctagaatttcggggaggacatcaccaagtagtttcaatgattctgatatcaaatcaaatgaagcctacgatcgtgtctctgctaaagacagagtatcaagcaaatggggaaactagtgatttttgtgtttttcacagtggtgtctggtaaaggcgatatcaaacaattgaagagataggagagtattgattatttatgtttttcgcttatacattgtccccatgttttgtgaaggtgaaatctgaaaatatggattgtaccatgttcattttgtccttcagattttggagttagtttttaaaatttccagtgaatcaaatatacaatgtgtgtcgtatttcatctttagatttcataagacttgggactaacataatacatataccgtctctcgctcattccatgtgcttttacctcccttgtttcaaacctagatgcctctcgcctgatatcatttggcctttctttataaaaattggaatcttatggtcgttttcattattctggtgttgtagtgtaatagtcaatcttgttgtaaaaacaaagtttttgaggtggtcctcaaaagtgctccataaacgttgagtggatgatcctgaagagacttatgttgcagaggcagagatctcttagtgacagaggcaatgtcttttaaaatctagatatatattttaaaattctagattttctaatagcttcagaaaactctccttaaattttagtggagggggaacgtgtaattaatggtttatttcactatcatgttggttgtgattcttgatacaaacacattaacagctgagccctggtgttggacagggattcaggcccagggacaccccagttactgttatttataatatatactggccctcaatgtctgttgctctacaaacacaaactgaaaaattagaaagaataaaaaaaaaaagttgggttggaagaaacactactttactttaatctgaattattaaaggggaataatttgtatagcatgtaaattaacatcaaatcatcaacacaaatttcaaactaccaaattttcgaggaaataaaaaactatcaataatgagatgcgtggcaaagctaatccaatccaatggtggtagttgtctagtttagttacattattgggtttgttagaaacagcaattactacaaactacattattgtgaagtgattagcttaaagataagtaagtaataaagtttagagttgctattatttgtggatcataataaatgataacagaaaagcaggaaagttctccaaaatatatgaatcataacagcaataatataagtattatccattagaaagagtcaaggggcatcttaggtccacttaatcctaggctaggctgtctcatctgatgcgtctgtttatgtgtgtcgaactgggactcgttgaaaagctctcctcgaatcttggtcttcgtggaagctagtgctgcaagagtgaccatcacgatctcaccacctccctctctcactctctcgcttatttttcttcggatcaccacatgaccgtttctctctctctctct

SEQ ID NO: 378985 - DNA, 4026 bp, Cannabis indica
aaatgcatgtgtgtagagttcagcaaatttgagtggtttgagctgatcgatacatggacagggaagaagattgagcttctcagatggatccagaccttctaatttggtgatctgctacaaacttcccaaacaattccctgttattcgagcttcttctggctcttcttcctcgatcgacactggtttgccatcgtttacttattttttatcatttgtgatgaatttttgaattccttgttctgtttgtttggaaaagttcacatttttggtcctttgaatcgttttctttgttaggctcgggtagtgagttggaagccatctctactttcagtgagattgttccggacactgtaattttcgatgattttgagaagtatattgaaaatcccttttagtaactttctttcaacgttggtgtttagttaaggatgaagatgagccttttcatcgatttttatttgctggttatttttgttacaggttccctccaactgctgctacagtcagttcttccctcctcttgggaatttgcggtcttcctgacaccatttttagggtaactattttaatttcaataaatatgagaaatggatcaaagtgaactgattttatgtatttatttttgtatagaatgctgtggatatggctttggcagattctgagtgttgtaaactggaaaattctgagctgaggctgtcttgtttttctaacaaggttggtttaatcatgtcctttattgttagtgttctcctgtttctctgtcaaaattggttatatcattttagattaaaaagaaaaaagtgacttaatcatacttttacaatgttagtattggaacaaaggtacaatctcaaaagactagaacattttagtgtcgtagcctaaccctttgtaaagtcattcttatttacttgcttcaccaatgtgggactttgtttccaaatccacagagagtggagtagcctaacaccacagtccttattacactcctagagcttcccaactacacttttctctcaaggacacagatataagagctaatactaagaatacaagtagatgaaatcacttggtgtgtctggattgagaaatctaatggctggttataaccaaagcagacgttgcgtatatgaaaatgtcatcttccccttccagccgtcagttttctgtaaaatttagttcttgttagcatatacaaacttttagcagaaaaaaaaaatggtgctccaaccattaggaaagcatattactaatttgttttatgttgtaggctctagtgaatgttggtggtgatttggcaaaacttgtccctggtcgagtttcgacagaagtggatgcgcgacttgcatatgacacacatggcatcattagaaaggtattgatgtgtcttttgtaattctcattttggtttcttgtagtcgtattgacgattctttattgtgatagccataagaaatgctttttgaagatgacattgacataatgtgcattctgtttctatgaaatctcattggaactgtaaactgtacataaggcatggaatgagataagggaatgcataatgaatctgcttcacgtctttgtagtataattgtgcttgtctaagatcttatgattcttatccctctgatgccagccagtgcattacttgctattaagtactttatcaataatgcaggttcatgatttgttgaagctttacaatgaaattggtgtccctcctgagcgtttgctgttcaaaattccttcaacttggcaagtaagtttaatgagaaagcatttcaattcctttatctttaggttctctgatagggaatgttttcatgaatgctcataagttttgccatccttttatttcccctaattaattgcatctccacttagggtatagaggctgcaagattactggaatctgagggcatacaaactcatttgacttttgtatacaggttttatatttgttctaattaatggttaagtacattcctttctcttgcatagctttgtcgtgggcactcatcatttaaataaattatctttgtttgtcttctgccattacttcttattagtttcattttattactttcttataaatggtgatagcttcctcatgtttccttagttttgcccaagctgcggctgcagctcaagctggtgcgtctgttattcagatatttgttggtcgaatcagggtaatcttctaccttgagttttataatgatcttgttcttctcagttcaattcatgtcattgatatgcatatgtatttcttgttcaggattgggctcgtaatcattctggtgaccctgaggtagatgctgctctcaaaagaggagaggaccctgggatactttggttagtcataacagttttgatatgtcaatttcatagttacacttacatggaattctgtttaaattgctagtaaacttgattatggcttatgcttagctcaatatatttgcatcttggctatttatttactaatgtaggtcattatttattttccttgtttaaaatctatactaggcaaattagcaactcttctatatagctactgttctatgcccctcctttctatcctctggccatgttgtttgagttcatttgacttggatattattcattatccatgcccagtgcatcttggtaataaaaagctttaagagactgatgtagtaaattttctgatctcagttcatttggtgattagtttctcacatgagtgatgaacgtagtttcgtcaacagcaaacatgaaatcgcttgtttgatcaattgatctagtgaacaatttttcattccttggtattattttgtctttcaggtgacaaaaacttataactatatccacaaatatggacataaatcaaagttgatggctgcagcggttcgaaataagcaggatttatttagtatcgtagggtaaatacatacgcctgacctcagatagtctgttgtaactagaaattcctgatcactcatcttaatttgtacttgtttcccagggttgactacatcattgcaccgctgaaggtactgcaatctctaaaagaatccgccactactcctggtgacaagtactccttcgtgaggaggctatctccagagaatgctgcccgctacagttttagtgaagaagaagtctgtgttcttccaaaatttgcaaatgcatgtctgatttaagttatgctctatcttttctttgcattatagttgattgacattatctcctttgaatatcaatccagctcacaaagtgggaccagttgagccttgcttcagctatggggcctgcagctgtggagcttctggcaaggggactggatggttatgttaatcaggcgaggcgagttgaggaattattcgggaagatttggccaccaccaaacgtgtagactggtatttagtctgctgtcttctattgaaataaacaatagtctttcctgttttacttttgttctgctcctttttctctctcaactaatatcaaatgttcaaaatctttgccaccaattgtgaaaagacttgaaacagagctgatcatgtttatgaaggtattaattactactttccaattactgctactggttttaagtttttttttctctgactgatatgcttccccttatttgagaagttctagaatgttgtcgttttatttcctgagtaggaaaggatgttttgttttagcatttgccatgttgtcgttttacctagttatcgtcgtttgatatagaaattactgtcgttatcattgtttattttcgtttattctgaatattctaccttttatctattgttgttgttaaaaaaaacctgtcgtttgctttcaaaatcttttctttctcctgtaagttgtaacataaattggatggtgatgaaactagattcttcaaggagcgtgaggacaagacagcaaatattaaggagagcatgtttggtattattttctgttttttgttttaaaaaattatttttagaaatgagaacaaaaaatagttttaaagtttttaaaacacaagtc

SEQ ID NO: 378986 - DNA, 5196 bp, Cannabis indica
aattgctgttccaatgcaagtttaaggtcgtctagtgatgtttcagtcaaatgattttccaaatttctaaaaaaattttatggtttttcttaagtaactcattgctaattgttgtggtaggagtggtagtgatgcttgttgttttcttaatatttttttggcaatttcataataactgtagtgtgatatcaacgtccggtgataagacttaatcttaaatttaagagcggttcttctataatctattaggaattcaccacttgaggccagctcaagtgggagagggggttattttggggtgtgtccgatcccaacttgtgtaactcaaaaatgtatttattagacgcttcaataaaaaaaaatctattaggaatttcgtttcttccattctttttttttcccctcaagccgtttatttatttttacagagaatatgctgacttttctggttggttcgaagcaagcatttgaggtatctttggcagatgtctcacaaacccaacttcagggaaaaaatgatgttatcttggagtttcacgtggatgatacaacaggagcaaatgaggtttgttgcttagatgcttagatgttactttgcaatcaatgcttgtgttaagtcaacaagtccttctatcttaaattaaaatggtgacacaatcactaattttattattttgcttgcaattgtcaatcttcaatgatcacagaaagattcgttgatggagattagttttcacatacctaattccaacactcaatttgttggtgatgaaaaccgccctcctgcccaggttagattgtgactagctcactatttttgcggtagaattgttttgacattgattatttgatattcaatttctttcactcaactggttgacaggtatttcgtgacaaaattatgtcaatggcggatgttggtgctggtggtgaagacgctgttgttacatttgagggtattgccatcctcacacctaggtatatctactaaactgaaaagtagagatttttctcgatacacatactagctggcacacaaacaccaacttttgattcagaattaaatttgatcaagttcttgctttatgtagggggcgctacagtgtggaacttcatctgtcatttctgcggctgcaagggcaggcaaatgacttcaaaattcagtatagcagtgttgttcgcctgtttttgcttcccaaggtattactcttcgtttcaatagcacgggttctgcatggatgctgattaagatttttatgcgcattttcaaattcttcctccattcttgttgtttttctctggtagcctctgctcaatgcaccagtcatcgtgatgttagttataacagcaggaactttttctttctgcagtccaaccagccatttacatttgttgtagttactcttgatcctccaattcgtaaaggacaaactttgtatccacacattgttttgcaggtagtgtttattgcattctttccattgtcatgattctgcttgatttatttatttatttattttacttttctgtcatctatagtttgaaactgaaactgtagttcagagcgacctatcaatgagtgaggatctcttgaataccaaatataaggacaagttggaaccatcttataaggtaggtattggcttattattgttttaatttaaaagaaaaatacatgccatgtgttgcatatgtttgtttaggtgaactgaatagattgacatactcactaattttttcaagtaaattaaagttgtttcaaatgtgactagcttttgacatacattattgaatgaatagggactcatccatgaggtattcaccacagtattgcgtggcttatctggcgctaaagttacaaaaccaggaaagttccgtagttgtcaagatggatatgcagttaaatcatcactaaaagctgaagatggagtcctccatccccttgagaagagcttcttttttctacctaagcctcccacccttattcttcacgaggaggtacgcttttaaggttgtcttttgcatatgatacaggtattgctgatctattctgtatgtaccagagattaattggagcttaactggtttgtgtttctagattgactatgtggaatttgaaaggcatgctgccggtggctcaaatatgcattacttcgatcttcttattagacttaaaacggagcaagaacatctttttcgaaacattcagaggaatgagtaccataatctttttgacttcatgaggtcagtacacgaagacattactttgataaagactattttgctattttcagttttaactttatccaatggctatgatgcagtggaaaaggtttgaagatcatgaatttgggaaatacaagacctacagatggtgtggcatctgttcttcaagatgaggatgatgatgctgtcgatccacatcttgttcgtgttaagaatgaagctggcgatgatgaaagtgatgaagaggtacgcttatatttatttaaaatgaggaagtgtcacaatatcattgctgaaaaatgtagtcgagttagttagctgggctatatcattgagggcttttcctagtacttaatgatccaggctcaacttgtttctacacataaatggtatacttaatatgttttctttttcctgatttggattggataaaaaaaaggtacaagaaagaaactatataagttggtagtaatatcaaagaaaagtaaaacttagtttcaagagttcaaagtaatcatcatgtacattttcccaaattatgggtgtgatggttgtgcttgttttaatatctgtctctcatcttttttttttatgctctctgatttagtatacaattgcttgtctgttaaccactgttgggtatcccttgatgtgctaatccacttaaatgttctgacacggtgaacatttacaggatgaagattttgttgccgaaaaggatgattccggttccccgactgatgattctggggaagatgattctgatgctagtgttagtggaggggagaaagaggtatggaatcttttcttattatttttgcacactaagaaggttctcttcaaaatctttgttattctcaaatcaactaaatgaccttttcagaagcccgtaaaaaaggatacaaaaaagaaccttcatcttctaaggcatcttcttccaagaagaaatctaaagatggagatgaagatgggccgaagaagaaaaacagaagaagaaaaggatccaaatgcacccaaaagagcattgtctggcttcatgttcttctcacaaatggaaagggaggtgggtttgttatcttaatatctgtcattatcttttgtgtttgtgtagagtattggatgcatattccttctgtctcaaccatatggtcccgcattgcaaattttgatctactttgtcactggtcatgggaacaaattttggtcactaaccattatctttgctgactgcagaatgtgaagaaaactaaccccggaatttccttcactgaagtgggaagagttttaggagataaatggaataagatgtcaggtaatcatgcattttcaaatagttgatttccagtgaccaatgagtgacatcttttggttgtgggccaacactgttgtatggcccccacctaaaccaacgcagtgggagttttgatttgatgctcccagtcgctttctggtcaattatacaccatctgattacattgtggtcacatcataacaaaataccatttttttttcttttcttattattctcagtggaagagaaggaaccttatgaagccaaggctcgccaagataaaaaacgctacaaggacgaaattagtggatacaagaacccacaaccaatgaaggtagactcagggaatgaatcagactcagaatagaatccaactctttaccttttcatcaagtgatatattccaaattgggtcggtccccctttttgggtttaaacaattgaattaaatgtatctacagaactattttgcggttaatatatgtattaaaaaagatgactaaaagctaattccctttcttcttttgcttatgacccatctttctcttacgaattgtattgttcaaagttaaaagcgtcacaggctgtttgtctgtttagtaatttgggcttgaagaaattaagtatgaatatatttgcagctaattatcaaatttgtattttgtagtttagattgggtgcttgttaattcatttggcgccttttgatcaatttttattactttaggaaagtaaaattcgattaactaaggaataattgtgtaacttttttttttttttcactataaaatagtgaattatttatgatattaaatggtaattacttatgaattttttttttcctgcaaaatagttaattattatactaggaaaataatgatttttagtactttatatttaaaatggaaagtttttcaattacatccaatttcagttatttgctttccaaaccttttctaaatgaaagggaaaattaatatttttatgtgttaagcaaaggtgaaagtgcaattgcataggcagtgatgctaagaatagtgtgtttcacgattgctaataattcagacattgcaatctgtcctgggaataattatgggtaggagtaggactagtctagaagcatatattccattaatccaaggtcgatgcaaaatctttttggtgtgcctcttttcctctcttttataatagctgttaatctagtttgattattctcttcaccacttattaataatatgcaaaaacatgagtaaattgtattattatgaagctgctacttaaaactgcttccccaaaatcgatcacatttgtataaactacaagcttgttcgtacattatattctaatgtacatcagtacatttttatttttttttataattgaacatcaatgaattttatcgattacgtcttgaaaattttgtgtaacccaaatcttgcccctctttctttgactgattaaaaaacaataaaaaaaaaaatacaaaaatagaaacaaaacacaaaaataattaagtaaaaattcattttcaacctttcacatactcctaagcaaaagtatttttagagccaccttcaccactcggctgatcttttcttttgacatagttgtgcttatttttttcttaaagatagaaattaaaaagtgaatactatatattttatatttatgtatatatat

SEQ ID NO: 378987 - DNA, 4286 bp, Cannabis indica
atatgtatatgtatatgtataaaacatgaatcaattaactcattttctcctcagcttctgtctattagagatgagctttttgagacgtttagaaagaggcacaaaggaatgatggatcttgaagaagtacatttgacttctagttcgctacacaggttatttctatattctactttaatattttttggagttcacctttgtatagttagtgccaaattaattgagcattttatgttggtttgaatgagaaaaagtaagaataagtaagggaacttgcccagtttggtgttctctatatttattttctggttaacaaatttgtgtagtgttttcggtacgtaattctatgcctgaaggaaaaggtggaaggatttcccttagaaaatatagggagcttcactgacgtctgatggttttacacatttagaagcacatgtttcaactatgtaggctgaattcatggacaaaattgtgatattttttactccaatgtaccaaaatgatcaccttttgtctcctgatgacattaggtttttaccaagcttgagttcaatgcttcttcagccctatattaatttaaaaacttttgacaggtttactttgctaattcattccctaattaattgaataatgtatcttattccttttctggatcctgccattataccttttccaggcttctagcatcaactatgtgtgtctctaccaaacatataaaaatcttgtgcacttccaccctttgattcccacctcaatacgttgtcaagaattgtggcttttctttctatatttaaattgatgagtgaccaccttttatccttgttgcctatagaattacacccttgagaaggggaccagttgatattcttacatttgttgtatttgttgcattttgttttcagacaagctaatgtgtccctagcttttgtagagaattcacagaagaacattgatcttccatccgtaattttgttacatttgggcttcttatttgtctcttattccgttttggtaaaaagtagcatgattggtgggtgtttatctccatttaaaatattcctctgtttatttgcaggatgttattagcttttagtgagcagataaaaggtaacaagttaccagagaatgcatcagatcaggaaatgctggaaatagttatggccaggtaggtttcagtttgtaacttaaatgatgttctggcattgtatgctagtgatgagttgtttacatgtgccagttacgtaaaatattgctatgatacaacttggtgaattttagaagtttgacttgaaaggttttgtggctttctgtatataggtatgaaacggaacttatgcatcccattcagaacctccttaatggagagctggcccgtgctctgctcatccaggtaattatgatttcaatatgtggtcaccgtggtgtatggtgcatttgtattacattgttttatattattgtttttgcattacaggttcagaagttaaaactggacattgagacgtgagtttcacaaactttgctttggtagataataaaagaattcaatttctcagtttttcacttcttttagttgcttaacggaatgttatatgcagggcgatgcttgaactcaaccagattctcagggcaaatgagattaactttgctatattagctgcattacccacattctttctttctcttcttctgctgatgttagtgcgtgcatggtatacacaggtagcagactatgcaaaacttatccaattgctcttgacacttgcagctagcatccatttcagagtgtggaataaattggacagttaaaagcatttagtttcaggaagaaaacatatacactgcggaaaataatatttacttttattaggcataatcttaaaagtacacatcacataagattacattgagagaataaaccaactaactcgtattttctaactatacctgactaatttattcatttgaatagttcaacactcctctcaagttggatgatatatactatacaatccaagcttctcttgcaatctttcaaacaaaggcatatgcaatacctgtgtaaaaatgtcagcgacctgttgagtagtatgaatgtaggagactttaagaatcacttaacaaaatattctcctttatgaaatgacaatcaaaatttaacatgtattgacaattgtgatgaaccaaattataagataaggatatataagccttattatcacaccaaatattctccgctatctactgctgtcattctagtctcaaatgcttttttcaagctgtactactaatctcttgaagtcatccttacaagcttttgatctaactatgtaaccaggatcctaaatgtgaactttagaaaattactagatggaaaatgggaagctgaaatgaacttaatgtgaactttttcattttataattgtttctggtgaccagttatatagacttgtaattgatttctgttcaggatactagagcagaaggaagaggaagagtttctcgcatccagagaaggttacttgttgttgaggttgagaaaaggattatgatgtatcaatctttccttgaccaaggactggtgagaagctaaaattgaactttcattcggaaattttacatttttttttaatcttttctttcaaatattaatactctgcttatttgatctttttcacccctattaacaaatgcaaatgcttcttcatatgagcaaaagtgatctcagcctgaacgattcgatcattttcttgccaaattatttattattattaaaaaaaaattccttaaaaaagggggcagcaaagaatagataatgcaaaactttatatatttatttttatcagatgtagtgtaattattgtgttgatttggattttatggttcttgctggaattacttggtctgtcttagtttaagttaactttgtttcatggtggctatactacttgacattttgatgctcttttttctctttttttgctttgattgtcgtgaaattgtgtgaaatttatgatttttttttctagggtaataactgaagatagattgccttggctccaaattttagtgttcctattgcaattcatttaaacatctaatataattgcatagctttgttttatatattttaagaaactgtgtaaacgaaagggcataaacatgatgggtcatgctatcacaggaaaatgatgcacaatgcatgcttggtttgatgttgtatagtctggatcgcttataccgtgctgtggagcgacatgcaaaagcgagcggtgaatggcaatggttagtttcaatctgttttatttacatatttttagattataagaaagaaggataaaaatatgagttggacagcagaactaatgagcggtattatttcaaacagcttaaaggaagacattcttgacttgggaaagcctggtctccaaactgggtataagctcgccgtgacatcgcgcattggacggatgtatgaatgtttgcttccttcactgaaacgacagtagtttctcctcttggattttacacctatttcgatatttacgttgtagatttctcaacgtaaaaagcaccaaatcacagttgtacaaggactccaaaacatttttgacctccataatgatcaaagccaccaaaaatttcacattttaaactctttctcttgtgtatctttctttgaataaagccaaaagtgtacttttgtttttgctaataagctaaaggtatactttttttcctttgacacaagacagagttatactttaaaatgggaaaattacgacaaaaaagtactcaaaaatgttatacggttttaatgattttagtactttttttagctggtttctgggtgtaatatgttgtatcacagttggtctacttcataatttattataaaatattaatttaaaaataaaataaaataaaataaaacgtgcatgatgattagatttcgcggttattagaaaagatattgttcagaatagaagaaacacaaaaatgaccatactgattgtttgtaaaagctcacttagcgacattatgggccataaaattgcaagttctgctaacaaaataaaaattacaatggaactccaaatcgctgagcgaattgataaccattctagaatcactctctataataatatacttcaagcttttctctttagcaacttccagcgccaagcagcagtttgtcgcttcatcacaaagagcatcagagaactctaatctagctgtatgcacccccacacaccactccatggtggtttctagccacaactgca

SEQ ID NO: 378988 - DNA, 2637 bp, Cannabis indica
aatgaaacttgggttgggtcctagctcagctgataagaaattgcctttagggaagtatctggcttaaaaacttttgctactaatgaagtttcattagtaagcaaacgccacccctatttccctagaaaggccaagttataatcccttagatttcaaaaaccaagtccaccaacatatttatgacaacaaagcttacgccagctcagccaactgactcccttagacgaactcttaccttgcaatttccaccaaaatttagccattaacccctcacggctagaccatatttctttagtgagaagaaatacactcatagcatagcttgggagagattgagccacagacttcaacaaaacctctttgccggccttagaaagaaatctagttttccaactttggatcttctttatcatcttttccttaagaaaacccaaaatggtatttttgcttcttcccatagtacaaggcaaacccaaatatgtgctgttgtcagaagcaggaaccatacctagtagattacataggtgagtctgatcccatatgaagcattattactgaaaatgactgaggatttagtaaagttgatcttttgtcccgaagctctctcatagatagcaagaagccgaagtacactagaaacctccatctcatttgctttgcaaaaaatataactatcatctgcaaacaacatatgagaaataataggagcatttctagcaacacgacaccccgttaaccaatgttttcgcacaaataaattaaccagagaagagaaccccttaccacaaatcaagaacaagtagggggataatggatctccctgcctaatacctctgcttggtacaataggaccaaaagcttgaccaccatgagtgtcttgtatgtaactgaagaaacacagtacataatcagcgcaacaggtttactagagaaccccatctgaatcatcatcacttcaagaaaagcccattccactttatcatacgctttactcatatccaatttcagagccatagtacaggctttgcccattctctttcttttaagataatgcaatatctcaaaagaaatcatgatattaagagattagtcttccctgtataaaagcactctgagtttcagaaataacacaaggtaaaacaagcttcagtctgttggcaagaaccttagatatgactttgtacacaacattacaaagcgaaataggtcgaagatccatcatagtttcaggttgtttcttcttaggaataagaacaatattagtttcattaagaaaaggagaaaagtaaccttggtcaaaaaacattcgaacttgcgaaataatatcaccactcaccacattccagcattttttaaaaaaacccggagtcctaccgtctggtgcaggtgatttgtcaggatgcatttggaaaggtgctctgcgaacttcatcatcagtaaccggttccagcaacaaagaattctgatcttccgtgacaacacgtggaatagtgtcagtaaccttccgagtttccaacgaagaagaagagaataacttgctgaaataatcaaccataacgccttcaaaattcttctcccaatcaacccacacaccatggtcattttccagcttgtgaattgaattatttctccttcttgaagtggccatagcatgaaaatacttagaattcttgttcatatatacattgaaatatttttcaccatggtcatatggacagtattttaaacatttgtacctttcatatatacattttaaaaaaaatcaatttctaaaatacctcttgttcacacttcatccatgcacggtgatgttcttctgtaactatcacactcaaaaattctccctctcttttttttccaagtttttatttcttttttcatttttagtattcattttgaaaccatgatcaaaataagtttctctccgaaaaatcatatccttctccccacgatttctgttatggcgagttcaacttcttcctctccataatctcaactacttccacacaattttttctctattttttttcctctatataatggctatcactcgtttgtcatcttctccatcccttgctgcaaagttaagggtgttaaatctattgcaaagaaaggaattctaaaaaggatgatagatgaggatgattttgttaagcccttacctaaacagaggaaggctcttgccaagatgaaatctgaaagcgttaaaagtaaggaagttcataggagtctaattttctatggtaaagaggggaagaatcaagttgattggttgattgagatttgtttacatttttttttagtttttgccctaattttagtttgatctcttttaggtattgtttctgtgttttgatagaagttttttctttgttttttatcttatgttttgaattactgtttttgtcgtaacgagttcatttgtattgtgcgttattagttttatacccgaaattatgctagcacatcagaggaagacatggtcaagctaggaagaataagaactgagacacgtaatcatcattacacttgaaatggaataactcgttaaaagcataattaacaaagtatgtttaactcggctgactgaatcgtcttatgcgagataaaaatatacaaactgttgccttgtgcctc

SEQ ID NO: 378989 - DNA, 1722 bp, Cannabis indica
tgatgaaatgttctgttggcttaatgaggttggccatattataatataaatataataaattctaaattcttcaatttatatgaaaaaaaaaacacaattgtttaaaatttcaatcacgtgcttatatgttttttttgttttgaacctcccatgaattataatcatgtctttagacagtgacagaggtaattaatatgtaacacgatcaatccctgccttccacgtgttaatgcgcatgtacttacaaactgaatattcaactcatcaaaaattctcttgttttttttttctcatcactttcacttttaattttatagtactttatttatatgaagtgaagcataaagctcagctagagagcaaatatttacttataccaataaattacatgaaccacaccaataaccaaatattgttttagttaataagtttgtcttggctctttaattagatacgtactttggaggtatagccatccaaaaattatacacttaatataccttattactattagtcaacctatatatgaaagtcaatttagtattacatatagaatttgttgaagaaattaattggcctaaatatataaaagaaaccgcgtacgggagatggtcaactagaaaagtagagcggtaaaccaattggttcatgtgaacgtatcactgtatacaagatatttgggtccaagcgtgtatggcctacaaggattttgtttgtaatatatataaatatgtatatatataattatatatagctatccctttcatatatgatattgctcaacctttactcaataaccttctgtagtttcaaaacgagcagtcttaaaaataaatttgttagaaaagcataaaccttcccaaactgcttcacattaatcaataaaaggaacaatttaaaaaaagcctattacatattaattcaactttgaatatattcatttaaaaataataaatatataaaagacgataattgattgaattaatatattatggatggtttcatgtgtagcatatgtctttcagaagaagttttagctcttttggtaagaatgagatgggtccaagatttacttatcacagtgatctattcagattaatttgctgtccttaaatttggctttgaagttgtctattgtgtattagaatgagttgcgagtttttttttttttttgatataagttttattgtctaattttttgagaatatctctctctcatgttaatcgttttattaatgttgcgacacatagattatttaagcatgcccttaagataaacaataaaatttttaaaccaccttttcactttgatctaacctaaaaaggttacctgtacaaataaaatatatacattagtaccctcctcctaagacgctttagtgttatgcaccactggtatcctatagaagatatctttgacatggtcatactttaattacgatagtataaactatattgttgttaccactacatgaactaattatttatatatttgttaaaaaaatttaaatatatatagccactacaaaaaaatactacttttagtgacaattatttagttacaacatagtttttttgtgactaaatgtgacttttagtcacaacaaaatgttacttgtgactaaagcataatatttagatacaaattgtcattaatttagtcttagtcacaacaagtatatattgtcactaaaactacatttagtcacaacaaattgtaat

SEQ ID NO: 378990 - DNA, 1224 bp, Cannabis indica
ttgtttaggtttttaccactttgaataaataccaatttttcccattttattgggtaatgagaaatatctttttcctaatatcctaatacttcatttctgtcacacggtagttcacctgtgctaaggtaggttgcaattagggtcatccagtttagagtactatttagcatttcaattttttctgtgcaggtaatgcttgggttcttcacgaactggattagtactatatttaatttatctgtcactgtactgcttactaatcgtgcaagagcatctgcacctgcattttcctttcttaaaatttgcctgatggtgtaccctttgaagtgtgcgagaaggtattgtattctacttaagtaagccatcattttttctccctgaaccatgtattcacctagagtatgattcacaaccaactggagtcgttgcaaatttctaagtattcagcatttacttctcgtgctaattttaatccaacaattagtgctttatattcagcttcattagttgatgttgtaaaaccaaactttattgcccccaggtgtgatcaaggctatccctgctctagacagttgatttgtagatgatctatccacatgaagcctcgaaatgggcattttttccttaggtgcatgttctttttctggcttaggaatctcttctaaaatttctttttcttctcctgtgtattcgtctacaaaatatgctaaagcctgccctttaattattgtccatggctggtaagtgatctcatactgtcccaatttgatcgcccatttaagtaactggccaaaagcatctggcttttgcaagacttgatgtagaggcagatcagtatagactcaaattaggtgagcttgaaagtaaggccttagctttcttgatactagaagcaaatagtaggttaattttttgatcaaggggtatcaaatttctgcgtcaattagctttttactgacatagtagatcgagtgctgggtgttactttcttctttgatcagcacaacacttactgcaaactctatcactgccaagtaaattcccaactcttctccatgtagagattttgatagaatatgaggttttgagagaatatgaggttgtgcgagtcgctttttttagccctggaaaggcttcttcacactcgtccttccactcaaactttttgtttcctcggaggatattgaagaaaggaacacatttatcagtagattttgacacgaa

SEQ ID NO: 378991 - DNA, 4973 bp, Cannabis indica
aaaaaaaacaaagaaaattactggtatatacaatacggatgaattatagacatatatagaaagagaatgagaaataccagagtattaatggggccaaaaaaaggcttcctttgatgacaggtcgggctttggagaagcaaagctggtgatctgaaaccggaatcaacgaaagacatataaaaatgtatataatattattatttgtattgttgtagaaatggaagacagttaagatgaagaaagaaaagaccttgaaaggttgtgaaggcaattcatatctgatctcgtccagcaaccaaaatatctgagctctgaaacagagaaaaatgagagagaagaagaagaggaaggagagtgagtaagagagaggagagagtggcagtgtattgtattgtattgtattggctattggtgatttggtgggcacatattatttgtgtatttttttttctggaaactaaatatttattttatttttatttatttttgtagtgacgccaaaacatttactgatatttttttttagtacaattgggatatttattattaggagcttcgagggagtgaaatacggatctctctcgccattcggaatatgtcatatcacaccattttttagacacattttaaactgaaactacaagtattgtctgtgtctcgatggtaacacaaattactaattttactaacaataaactgagcttagttaaaactagaatttttatgttggatatgagactctagatttgacatatatttttgttcctcttggatattagaacatggtagctttgtaaaaagctttctgaacatttttttttaaaaaaaaaaatcaagaaagtacttttgtttcttgaagctatttttgatcacttcttaactagtttcatgacactaacatatgagatcatttcattttttatttataattttaaatcaatatcatctaatatttattacagctgtttttcatatgtatatataaagtcataactttatcagctgtcatactttccactgcagcgaataaaatctccttgcaactgaaaaatcagacaggattgtttatggtatatttttcatttttcaaagagaacaaggtaactatcaataaaaacagtaactagaaaagatagtaccatgtgaatagattttgttttgagtcttcaatatcttaaacttttaaaaaaaagaaaactgaacttgtgttaatgtaaattttatataaaagacgagaaaacagagtaaaagatttctcaacttaataaataagaaatttttttaggatggcaacttcagataaacaatgccagtgatgatagaagccggtaaaccgcatatgatttcccttttactagtttaagagggttctactacatacatcacggccaaaaacatacaactaaatttgctcaaaattttgagacaagttcaaactttgtacttctatgagatgggtaaattaaatgaataaactagggaagaaaaaatatgtagaagcagcgttgatttggcagcatgttccagttgtcctcaaagaaagaaagaacctataatgttaagatgatcacatggggaataattcttcattcattgtacaatgagtggaacagaatcatggaaattatcacatatctactggaaaaaatggatcctccgaagactgtgaatcaccaaaaaaagttttatacttggttgctcctggttgatttctctctgggaactgccaaaatgaatctgagttctgcataaatatgtaaaatgccagagcagaagccaaaaatagtcccaatagcatcatatatatttgccattctgcacatatttgaaaagagcattagaaagggttcttttgaagaaaaaagaaaaacagaaagcacacacgcgcattaatgggacagagagagagagagacctttccaatctactggaacatttagtttagttgccacagctccccattcactagaagtagtaagaacaaccctgcaaagaagcgatgaaaaggcgagagttcaaacacggaactattgaaaacaatatcgaaaatttgaatcatgaacttcaaaagatactctcgagaacaaatatgagttcaagtgaatgaattaattgtatatagaacccacagtaactaattaagaacaaatatcagtttttatttaagagcttgacattaagaagcatcttcaaaatttaggtagcaattttctgctcacgataagaaagccaaattagaaacttttaggtaactccagcataggacactaagcaatatagttcaaattttgaagtgcaaaaacaatgcacaatggcacttatccatgtaacatactaaaactaaattaaagttcttttttgcaaatcaccactccttttgcctcttagtattgatcaatgaatcccattaacttaacacgtcaaaatcatcaacactcaacaattagcctatccagttggattacctttcactgggacaaaactctagcgtttcaatgcatgtccccaggtgtagccttctactccagtggcagatcaccatcttctttatatcaacagcacatatatctccatctttgcttcccctacaattaacactcagaaagtatattaagaaccattgacactcaaagttccaagtaaagaaaacaatgtagttttaagtgcttacagagcaagatatttcccatccttgctgatggacattatggaagcaggctttttaagtagccccttatgcccgattctgttccatgtacttatatcccaaactgcaatgactactttatcacctgattaaagaacacacacattcttaaatgacaagaaacagctagaaacaagaacattaactactaaaggaaagtggaaaacctttttgaacagtgcaaaacagaaatggcttcgtcccatccttggaaaaccggcatagttgaatgtcttccccctgcagaaaacaaaactctgtaacatacaggaataggaaataaatcaacctactaacaactaaaattcaaataaacaaacataccgttttgcgtgttaaagttgtcaggggataaccatcttctgtcttccatattcttgcggagccatctgttgatgttgaaactaaatactctgaatctaagctggaaagtgaaaagaaggccagagttagagctgaaaaaagacaatttgtccatcaaaacacttcgaaacacataaaaagaaaagaaaaccaaaaaaaaaacttatccatcatattaattttcaacataaccattatatctaaagggtagaagattactccatctcaagggttttcaatggcttatgaataagatggagtgaatctttaagcaaaaccaggttcactgattctttaattagttaagaaaactaacaatgcctttatcatacaaccatactttgagtttgatgtaaagaagcacatttattcacgattgtccaagtataggaaaaataaaataatccacattggtatctgttgcacatgagcagccttattcaaaattcaaattagtaagtaaagcacataataaaagacaaaggatgttgtacctaaaatccatatcatgaactgacttgtgtgccttcggttcatctaaaatgacacgaagacttggccatgcaaaaattcttaaatgcccatcctgtacattgtaaattatcggatcaggttatatgctacaacaaatgtataaaaccgaacaatgacagaaagaataagatggaaactagaaagtacggattatcacttaccacaccaccagtggcaagtttagagccatcaacactaaaagctatacatttctgaggaccaacaccttcaagaggtgttagctttcttgctgagagctttgcatttgattctcgaccatactcaaacaatctgcaaatcaattaacacaaatatatcataccacagcaatagtattatgtacgaaggtgtgggggcaacaagaaacactaaaatgtactcaataattggacattctgaccttaatgttatgcaatctccaaaaaatatgtcgaaaatagaaaaagatagggtcacaagtacccagcaacaacaaaaaacataaaagggaaaagaaaccatcagatgaacgaagcaaataaagagtagaagaaggctcaaaagagtggctcatgtgacagccacggatcggatatccaataaaaattgaaatggactacaagaattttgaaagccagttggatcagttcagttagaaaattatattttttgaacttcaatagcacataacaatacaagttttcctatatgactagcaaatatcagtactactaatacaatatacgcataaatcagtttatcaagatgctccacattaattgttgttgctctaattctcaaatggtaatatttgaaatcggttaaatggtctctaaagaatagggttttaggattaaatttggaaaagacacaaaattagtagagtgaaagtttagccaaaaaaatcttttaacaagactgaactattatccaaatacgaagtgaatttgatgataattataactgacctaaaattgaatcaaataatgcaatgaccaaaatagaaagaataatttgaaggtacttatttatttctatctaaagttgatcatgaattcaaacgaaacaggaaccaacaaaacagtaacccactttcagaaattgctccccaacaaaggccgacaacattttcatttccaacaataaaatttcaagaaatgcacaaataccaatctcaaccgaacgaataatacgagttaaacgctcaagtacaacagtaatttcgaaagtgatgtatggagaaaataactcacttgcagccaccattagttgtagagcacacaatatcctctccactcggatgcactgcaatcgataccaaatcaccttccacttcttcaactacatacttatcctgataaaataataataacaataatcaaaacaatta

SEQ ID NO: 378992 - DNA, 3806 bp, Cannabis indica
ttaaatataaagttctaaatgtaatcatgtgtactcgaaagaaaacaaagttgaaacatagctgaaaaaaatgtactgaagagatcataaaggatgtttatttaagttttacatcttttattcattgctaagttcacaattggccagctctttccaacatcttaacgaccttattcaagatttcttcccttacctcacttctgggagggtgaagctcgatttgctacttggtatgaatgtcgttgcatctgccttcgagaagcaaagatacgagggagattcagttgggttgcctgctcattaacaacatcagtttcatgacctcgctgctctgacggtacagttggacctgctaaatccacttgatgtattgtttgcatctgcattgaagaagcatggataggtatttggttcattattggcccattacaggcagaagtgctttgaccttgacactgttggggcgtaatttgacttactaaatcaactagaggtggccttggatgcatttgcattgaagattgtgctgcgagtggtgattgtacctgctttggttgttgccaattcaaagtttgttctgcctgcatgaacttaccactgttgcagagagttttgggtttatgcaatccacaaggaaagtttacatttgaactcggtgagatgagagattggttcaagtttgaaccagttttaggtggggaaaacaattgttgatgtgtagaaggctgatcaccatgacctctagcagataaagtgccttgaatcattggacctgaagaatccaatgttgatactgtccgaacatttatacccttattcatagtagtagggatggaattttgaccattacttcctggtatttggatattcatactatttgtcatagaagacatgaattgatttagaatgcatgaatcttcgtctacaagtaagtgagtggagaagaaaccactaccagtgccttgtttatccatatgctcctgggaaacatggctctcaactctgaaggattggggtgtttcttcaatggtctcactatcagtttccagcatacgtgagtgcatggctatcattggaacacttttacactcattagcagcacctgggataaattgtttgctctctgcacaagaaaattaaaaattcacagcatctgttaaggtcatagaaaaattaaaacactaaataacttgatcaaacatgcatggtttgaagaattaccctcctcggtcgtagattcaaaagacttcttcacatgggttaacaagaaatttcttgggcattattgaagctgcttctgccatctcgagatgtttttcttttctcatagaaaacattttttcttggttattgcttgtgtaccttgttgtagaaacatgtggcatttcactttgataagatttgctttccccttcaatcacaacttccataaagtttttgagctgcttagtaggaattttcttggaatctgaacaaattgcctctgccatatgaaaattcttacccttgttaatagagcttgaaaagaatttgtcttggttgatattttcattcaatgttgtagaaaatttaccttgaaaagattttttatccccttcttttatagcttctgtaaactttataccacctggagtactgttaggagttgaagaaattgctttagccatatggaaatgcttaatacaacttgagatgagtttttctcggtggctagtgttttggataactttattcacttcatctctcacaaactccccgaattttcttttttggaagctgagattttccctcaaatatgaagaactcatatctgtcttttggataacattatcattgttgatagaatttgaaatatctctgttggattcgttgtatacattactcctaaagtgcggagcactaatttccaggtgaagctcccgctttcgagctacttcaattggcttttcaccatacgcagcataatgaacataccctctgttaacaacattactgtatctagattcaacattaggaatttcaaaccgattatttaaatcttcagcggaggtgcatgtgcgtaacttcttcccagaaattatgtcagcataagaccctatatctttagaaaattgcgccaaactaccattatgtttgatgttatttggaatattctgcaatattaagagaaattaatgaatatgcaaacaaatgtaacattgattagaaacaaattaattttgaccttcctcacggaaaaataaaaaattcgaccttacagagatgcttagatttgcacatataaagcacaagaaatacaatcaccactaaaatattgaaaaacaaggaaagatcataatggccaacttatagaattataaagatgatttagagttcaacctttctatattttacccctttcatttatttattttaaagggtgaacaaagactttacctacattatattattgtctgaaaatattttttataaaccattcatagcttgagaaaatatgcatatggaaagccctttcgccccaagttaggttgatattctttggaaattacagctaccaaaagttaaattttttatttttgtagttaatggtgtgacatagactgaatgcacacaattttttttttcaaaggagaaggccttttctaattatttctcctaaatggtgtgtactacatatgaagaaaaggaaatgagaatatttgttcatattcatatccactgtgacttttccttgaaactgtggtaagataattaatcaagttttggactgttttggagaatccatattgattgtcaaaaaatgttaatgttctatgttagagaaagtagggaaagataagttgaattggtcactgttgtatccactttattttggggcttatggctggaaagagataacaagattttcttaagaagaaaccaacaatgtggaaagtctttgggagaaaattatgttaagggtggtcatttagtttcataatcctaagggtttaaaatatattcccttctatgtttctttttttccatttttcttacacttttatttttgtctttactgttcttatttgtatcaccattctgtgttgacgatcgtgaattttcacattcttgtatttttttaaattaatacaagacaactttgtgtgtgtttgtatgtgttttataaaaaggcatgtggaaagataaaactcacctccttaggtgtgatcatatgttccgggctctgatagattgaaggtacaactgactcattcaagttgtttacattttgcactccttcaggtctttcttctttacaacctattcaccagaagaagataaatgaaaactagagttagtttgaaattgtataaaaggtgtaaacatcttttaatgtcaactgtaagcattacatgaatatctgtaataagtaatttcataaccaatagatttgcatgcacttaaacctttacttattaaaaaaaaattaatagctaatgtcttatgcaatcaaagctataacaaccatacatttccataaatttatgattggtttttaacaagcaagataattatattgtttaatgtccatgaagagcattccaccttttgatgttaaactataatttgattcatcacaagagccaaaatttgaaatttccatctcttcttttatttcccttccacctcgtagcctcattctggaaatctcactttcaaagttttcaggattagttttgagagcaacaaataatttttgtgccaaattcttaatagcacgagcctgaaaaccaaaattcaaaatttttatgtgagatataagtatt

SEQ ID NO: 378993 - DNA, 1483 bp, Cannabis indica
cacaaaataacaaagttagaaaaaccctatatgtattaattagtcactaataatcttgttaaagaaatcacattgatttggcatctgggatccacatgatcatctaaagtacaaaaatatgtctaattctctcctcgtaagaggaatatatataaaaagtttaatgcgttgagaaccttttggccaaaagacattttaaattagagacacattcaatctcttcccactaagtaaacacacacacacatataataaatgcttagttaaccatgtccacttactatatactaaattctcttatatataagaacccatatataaatatatgcttttataattatagtatttgatggtgacaaataatggatcgcactccatatgtatatatgatatatatgtatcatcatatacaattgttactcatgatgtctcaacaaacattcttttcgatccccataatgaaatctccactcttataagtcaaaacaatgatgttaaatattttgggaaatgagttggcatctattcatatatcaatttaatttcttaaattaaagaaaataagatatcaaaattaatgttgataatggataataatgatatatgcttttcttctgattttgattttatatggaaaagacgtgactgaacccactgctcaaactaaaaacctcggatgttttttagcatttttcaaaaattaatgacataattaaatgtaaactgattttattttcttgaagtaaaacctttgcgtcgttaatcaacatgacattttttttttattttgaattaactgtttcagttctattaaatgcaccacattctcacatatgtaaaactaaataaaatgcagatcattacagttaatttaaattggattatgtattaattactcttaatattaattataagctaactggttttgaaccttaattagtgagggttcgatctttaagtcacatctatgatcaatatatatatataatgcagccaaagatacaatacgttatatgggtcataaaactacttaataaaatatatatattatatattatcatatatataaaatgaaattaatgtaaactctttatcatttcaaacttccatatactatatatgaagatgaacaaaaccggcaatccatacaaataagccacgtatatataaaatacaaaaatatggttcaaccaattattatttgtttttgttttatcaaattatttatactataataacatcaaagtaaggtatttatatatgtagtgctctattattataaggaattaataaaatgctggaccatgaagcataatatatataaatatatatatatataaatatatatattctattttcttattgttttattaggttaaggtttattgtggtggagttatactgtgaccattatacatttctttaacaaagttctttgttaagaattatggggttctatctcaaaactaattgacaatgagtg

SEQ ID NO: 378994 - DNA, 1395 bp, Cannabis indica
gagagagagagagagtaatcttttaattttctaatttttgtaaaagaaaataaacctatggtttatctaatataattcaataaaagaaaatcagatttaattaacttaatattaatccactaaaggacaaaagccaccataaggcaaaagaccattttgcccttgcttcatcaaaaagtaaccttgccatataagggcattttggtcaaatctaaaaccacaaataatcctgacattctcaatgtctatttaaattacaccgctatttctaaaatactaaaccacaagaaaaaatgattctatcggccaaatgtcgcgttccactgttactgggcataaaatataaaaaacataaaatttcacatataacataaatagcacacctagaattcaaatatatttctaaaatcataaaaaaattaaataaatggtccatttatgaaattaagctctaatcatctgctaattcttatattaaggtttagcgatcattacagttcgggtgagggccatgattactcgaacgtaatctacaagtggtctcacttctttcttcagttctcaatgtgctgctgatcgaaaggaatagttttcttggctgtggctggtttcttagtgagagggaaggaatagttttagagagagtgtttcttgccaatcgggtaagtagaggccaacatttccttttgaaaaacagtgcaataccgatcataaccagaaattggtaatgcaacccctttgatctcaggaccataagcaagttccggttcaaaaccattgtccacaagttctagaaaagttgaacatttctaatatgggtgacccagacgaccacattccatccaccattcaggcagtcgctcatatcgaaattcaacccaaaatttatctgtaatttgttgcaatcgaatattacgaccccttctcaaaggcttagtaatatcaagttttactctaatgcgcaagaaagggccccattcttcatttaaagagcaagtatatacgtctaagaattcaccaacgatatctcccaaggcttttgccaatcctcttgttttactaaggaaaggtaacctataaacttgtacccaaaatggtgagaatttaagatcagtaggagatacactttgaagagctgttggcttatagagaacaatgtgataattttggaagtgccatagctcttgagtgaggactctctccttgtctcattcgcagccaaatgagagcatgaatagatcaggttgttttttagagattcagacaggatagcgcccattccaatgtactttcatctgcttttgaagtgtagttaagtacaccagttttctggtaaggacagaagcaaataggggtggtcgttggtggagtgtgtgttgggttttatgccttaaa

SEQ ID NO: 378995 - DNA, 4420 bp, Cannabis indica
agaatttttgagaccaagatatatcattgaacataagaagaattggtgttaatatgtgttgaatgccttccaacaagaagttgaattaggggatcttctacgtcatcaacaccttcatttttgtctctacgaactgtaatattttcactgcttgtgacaaccacaacctcctccttgcgagttaacagctcgtttgctaccacaatatccattttgtacttttcaagagctgcagttgccttcttcaaaagaatctttgaatctgtctctagctgttgccatcacattttcttttagtccaaccaaaattaatccattttaatcattgaattctatgacaatactaataaattttgaataataagtttatgcatttaaggtagtgaccttgaatgaaatgagaaaagcctttggagcccactcttgcctaagcactggtaacatctttggcacttgagcaagttgcatgttcaaagggccagatgctgattgaatcttatgttctgcctgcaaagtgatgtaaaaagaaaaaaaaaaaaaaaagacaggaaaatgttaaggagtaaaagaattagtccatgattctatcatcactacaacgagcgaccaaatttctaattgctcctctataaatacaacatattacatagacacgacaattccgttgttgaaaagcttattattattattattattatggtaaataacaccaaccatgctttgccaaggaacatagaagtcagaaacggcagctgcaagataaaacattgcatttggtccgagattactggtagacaaagcaatcattcgtaacatctgaccaatgagaaagaggatgtaataaatacacatagaatactggtgtaatggaagagtgtatgagttttcagacaaaaaactagcacgaacaattgaaaaaaacccaactcaatctaacctgaagatactcaaatatagttgtgaaaggaagtttcaacaagaatccttttttcacagcctgcaatataaccatattcctaccacatgatgagttcaaggttaaattgagcaatattcaaccgttacataattccctagagagccaaaagtgaaatggagcaaaaataaataaaacagaaaatgaattagagacaaaaaaaaaataaagagaaagaagaagctatccatacagaatgatgctcagcaatggccctttctactgcttcagaatatgaatcttgtactgaaggtgaaatgaactttagtcattctcagtgtcaaaagactcctaagagtaaaattttataataagaaaaatgacacacatttctttcaaaaatacaagcaataatttgctgggccatcacaatctactaacctttaatgtttgatccatcaattgactcgaaacattctagcaagggatcatccggaagagaccgacaaaagggttggaaggttcccctgcaaaaaagtaaggcatgatgttcaagatatgacttgtaattgttataatacgtattgtgaaccttttccagtgattaaattgaaaatgaacaaacaaaaaattatgctagaaacaggaaatcacctccgatgtagaaagataaccgcatatccagccttcacaaaatacctgaatattacaagtgagattaagaactatttagaagtaataaagacggcatagataatttgaggatggtatacaaatgtactctgtggatgttgctcctctgtggcctgagctgaaattatcaatgtaccgaacacatcgttgctctaggggaacagtggttccaccagatgttacacacacaaccctcctagctcctccatttcctgtatttatcaatcgaaatttgaaatgatcagcacaaaggaaatgggacaaaagcaacccaaagcaaccctatagattgcatacaagtatctatgtgatagaaccaaaaagtgaacttgccagatgccatctcatttattttgataaaattctctagcttttctctgatatcagcactgttccttaaaggaggagccaagttgaaaaaagattcgatttccccatttccgttggtttgagtagcttcagttgtgctttctaaatccatctgaaattgccaaacccatgatgagatttcatacgcaaaacaattcttgaaaccaacatgcaaaggtaatacatccatccaatattttgtaacacctagggtcctaggaaagcttaccctacataactctgatcacagataaaatggaaattcaaaagctacagaattcatcaattgtatatagacagaaaacatgagaagatggctcaaagtctcctcccttcgttacaaattaaaggtacaacatttcacgacatggcaatactaaataagtcattaatgggttgcagatgatgttaggacaagacacactacgaattaaaacaaagtaacacacatatagtattgaacaaaacagtaacaatataagactgctaaataagcctagaatatcgaggaggcagatcctttaaaagaaaggctagagacaatctcctaacaccgtaacaaatcaaatccaggcaagtagagaatacatcagttgcccccctccagtgcattgcactaaattacactcaataagtaactcaaatgaaacacgaaagcacaagagcaggtctttgagacatactgctaaccactgaaggcaccaactaaagtgtaaacaagcacatactctaattattttttggtttctaatgttaaatcattcacttaaaaattgcaataagttgacgcattcaattatgtaatgttgagccaatccaaagacacaacactgattctagacaattagaccccccataaaaattaaaagaagaagaagactaatgtcaaaatcgaaaagttaatggaaacgttggtggcttattagacctttagttgaggttgttgttaaggttttcttttattttattttaaacggcttgataagcctattagtgttgattttgctcgacgagcctatattttcatgtaatggattttatctgatttgtctattaatgaatatttctattttctctccaaaaaaaaggatggaaataaacaaaatcaaaactcagccaaaaacaaaaatcaggattgaacataaagaaaaagaaatagcagattgagaatttgaaaaccaaatcatatttgttagacatccttaagaagttaatagaatttctagatctccacccctaccaaaaatcaaagaattaaatttaacattattagatacaaattaaaacaaatatgtaaagtttataacactggcaaaaccaaaaccaaaaatttgctctgacaaaaaacacataagccactacagcacacaataagcaccaatgaaaacaaaacaacgatgaataatcgatgcatgatagtgaaaccatatttccatatctcaatcgtaattaccttacttcaattttaagaaataaaaagaactaattttgaatagcaatagtcatatttaagacattgtaaaaccaatttaatacaagctaaggcgagaaatgaggtaggaagaagtgaaatgtatattgagaaaccacaaaccaggtcatttcaaactcaaaatgagtgaggtctttttgtgtgtatggtagttttgagtaactgttaatactttttctactcaaaaatatgagaaatgaaagcttgatatacatacatatatttaacatagatttaaggagtaactaaggaaaaagacacaataatctaacacaattcaggttttataactagagctatctatttcagacgcattgaagtttcaagaggtggaatcataaatttaaattgattgtgagatcaatcaatagaagaacaatgagttaaagtttcatatatcatgataaataaaataatgatgtaatttgacataataataaagagattatcaatggtccctcaaagtgagaaaccatgaaagaacatagatatttaccggggcagaggagcggcggttggaggagtggtctgaggacaagaagaagaagaagaagaagagaggggtttcagatttgaggcagtggatttaatttaatttaatttaatttaatttgcgaagtagatggatttttgtggcgttatttatagagtttgttttcaaataagcaaataaaggccataggctgccttttaagacttaataaaatgtaattattatatcctcacttatatttggtgtatctctatctatctatttattgtttggcaccaaggagttaggttaggtcggtaggaaggatatggatggagtgagagttttggacacttatatatagaactagcaaaaatttacgtgcgaggcacgtatactaaattttatgctaattttttttctaggttattaaaaagcaatacaattaaaattttttaaaaaatattattagttatta

SEQ ID NO: 378996 - DNA, 2934 bp, Cannabis indica
ttttaaaatgtcggtagtagcgatggaataccagtttttgagacattttgaaaaaagattaggtatattaattattatgatatattggagtatttttttccatctacttaaccaccatcttgtttgttcctagtagacaatgatgaaggatcaatatgcaaattatgtggtccagaagactcttgaaatttgtacagacagtcaacggattgtattgctgaatggcataagatctcatgcacatgcattgaagaagtacacttatggaaaacacattgttgctcgtttcgaacaggttttcggagatggtaaatcctagtttattctcctaccataacacctgttgaaatttgctagttgtgataaacatgttttgtcttctggttaagagcatgctccttttaatccaagataaactttctactgtctgattttctgactgcagaaaatcaaacttagcgacataaaagattatgccaaaccaacaagggaatcatccaaggcagcccgaaatttgcgcatgtgacatgggaaagtataaactaatgatttccttcttgtaaatggtaattggaattttattaggaggcctgttccatggaggttgcctggctttcatgcttgaaagtttaccttgttcgtcggacaaatgaacacctccaagtgtttgaagttcaatcactgggagtaattagtacataacttgcatatttctaggattattggtttgaaataatgacttgggaatatatttggaaggaaacccttccctggtcttgtaaatttaattactagattccgttccactctctaaattttagtgcttgctgccggtgtcttccaatttagaaactgggaaaatcaatttgtaattacgcatcattctatttgtgtgcctcgtaaagtaaaacacccaaaatcaactaaacttgtcgaaactaccaaaaggaaaattatatccttaaaatatggtgtagtaaaatgacactaaaaaaaaaaggtacaaaatatgactttcaaaatcgaaccttagttttcggtacaacattgctccttcaaaattcattctcttcccttttcttctcagccttttcatttgtatgtgcctgtcaatgttaacatatattaaaaggttatatgcctaatcgaggtccttcacttgattgtcatataactttgtttttgctagcctgccatcgatatcatattcaccaccctaatgttagcaacaaatgttaaatccaaagagactatgacaatgtctatatcacatatttaaatatgtgtatatatttgatcatatcttgaatattcatcgaggaaaatgagaatttatctttcaggtaagtcttatttagattggttcacattttttttaaaaaacaaatatatggtcttatttaaacttcttaagtaaaactaatgagagaaatctgaaaaaaaaaaaagagtaccaagataataatattaatcaataagaataggcttgtaagagctaatacaacttaagtagccaggtcatcaaatataatgatcattataaaaaaagttagttttccacactattgacaatcctaagacaataagagaagaaaaaaacattaagatgattacaataagctaaagtatctctaataatacaaccaaaatgtaaatgatcaatagattgattcggaaaggcattgacgacattgatacaatcaattgattcggaaaggcattgacgacattgatacaatcaaactccacaaacacatgagaatagccaagacgaacacaaccacaaaaggccaaatggccgtagccaaaaccaaaacaggagatgcccgcaaaatcactctgaatcttgctctagccttcatactatccacattgtcatcacaattcattttagtaacctcagtcgggggcttctcccacctgtgtataacagtcagaacgaggctagcatttggtgtgtggtcagacaagctattggtcttatagtaacaatcaaggaattcaaagctctactcaacaataaatatatcatggattagtttcttctcattaacaaggatattacgtctataccaaattctccaaaagcaaacaattaacttctcaagactagaaatgggggacacattaaagagagacaacaaatactcgtaaaaatccaaacctgagataaatggaacgaaaactaggccaaccaaagaatcttgaatctacctcaacgcatcacaagaccaaagagcatggtgaattgtctcggcgcctttagcaaaaagaggacaaagggtgttcacctgaatacctctatttgctaaattggagaaagtaggaagccaattatggtctttttttcaccgaaaatatttcactttaacaggcaacatcaattctagagcttggaccacactgagaaaccccaaaagagcctacgaaccgtataacaaccaaactgctcatggtgccaaataagcctatcctttgaagggcaatgagttctagaagtaggcaaaatagaatcagcctcctcctttatgaaggaattcagaataaaatcctccttcctgttaccatcaggatcaatcaagaaattaacagtagtgccaaaggaagaaaacacacagatgatgatctattcaaagcaaatctctacctcacaaaatagatctacaaatcaaagaagatttctaagatttggcagcctagagaggtatgagggtaataaatttctttcaagaacttttgttacgaaaattgcaaaacaatacgcaagtgcacgcaatcaagtagtaaactcacgcaagtgaggtcgaaccacaggtaattggattaattaccactaaattatacttatgattctatttggcaaatcaataattttcaagatttaaacaaaataaaagtaattcaagaaacttaaagaaacaagtgaatattaat

SEQ ID NO: 378997 - DNA, 2895 bp, Cannabis indica
  modified_base (5)..(5): a, c, t, g, unknown or other
atttnttgtcgttttttcttttttgatgaggggtatggtaaaactaataagccggctcgtggtgaaagctggtttcagttagtggtttggttggtatggtggtggttgtttgttacttttgttttttttagtttaaaaaattttgatgtaatttttctactaatataaataatatcgttaattactaaattaaactaaaacaatggatggacttatgacttgtttatgatattgtaagagccctatattgagattttcacaccattttattttattgtggagttttcactcaaatttgatttaagaaagccaattatgtattatatttgtatgcattaaatttcaattatacgttgaattttaaatttacactaatttagctttcttttaattttttcaatttattttaaaagagtgttattgagcagttaggcacctgtagtgtttatagtacattctaaaatgatgtttatgattggttatcatatttttaaaataatatattaattatattaacttaaacttttttttttgaacaatatttaacttaatacttaattacacaccaataacaacaatatgacaacaaagaatataatccttctaacatttttcttatataaaaataattataaattaattattgataatatattaattattgttggctatttataatatcattaagtggcttagatgaagacatgtgatgcaatgatgatttggaaagtggcccactagctagctaggctgtttactttcttttctgggtgatatttttcttaagctcaaattataatttggtagactttgtcttatttaagcccccacacattatatttattaggtaagatttgtctttcgattgtggtgctcctatacatgggattggatcaaatgccttgttctttgacaaaaagttcgatacatatctttatttctcatatatcttgagacatttttcgcaaagtaataatagattgagctttgttattgttggcacatgatgagtttgtgtagtacatattagtcaagaaaaaaaaaaattaaaaaaaaaaaagtaataaacctctcttggtacaaaatttatgactaattggcatggatgaaaataatggagaaggttggtacttcggtaaaagagaaaagtagctagaaaaacaagcaaacaaaaaagaaaagatagttaggtggttcatcctttttcttttcgatttggggagcccaaagcttttagaatttactagcatattctagagtcttatttagtaatgttaaattttgcacgaccacaatagagtggattcgattaaacaatatgtttttatattacattgtagttgtagatacatgtgtcatgtgtgtgtgatcgtattaaatatacgtctgtgtatataatagattatatagaatgtgatatatgatcatgcatgaatggtcctttggttttagaattcaatagtaggaaaggaagaggggcttgggaggggtccctagctagataattagtgggacctagtattaatgatgatcaaagtagtaaataataattaaagaaatgctaattaatatcattattggtgtaataattattagattctacataatttaatgtaataattttttaataatatgattaactaaatacgtctaaaaagtatcaaagtgaactaatcaaaaccaataaaatcagaatttcaaagtaggacaatagcactagacaccatcaatgtttaactcatgtttatatatatagtactaatagggggccattgcttatgggttaattgatagtagttgctacttctatttcaaagtaaataaagaaattgcattatactgttcgtgcatgctcaagttacgtaaatatgtacaaaaatatatctatctatacgcatattatatatatgcagaattagcaatgtataaccttacttttttattcctcttaaagccagcataatccaaagtcaaaaggctgcattaggcatgccttttcatagcaaagaaaggctagttaattcacaaccttattccattatatatagcataccattggatcagccattattagacacattatatatttttatataacatatatgcttatttaatttatatttttcattttacacattttggtagttgaatactatccatataaaattgattgtacacacacattatcttagtataaagataacacatgaaagggaaatcactcaaatgaaaataataagtaacatatatgcagggccggtcttaggcatagacgaactaagcttgtgcctaaggcctatacttttcgagggcctaaaataataaataaaagttttattagatttttatttaactgtattgaaagaataaatatttatagtttagttagttgaggtggatcatatattatcaaaggtccctatatatatatttataaaaatcacaatcaaaggactacgtgcgatcctttgaagagattgaaccccttgagaaaattttatggtggctttggctgctacaacttgtcaacttggtctctcgtcaaaattttggtggagttttcaaagtttgaaagtaaaaattggggttaatatatatagactgagtaatcgagtcattaactaggcatttgggtgccgtgataacacgttaactttggccctaggaattagtatgtacaaatatgtatatatattattaattaaatctctgacaactaagttctatattaatatatcatattatatctatatgaatttaagggatatgattttgtcccgttattgtactttcacggtattgcaatccgtgatgtacggcagccgtcagatgaagaaattatttgatctgacgcgtgagattgagtctagggggtaaattagggttaaaaaaggt

SEQ ID NO: 378998 - DNA, 1620 bp, Cannabis indica
tttttttacaaaaaattaaataatttatagtgtcgaatataaagttcaaacattcaactacatgtgtagaaaaataagcaagaacatctacaattgaatatttaaactctatttttgactcataaatcattcaaaaattgatgagagacctactgtaactataatgtagaccgacatataaaaaaattgaattataatttttgaaaggcttgaaatattgatgtctctacaattacggataaaaataatatttctaatataatctagtcctatatattagtgtctatgttaaacaaaaattataatcaatataactaattttatttaattttgcaagaaataagttttagtgaaaaattgtggccccataacttaacacttaagtgatgtttgattgggaggaataaaaatatatgagtttaccaagattttcaaaaatgagattaagcaagagcttaagaaattaaatgagcgattaaataaatgagatggagatctttacgtgattcagacgttaaagttccctagtccacgagttagtgtattggccttcgcaagctttgaatgtattacaagtaaagttttatagcttgaagaaccctagtccttgctatagtattttccctctctaggtttttctggtgaagaagaaagcttaaagaggtttttctcagaagtagttttctcttccctttacctgaaggataaaaggggtttatataggcttagatttgagtttgagcatacccgtgacccgctaggatttctgtgcaaaataggctcactattggggtaaatacaccaaacacatgaccttaaggcccacggccaatgctgccttttgggaaaaggcgtccgtacagtgggggacccatgtgatctggacaagtgtcacgcatgggtgcaattacagtagataagattgccagagggatgccatttggacaaaaggatcatgcttctccttttagtacgtgcactaccatgtcctgacagaggggacaccatctgattttgtaggcccaactgtcagagagtagtcacatcaccgaatgaaggcttccagatgcacctcttggacttcttcatccaaatacgcctccttaatcttctaaagggtgttgttcgctccatctataggaaggtcaaaagggcttgcaagagcaggaggatcttatttccaagggcgaggctcttagaaatatgaagggctggtgtttgcctctagtttggactgggccttcgcatgctggaaggctcaggccattgatgacgtggattggttacatacttaacacaccacgtgccactcatccaaaaatgtggataatgtttatccccaagcttccaaaactttggagtggcgaaatgtaacaccctaactaatataggcgtgttaacgtgattttaaacgtactgtgcagctcgttgctaatcaacgtggttattgaaaatcgtgaataattaaaatttatttatttacttaaaaacttgaagtattacatatataacatttcgggatcccgtttacaaaatactttacaaaagtttgctacacatataatcaaaagtttgtcgcccagcgactatacagtaaaagcctcgatgtcccaaagatcg

SEQ ID NO: 378999 - DNA, 1299 bp, Cannabis indica
tgttctttcacaaaaggggtccaaaatatgtatgtggttgataatagtggagtattgtgctggggcacgtagtttccccactcgactagctacgccggcctttgaaaagccattgtgtctattgtggctcggcagattgtgtccagggccacagcctggtctgcccttgaaaatgtcataggcttgtgtagtcattatcagcctcattaattacttaagacacacacatatatatatatagactagttagaattgacatatcttggtttgaatatcatcaaataatccaacataaggaaaaaatgtgactcgtgatgtaaacgtaatgtgagactcttgtcactctttgaaattcatggcatttgtttttgtgctgattaacaatagtaaaatttttttaaactatttagagattattatttgactggatgaaagtagattccttgttcatatataatatatatcagtatgtgtacagtgtggaccaaactcctatggttgaagttgagcaataactagtagtgtcctaaaaattgaaagctactatttatttgtggctccctcatttttagcaatgtgtccttttcttatagctactttgattgagcctaaaattagctttactgtacacagtaacaactgctattctgtcttaattaatgaataagatatataaacagtaaaaagtttgaattccatgcaactatttttatgaaagtaaaaaaaaaagtcctttctaagcaacctatatagttttcctaataggggttcagcagatttcatcatatgatgaggaaagaaattcgatatatacatagtactgattattgattatataaatataagagtagacctagcaacagtttattatttctaaattaatcctttttcagtgagatgtatatatttgtcgtaatcttgtatgatgtgaaaggaagctggctttggcttatttaagtataagcatgcgtatagcaaaagtaacaaataaacatcaaattttttaaaaaaaataaaaaaatttgctatttttaagtaaaattgagagaatcttttaaatttttaaacacatacatcacaatactactctaaattgcttcttcttttcattcttttttttaaaaaaaaaaagaaaaaaattacttcatcatttcaaaccttctttaaaatatatttttcattttctacattatatatagtaatattttattactctaaatatacagtagaacctttatccaagaatgcacttgggaccaagtaaattatattctaattgaaaggttataactaaataga

SEQ ID NO: 379000 - DNA, 3619 bp, Cannabis indica
gcacaacagagcaaatacgaaggaaaaaaaaagtgactatgcatccatgtttggtaatgtaatgaccaaatttgacaaatctattgctgaacacagtgtctagtaaaagtagactttgtgaaaacttttattagagaactaacctttcaaaaaataatgtgagttgagctaagggttgctcctgcaacattaatattacactaagcgaccctaaaacgaccctcagggtaggctacctaaatttacaataagcgaccacgagggtaccttaatgtaaagtggttattttgcaaatttcacatgttcatgttggtagtgtgtaaaattctcctatgaatacatcctaacatacttataacgatacacagatatttgcgattcagattcgtactgaaactattctgtcagtggctgaaaattatccttaattcaaacaactcaacaactctacaatgtatccgtactatgtcagtaatttacaatataacaggtacaaatataatgaaactaagcagaacaataatcacttaatataaaccaataaaagctcaacaaaacacattaccaaaagcgtcaaactaaaattgcactgattaacgagaaaaataaaacgaaacaataaacccataaagtgagtttatacaaagcccatcaccaatcgcagcaattataaggaaagagaaagcgcttactgtcaagatagctggcaagagaggtagaaagatggatatcttccgggcctgcccaagacattggtgtcaacgagttcaaactttttcggtaccgaaaaaacaaccgaaaatttcaacagagacgaaaccaatggcattggcagctcagatttcaatctgaagcctcacaccaaaaccctttagtcaaattccaataatcccaatcgatgtccactgccacaaaaccccactaaacaagataatacaaacttgaattaaccttttacaaaaagccctatccttttcagatccaaaaaccctgatgagtcacccaatcaagaactcgaggcttttctcttccggtcgacggaattaagaggagttgagaaaaaaaaagcactcagatccaatccagccgcaccggaagagattcaagcagaaattccaactagaaaatcagaaagaaaataaaattagggtttacaaattgagatggtgagaaaaattaaaaggaggcatagaaagattgttttggggttgttacttgtattgtaggtggctgcttcattgcccgatggtgttttttcctcttccaattattaatatatttcatcgtatttaattctcatataaataaatggttccttattatttgtttttattattatttattatagagagaaaaaccggtaaataaaataaataaaaaaaaagaagacagaatgaaataaaaaaataaaaaaaaaaaaaaaaggagagagattcatacattcaacttaaaaaaaacccctatcttcaaaaaagaaaaaaagaattaaaaaattacctttatgtcattttactaaacttgcttgaaaaagaagagaaatactactactgtagggctgtccaaaaaaattccaaacagttcaatctgaataaatcgttcaaatcatacggaataaattagcgaaaatcgcaacaataaagcaatataaatttaaaccacctaataaatatagtgaatttgaatagattaaaagttattttaaattacttaattaacttgaataaatcgatttatatagattttaggatatgtatataatatattacataaattacattttattagttaaattattttgtgtttaaaatctagactgtatagtgttcaatttaaaatttaaattttattgttaaaagtttttattgtatttaaatagtaaagtgaatatttaaaatttacatcatattattattattaatttttaaatttgaaatataaaaagtaatttgtggtataaatacttaagtttaacacataattataaataaatacttaagtttaatttctagcggtaataatacttaagttataatctgtaacttctgtaggtaacaactataattgaacgtttccaaaagtttaattagttacaaaaatttgtcatccatataactgcagtacatatttcattacgaataaatatttaagatattcaaactcatctaatatgcatattccatctcatctaactgcagtatgatatatatcgcaaaatctattttactacggatgaatatttaagatattcaaactctcctaattattaataattaataacaaacgttaatgaatatatacctctagctaaatgccgatcaacactaaagaaatcagatctttacaaattggcctcacaacttacaatgtaaagaaatactacaaaaataaaaatttaattatttaactacatactaattgtataatttaagagtaactagttaatttattcctaactagtgaagttagaatttattactaatagtaactagttagtaaaattagtgtaactagttactaataaaatcacgtgaatgagaatgaaaattactaactagttagtagttgtaactaattatttactaaaaaaataaaaacacataaatagtaatgaacatggaaaatagaaaaaaaaaagtaaattaaatttaatatgcatataaaaaaatagataaagagttaatatttttttttctcatcttacatttacatctattttgaaaaaaaaaaattacatatagatttataataaattatatctcactaacatattttttaaaacctaatttttaaaatttattttattactctcctatctcattcttaatctctctttttatctttcaatcacaatatttaatatattaatattaaagaaaaataataaatttataacaaagtgtaacacaaaaacaatcactaatcaaaaaattattccaataaaaaaataataacaaaattcttaaaaattagattttttacttattgccgaaattcgacaccaatgccgacaaaaaatctagccaccaaccccaacccccaaaaaactcacaatcttaacaagaaaaatcctaaaaaaaattataacaccaaaaacaatgtaatgtacctcaataaaactactaaaaatcaaatttataccttaataaatgttaaggttcaacgttttaatgtctaaatttcggtcgtcagagctacaaccaccacagtcgcaccaacacacttattctgcgcttacaagactaaatattattattctaatatcagtaatatcttttttggtattgaaaatgaacaaatttgcaaaaaaaaaaaatgaaagaaaatggtggagaaatggggttataactaagtattttgataggagatgaacgttgaaggagacgaaatgattcatttaagtcttactgaaggattttttaaggccctatggtcaacgccacaaggtcacacgtacacgtgtcccatatggctacaattattacataataactaacggcataaggccttaaaaactattattagcgagaccaaaaggctttagctaacctttttatattattcaactaagaacatctctaatatggattgctaaaaaaaagttgtgtattgctatatttta

SEQ ID NO: 379001 - DNA, 4116 bp, Cannabis indica
gcttcagtgtctggtaacttcttcttgccaccctttggatcttttgcttaggtgatggcttctttgaatttgataaagtcatctgctctatttaagaattcgttcataatctatactaccttgagacgaaagtcgaaccagaaaagactcatctccttgagttaagctgcaagtgccataacctttgcatccttgttaagactcttgagctttgcaattttgtttttcttatcctttttttagttttctccttgagttttgctttgctatattatttatgcagatacctaagttgctaatttagtttcaaaatcactttctcgaccatgtcacatataaggacagcaactgtttctaaacatgaatacaaacaccgcataaaaatgaaataaatcacgtgtgatcgtataaataaaatagtcgtatctcatataattgttgatctttttctgcttacaagattttccctgataataatagttataaaaataattcaatatgaagttaactactttccatttcatgcataaactacacaaatatcgttcgtatttcatccgagaatttaaacaacctgaaatattttttaataacatttatactatctactaaagaagaaaaccttttcattatccaataagatatcaagtctactacaaaaactagtcttctttctccacataatatgaactttcatccttaaatatttttaagaaaatactggtacatcgtccatgctgagcaaggaaccatcagccccgtaaagggcctatccactgctccagtatgtttcaatcagagttcagagatcaaagatcgatgcatgtttaaaccaaaatttattaccattaaaatcaatgtagaggaaggccactagccgaaaattcaacctcctgaaatttagagagaagacaatgttagtagatgcagcgttcaaacaaatccacccctttccttgttaaggcgaattgatgaaaccaactagttaattcgttccaaattggattcttacaccttatctcacctacaataaacacaagcacagtgctaggcaacattgtattaatggaattatatgttaagaaaagcagcactcatcaatggcctaaatgcagttaaagagcaaacaacaaataaaaagaccaaactttaaactagcctgtgttcattttcttatttaggcaaaccattctgtaatattcataactccaacaacacattaaacaaatacccaaaaacagttgatcattagtacaagaagaattgtacctgaggagggggtaaggatgaaacccagtctgatgcatgtgtgggaagtaaccccaaagtgttaagctgtcaagatgaaaaactttcaagtgtgaatcactgaaggagcatgggtgaattcaacatgtactggattgctcatgattagtaaaaaaaaatgaggtccaaaaaacatgggagagtgcaacaatcaccttccaaacacctagagctagacctcccaaatttagggcaatgaacagcaactttggagcaagaagatcaaccttgctgtctttgtaaggctcaaaaactgtgaaatcaacacaaaaagtaacaagaatcaccttggtgagaacataaaagtgccatctaaacagaagttcaagtgttacaaatttcaaaattataaaccataaaatgtgatatatccaacaaacaagtaattgtgaatggaaatttatatctaaggagctacatcatccaaatgaatttatttgtgttttgaaaatgtagattaccctccaatttcgtatatacttaccttctaattaatatttctagttgtgttatttcacattaaaacatacagaaacggaaaacaaacacaaaaaaaataatttctgcatatccttaccctttcccacaccctgcaaggcactaatgggctgccaaagagcagagaaagtaattccaatgctaaataaatgcactgtacttccagccatccacatcatgaatcccatcatcatcaaatttttaaagggtgcctgtgccacttcccaagctttctgttgaaacaaaaaattatatcacgagttagattaacacgttcttgatccagttcatcaaaacccttcaatatcaaaaggaaaattcattagaaaactccacaacaacagaaaaatcaaacgcgaagttggctgatcaaatgcagcccaacaactcaatttactttctcgcttctacacaaataaaatcttcccaatgtcaattattaatatttatgcaaaaactaagtttgcagtaaactaagcaaatactcaatcaaacgaaacagttgcttagattagatctgaatctcagcagaaagctagagtaaaattgaaaaatgtccaaaaaaaaaatctgagggtaatctttacttcttcttccacataccagataccacactataaactaaccacacacacaaaataataataataataacaacaataaataaaagttaaataagaaatcagacctgggatttccaagaagcttcagcatccttcttctggcgactgacaacggaatcatcctaaacaaaacccaaaagtaagaatctcaagaaaagccacaaaatctcatctgaaagatcaaaccccataaaacattaaataaaaaacctgatcgagggcggcgcgagagaaaccaggaggatcaggaacatcacgggaagaaggggaactagagtagtctgagaagtcaaccgcccatctacgacctccacccatcactccctttcccttctccatctctctaaaaatttcgatattttattagatttccgcagcctcctccttcagtattcacttcttccgcttggattaccttctctgtttatctctataaatttaaataccatacattcaataaaacaataatactctctctttacttgaatttttctttatttgaaaaaaacaatccttaaaatccagataagaagaacagtatttctatagtaggtaacagaatcccaacacctctacatctaggcaaagattagtagtatttaacaacaccataaaccctcatataaggcccccaagattctctaagagaatactgctccatttcaagaaacttacccaacacagtaacaaccaagttgactaactgatcaggagatctcttaagaaaatggatgctatacacttaaacccagaggagcatgaattatggctcaggcataattacaaaactagaacttggaatttccatgagaatgagattttgagcaaagtgccacggttgcagaaagtaatatcagtaataacatctgcttaccatggttaaccttgttcagcatcagaaaatcgacccttccagaaattaggcatagtttttttgaaggctaacttattaaaaggggcaatttgttaggactttaagaaagaggaggtaatgttaagatcctggtatgaattcatcagagtttcgataaagagtataaatctcattctcagcagaagtaaaattgagtgacaaaggaaaagagttaaccagatcatcaagagtaatagccacctcagaacagaaaaaaggaagatacgattgaaatcagagacttttaaataaaagtcacatcgacagattacaaaaataaaaaagaagaaaaataaaagagtaatcgattgcgaaggcaaaaaattagaataagtggtggtttcagttcaatcaaattaataaatctcagatcaaaaatatcatcgtcattatcattgacaaacaaccaagaaatccagctaaggagagagagagtctcaccaccgagtgacagtgaaggtagcagtgactgcgtccgcgtggcctgatccggttagcgccggtgagattgggagttagagagaaggaacaaggagagagaactaaatagaaaacgagagaggaaattaggggttacatataaatatataaatcagttttcctgttaaaaaaaaataaaaaaaaaatctcgggcttttatacaaaccaccaaaaaatgtaaaaaaataaataaataaataaatcagaaagttgtctgtttcgctgtataacttaaaaactgttttctgttttttaaaattaaaaacagtttttaaaaactaatagaagttgttt

SEQ ID NO: 379002 - DNA, 1924 bp, Cannabis indica
cacatgcattgcatacactagtaagttttcttttctttagaacagctttagatgaacttgtttagtaactctatcctaatctcagtttatatatattattatatatataatatattatttacccaaaaaaaaataaaaagtctaaatctttatcatatccgtgacccctttcattttccattagtatgaaatggaatttagattcattgcttggcaaaagaccaattagactatgacaatcaaatcttaaataattgaaagttgtgttagtatgtgtgtatataacttccaacattaatcctctttaaaatgaaaactatatttagaatcaacttttgtgtacaaagtacaattaaaaaaggatgagtaatgcttaaaaaataaagaaaaagaagaagaagaagaaaaaagatgatgagaaatattagacatacacttttaaattgtacatacttcttccacaaatatattttaagtggggattatatctctttttattataagaattaaattagtgacatattatcaaatgtaaaagaaaagaagtactcaaaaagtgtctgaattattactctgaaattactcttaaagtgtatttgcagtgaaaatttttgtgtgaaaacaataggggtaaaatagcataaacttttaaatacataaatttcaaacgcgtattatatttacacgaaaattctatagttagcgcaccatattttgtgttctattttttacactttgaaaaaaagaaatgttaagaggtactttatgcatattgttattagtgcaaattaatatcaggtctcacacaatttaatttaataaataatataagaaattgttaataaatcgtaactcgctacatcggtataatattagacaccatataatatttaatagcaatgctctttgaaaaattataactcaaatacttttatatgaattgacattgtaccttatagttatagtatttattccaataatttttagaaaattagaataatttatgatgtaaaaaatatagtttaaatattggtatcttaaaatttattcaaaataataaaaataaaaaactagtgaaataattactgtaactaccaatttagatattcatatgaaaaaaaaaaataggttataatttttttcaaatacagaagacatatatgtctctttcaataaggacaaaagtgacactcctacaatagttgctcccacctgaaagaattaggagagaggttttcataacaagggcacattttgttgcttttggtagagatgtccttattttgaacatttaaagaaattaataatcaatttttcttatataaatgtgtacattgtagatatgcaagacattctactaaattttttaaaaatttagaactatttattgtaatgaaaacatagttcaaacatagtgcaattgactattttaaactattttttagtatcataaattatttaaaattttctaaaaatatatattatattttttttatagatttaaccatactaaataacattttttaaattaccaaaatcttatttattataactataatattcatcatccaaaaaattaataataatttaaaaaatatcaaaaatatgaatatctttaataaaagtgacacttctactataaataagtaaataaataaaaaaatctacattttagtttactttgtcagtgtcaccacttacaagagactagcttagatggttaagtgtgttacttataaagtgagagaagacaccaatacaattatttttttttaattatttattttttttttttttttttttttttgtctaaatacgaatacaataatttactaagtgcgaaaacgttcctttcaataggaacaaaaataacaacagtaaaataaatagtctttttaaattagaaaatgtaaatttgactatg

SEQ ID NO: 379003 - DNA, 3552 bp, Cannabis indica
tttttttttttttcatttttgttcaatcgaacgttgattaaatactcgtctttttcaaatttttcctttaattatatctaaactatttaaattccaattttaatttaataattatcaaataaaatataatttaaatatattcattaatttaaacaacaaagtgtcataattaataaatataaatttaaattacaatatttaagaaaataaatatttatataaccacatttaatataatatatatttatatatatatattttatatattctttctgtttaaataaataaaacagctaaattcataattaacattgcaatatcatatcacaattatttgataaatttatcaaactaactggcctatttgccaatcatctttagagtctggcattgcgcagctgctgcttcagaaggggtcttacgtattcctggtagccatcaggcacaactgattcattcagaggatccttccatgcctcatcatacaggttctgatacacgttaccgtcgtagcggccaagcaccgagctaagatagtggtcggtgtaattgaatgcatcaacaagggcaaccgcattggggcggacctggtggatgatgatccaggtaactcgtaattttagtattaaagatgagcaaagtggtcaaagtactaaaaaaattcaggaggaaataaaggatcatgatgaaagtgagatatatggtacaaaccttggtatataaagaacgaagttgttcatttgcgagcgaggcttgcttgggtgtaatgcagccagtggcaacaaaatcgccgagatgtttgtggataagggacagagcataaatgtaacaaagactctgcatctgttccttcactccttttccaggaatgtcttgttgtaatttctcaatgaacctgatgtaagagaataagagatgagaccaacaaataagtaatcaacaccggctggtagggtaggcaactttgctgcaataaccttttcttttacagaaaactaaaagaatttttaaagtctaggctaaattatgaagataaaacccctccaaagttccaaggaaattactttagattatgagaccagtccctaaaaatcaccaatataaacttttgagcagaaaagataatacactttaatttttgtatatttatcttttaattccactaagagaataatgcttagcacatacttgattgtaatgcaactatactttgcaattgcattagactgaataaaaagagatggttcacaagggaaaactaaccaatactatgattaagaaacttggagactatattttagacataaagataagagaaaagcttacttagaaacgacaattaattgacaatgagcaactgctgcctcaattaaatcagctgagagttctgcaaagcctggggtaagaggaaacataagtgacacataaataaacagtctgggggagaaatcatcatcgatttttgcacatagcatcaaatacaagtacgacccatcaaccatgttttcgactcagtgaagtgtagatgttcacaatatattagacgtgcaaaatattaaacatctgaaacttaaattgggataatgtcctatcatccccatgaatatcaccacttagatatttgatccagaaaaggacaaaagtaaacaactgtagtaatttacataccatcttcctgatttggaaactttctaaggttctgagcacaggcaacggacattctggtggctcttgcttcaaatacctccaccatgacactaggctgtaaccaatcctcagctgtagaatcagaaagaatgttacaatttcattaatttaagaatatttaatgatgcaatcttaaatcatatataggttctctactcattattgtcctgcatggttaccattaaattccaattcttcagacacagaccaaactgaaaccaatgtcataattttaaaatatgtaaattatctactttccatgaaattttagagggagtggaaaaactagcctttatgcacatttggttgagattgcatgagatgttcaacacgccccaaatatgatgtggtaccaacaggctttttaccagacaccaactgagaaacagtcttcatgagaaaccttgcaacctgaagattaaatgtatagtgaaggctaagtacttacagtttttttagctcatgccagtaaatggaggaaaaaaagaagaagaagatttgtcaccatatacaagtaattacagaattgattattataaaaatcctgaaactagtgccttgtggtagtgcctgcaactttgacattttcacagtcccctaaatgaatatggttctaaagaacatgaagagatattgaatggtatgcaatcatcccatccaacatcagtcaaatttccttaaactaccatttcagttggcctagccttactgtaagtaatggtactcaggacttgaatggacaatatcagatgcattctagtgccctctctatccacaaatatacgtattttcgtacatggagagaatcctatgtaaccatatataagttaataatgaagtaattattgagtaatgacccaatatacaagacataaaagaaacttaagaatttcaaagattcagctggccctctttcatcaatttatctgaattaaaacatattttctgttgacttaagtttcactactttagactagttttttaaaataaatgaatagataaatcaataaaatcatgttaaatatatgtatgttgattaaattatcaacatatacaaacctgtagaagtagcacaacattgtctccttcgtatgtacaggcaggaacataaactgcaaatagctcaggaagcccactgctagacaggtaaccatggccaccacataattttctgcattcttcaataccatcctgaaaacaaacatacagtcaaaataagaaacccttgagtcagatgtttgtttatttagggcctggaatgaaatacaagaaaaacatcaaagctactcatgaatcacacaatcccagcacatgccaaaggatgtcaatatttaaatcaactgtaagcctttgatatttgaaacaattactagcttcgccacttcaaaaaacattttaaaacatgaacgtgataaaaacactgatgcatagcttatagagctaaaaagaatatcgggatacacaagcatgggtaaacaaacaagtgcaagataatctctcagcaaacatttctttcagaccatatacaagagatctaatcaactttaaagtgaacaaaagatacacattaggaatttctgatgggaccacttacagcagtggcagaagtagtcaatgacttcaaccccgcagtgcatgcatgagcctcaggcaatgtagagaaatctttggcttgcaacctttgggtcacgtccgtatatagccagcttaaccattcaccaacaaatctgaaagcataagcagaggccaatagagggaagagcctatgttgctgtgttttgtaatcaatcacctataggagagagagagagagagagagagagagagagagagagaagaacgaag

SEQ ID NO: 379004 - DNA, 1179 bp, Cannabis indica
ggcggacccacattgtagcgagaaggatagttgattcttatgtattttagttagttataatatatatttatagtaaaatatgatatttatacacatagtaggtttggtgtaatggttaaactagattacatatattttagaggtcaagaaatatttttttttcactttacttttacctctactatacaaaaatacaaattacgccctctcacttttaaattgtgagtgcgctactgacttaactcatatcacatctctatatagtgtagaaattaagtagataatgaaaataacacctctaactcttatttgagaaaatatttctagagtagaaaaatctaaggcttctctatcactatacacatcaactctcacaaagtactccaagaactctaaaggaatatctctcttattattacaaacttctttctctcaatatagtactgatcataaaaatgaattctaagatttaacctgaactaattaatgaaacccttataatgtcaaaatagaacaaccgaataatacaatagtgtgtaagatttaaccgaataaataatctacttgttaccgtgaacattttataaatttcataatatgagaagtatatattctttcattttttttaaaatttaaaaaaccatttagttactcataatattaatcatatagtgacccttctataattttttaatattagataacatttattttaaaattcaatttattaaattatattatactataagtagtttttaaaatgtcataaagaaaaactaaacacatagtttttaaagtaacaaaaagttatataacataattaatatataaaaatagtagcttaaatggtattcacccttttgagtatatggggtacaatcttatatatgttactcaggtttggtgaaaaaggttttagcaaaagtagaacataatttgatgaagcaaggcgatgaggagggatgtactcctctgcaccatgcggcaattaggggttatgaaattgtaaagatgttgcttgaaaaagatgaaggtagtgcctatatcaaaaatcaacatggtatgacacctctccacatcgcaactgcccataactgttgggctgtgatgagagaaatcataagtagatgtccagatagctgccaagttgttgataataagggtagaaatgctctacat

SEQ ID NO: 379005 - DNA, 2510 bp, Cannabis indica
aggttcccattaccctggtggagacatggcttttgtcacctgttggcccatccttggccaacccaaagtctgatagctttgcattgtagttctggagttatagaagatatagttcttagaataaattcaaatattctaccaactgatcatatatatgaatatcataacaaaagttctacaagccagcaactttttgagatcataccgagtcaagaagtatgttagacgtcttgaaatctcggtatatcactttagtttctgcgctgtgcaaaaaagcaagcccctttgcagcaccaagggcaacctttagacgaagattccaagaaagaggctgaaaataagaaccccctgatacaggaagaattatagtcgtcattaaatccatactagataggccaataatcattatctttactgttacaagagtaaacaaatgtgattgatgaaacttacttctgaacaaatgattttccaagctacctcgtggcatgaattcatagaccaaaagcctgtgttcatcttccaagcaataaccaatcaatttcaccagatgagggtggtaaaactgtcccaaatagttcacttccgcctgtagaaccagacaatctgtcgtcaatatccaaccaatacagtatcaagttactcagatatgttcctgtttcaagtattgacaagttagtacacatcctcaatccaagaagaacacaggcttgtttcactaccacctttcttaaaccagaagggccaccaaataaacataagacattgtacaacaacgagctagtcttttcaaaattgttaactaaaaagtgagataaaatcaactcaccaaccactctttatgaccttgaaagccatcctgattaagccttttcacagcgataaccatgccagtcccaggctttgtagcagtgaaagagttctcatcaatccaccccttgaaaactgaaccaaaaccaccttcccctaaaacgctatcagggcgaaaattcctggtggccattttgaggtcagcaagattgaaactcttcaaattggtagcctgcaatatctccccctcagtccttggaactgaaactgatgaaaccttgctgctagtacttgtactgctagaatttccatcactagtaacatattttgagctaacccctgtgaattaaacaaatagatataaagtttattgccacattcaatagatataagattcatgatcatgcttcaacaaaattatgatacacttggaagacgacaattgctattattgagattcaatctgctgcatgcaatctaccaagtaccatgcagcagcaacaacaaaacaaaaagacaaaaagacaaaagaaacattttgagtttaatctagtttgagtttaagaacaaaacggtgcatgatgttctaaacaaatttgtttagaaaccaataccaaaatgattgaacagccaatgatatgttgataaaatacatgcatatatagctcaagtccacctcactgatccatccctgatcccagaagactaacaaacagagcacagataattgaacagaacccttttccaaataaatatattcaatatgctaaaataggcccccttcaacaggtggggtgctaaaagatattagatgtaatatctgcttacctgttttatatgtgctgtcagctttgatttgtgcgcttaagcaaatccccattgaaaccacccaatgaaaaacaaccaaattacccttttgaactcttcctgcagatcaaaagattagagcctcatccaaaaccaaacaaaggcagcctttgaagagtaaatatagacagatctaatagttgaaaacatttttcatcatttttatggcaaaaatgtttttatttttcttaaataagaagttagatttttgtccaaaactcaaactaattgctagcttttctttctatgagtagaaaattgaatgacaaaaaaacaacaaaaaagtatgaaacttccattcaaaaaacaaacaagaacccattagagagaacataaaagagtgccataaataaaccttactttgtcacaaaaatcaaagtgaagaaagaaaggttacatgtgttatagtttttaatagtcgtctgggaactaagaagtaacaagttcagagaaagctttaccagaagaggcagacagagcaagttacgttgctttatttcgcctttctggtaaggtttggttgttattgaaggctgagaaagccgataaaaaaggaaggtgagatggaaaggattgcattaatggcagcctggtcccgccctttcgctcaacgttttatactctctttggctctttctctcttaagcccttcgattttgattatgaacttgtccattcttcaatgcatcatagatggctcagctcgttatctacagctggcttgtttctttcaaagttttgttgatttttcttaaaaaaaaataataataatactaataataataataataataataaacaaataataatcagaagttttttttttttttttt

SEQ ID NO: 379006 - DNA, 3836 bp, Cannabis indica
ttgatgctcggtaccaatttggcaatttgtgttgctgttgtggtttatactttgttatggtaatatgatctaatttgacaaatctcgaaaagcaggaaatcgagagatgacaatggcggtggttttcatttgttgtcttcttttgaataggatgttgtaattttcttgctaagaaacatctttgcttatgacttgggatttaaatggggtgttattgtggtttcaaattttcttttctgatgctcaattaaacttggatctttctgcttcgttcctatttcattcaactaacccatgatattgaatagatttatttcacttttgttcagtttgtaacttatataagatggctgaaagttgggatggaagctatgatcctggcagcccctcagatgacagccgacaatttgagaacgtagagccaatatatgatgcatttgtctgtcctttaacaaagcaagtaatgcgcgatcctgttacgttagaaaatgggcaaacatttgagcgtgaagcgattgaaaagtggttcaaggaatgcctcgacagtggaaggaagttgcagtgtccattgacgctgaaagaattacgaaacagagatttgaaaccaagcatagctttacggaacaccattgaagagtggaatgccaggaatgaagctgctcagcttgataaggctcgcaggtcattgaatttgaacgctccagaaaatgaagttcttatgtccttgaagtttgttcagcacatctgccaaaaaagtaggtcgagcaagcatattgcacgaagtgcagggttgatacctatgattattgacatgttaaagagtagcatccgtaaagttagatgtagagctttggaaacccttagaattgtggtggaagacaatgatgaaaataaggtttttatatgagtttctcttgttgttttctttatattactaagatagactctatggtctcttgctaactgattctctttgttttgtaggaaatggttgctgagggggacactgtccgcactattgtaaagttcttatctcatgagcaatctaaagagagggaggaagctgtctttttgctgtacgaactttcacaatctgaatcactgtgtgaaaagattggtgcagtcaatggagctattcttatattgttaggaatgacaagcagcaaatcagagaatcttttaactgtagagaaggcagacaaaacactagagaatctggagaagtgtgagaacaatgtgcgtcagatggctgaaaatggtagactgcagcctcttctgacacaaattcttgaaggtactttttgttgctcggataaacggggaaccgtattcttttttaatttgaaataattgaaataaatggattttttgatgttaaactttttgcaatattggtatgattacaggccctccagaaaccaaactgtccatggccaatttcctcggtgaactggttttgaacaatgatgtgaaggtccttgtagctagaactgtgggttcctctttgatcaatctcatgaaaagcggtaatatgcagtcaagagaagcttctctaaaagctttaaatcagatttcttgtgaggcaagtgctagggtgttgatagatgcagggatacttcctcctcttgtgagggacctttttgctgttggtgctaatcatctatctatgaaactaaaagagatttctgcaacaattcttgctaatgttgtgaactcaggttatgactgtgagtcggttcctcttggacctgataaccagactttggtctcagaaaacatagtacatagccttctacatctcattagcaacactggcccagcaattgaatgtaagcttcttcaggttcttgttgggctcactcacactccctctactgtgatgaatgttgttgctgctattaaaagctctggtgccactatcagtttggttcagttcatcgaggctccacaaaaggaattgcgtgtggcttcaataaaacttcttcagaacctttccccgtatatgggtcaggaactagctgatgctttacgtggcacagttggccagctaggaagcctgattagagttatatcagaaaatgttggcatcactgaagagcaagctgcagcggttggcctcttagctgagctgccagagagagatttaggcctcactcgacagatgctagatgaaggggcctttgaacttgtctacacaaaggtagttaaaattcgacagggagagaccaagggggctcgctttgtgacaccgtttttggaagggcttgttcgagttctttcaagagttacatttgtacttgctgatgagcaggctgcaatcgatctctgccgagagtataatcttgctgcattgtttgtcgaccttcttcaagctaatggacttgacaacgtgcagatgagttctgcaacagccttggacaacctctcacaagaatccaaaaatttgacaagacttccagacatgccagcacctagtttttgtgcctcagtatttccatgttttagtaaacaacctgtgataagcggattgtgtggagtccacaggggtacatgcagtctcagagagagtttttgtcttttggaaggacaggttgtggacaaattggtagcacttttagaccacacgaatgagaaggtggtcgaggcagcactggctgctatatcaactttgttggatgatgaagttgatattgaacaaggagtgaaggtgttgtgtgaggttgagggagtcagacctatactagacgtgctgttggagaaacgaacggaaacattgaggaggagatcagtgtgggcagttgagagacttttgcggattgaggagatagcctatgaagtttctggtgatccaaatttaagcactgctcttgttgatgcctttcagcatggtgactacagaactcgacaaatagccgaacgtgccttgaaacatgtcgataggttaccaaacttctctgggatttttcccaacatggggtaagaactttttttttttggtgtggtttatgcttacttccaaatccagtggaaggtatatattgttgtatacaagatttcccacttgtagatgatttttgaaccatgttcatttgttttttttttctcttcctcttcttcatgatgcaagattttcatctatttatgcatttttcatatcatacattgaggctcgggctgaaaactgtcattccttttctcattgtttattcattattactttgtccactataattttttcagtctgcaactctatatgtataaagttgcgccatttcaaattttaatctttcaacatgctcaccatttatcttttaacttcttttgtggacgtaaggacaagcagaatgaatggcggggaaagtagaaaaataagtaaaatttgtatgtgataatgcttaccacaaatagacatgatagttcacttaaataataataagaaaaaaaaatggacatagctgtttgtgaaatgactattaaatcaaaaaatgcaaaataaataatgaaatcctacattcaacacagcaaattctcatggtcctgctcttttctggaaaagccttaggaaaatgcgtgttcctcaaaaagttatatttggaaggcttctttggttccctaactcttgaatatcaagaagcatgacttggagcttgatactacttgttggatgtgtaacgatggggaggaactttgtttcatgcagtatgggggttggaatgcgcttgattatgttcgcaaggagattgtcgacgttttcaggtgcctttggattgccatggtaacctttatgatttttttgcttcatccagttttgtctctcttgggaggagatggaacaa

SEQ ID NO: 379007 - DNA, 4392 bp, Cannabis indica
tagttgataaattcatagcagttcatagctagtcatatatatttagctcacctagtaaactagcgcctttgaattctcacataatataagatcactaataaaaattccaagatggtaggttagtaggagtataactttgtaaatttactcctaaaataattaaaaattagatttatgattccagtacctactgattattgatttcagaattattgataccaagattattgcttgtatgtatttgatggaatcaagaatgtattttatattttttttatcatctagcccggcatttaaaaacgaacatattataccttgcaatgtatgatggcaatacttgagcaagatttctctcatgaaattccattttctctcagctaagtgaatatgaatttattaattactcgtttatcgttattgacaagagtaataaagctgatttaatttgtgaatcctttgcattttttgggatctaaaatctggccttaaattttttcagcttttttattaaacagatagaacgttgagcttatgatagatctccaatgaggttcacttatgtgagaagagggataactaactaaatctaagttgtttttagcttagtgtgttagtggttatgttttgttggagttgtattgtaggttgttatgtttcttttagagcagtagttagttttttttttttttttgatctaagcgtttatatattacattgaataacctggaactcgaacccagaacctccaacacacacacactcttctatggccacttgagctagcctcaagtagttagtagttagtttgagtataagtaattggttttcagtggcaaagtagttagttttagactcttgggagatttcgctatcttgaattggcttctctaattgaggctagggtttgagaaataaagagagttttctggtgttgtttgtgagtgtgcttggctgatattttgagagttcctattagcttaaattatgtatgtttttctttcttggatggtagatgacccttttcttctccattcagctttctcttttttgagtcaggttactttttcagaaataaaattaacttatcacatctccaaatggttttttttaacagtcatgctttgattctgtagtagcaccaatctaaaccattagccgccccaaaatttttggaaaacggaattgggtactgaggcgttttcccttagtcccacgaggcgtatcaagacatacgcctcaacaataggaagaaaaacttcataaaatatcataaaactcataaaatttagaacaaacaacacataatttcataacaaagtcataaaattcatgaaagttacttgttaagtcttaaaatcatacactaaattcatagaaggttcattttcaaacaaaaaatggtaaaagctctaaacttttaaagaggacatatacgcatgaggttgatgaggactgaggagggaggaattcgactgagaaggagagagatgagagaagccgtatgagagggttatggttttagggctataatttcctatcttttctattagaaatctgtttaaaagacccaaactaaagccattagagtcatttaaaagtctgaaaacagctattagaaaagctttagaaaaggcccaaatcagcctacaaaacaacagccctagcacaaaaaaactgcccactgttgaggcgtgcacctcatgcgccttagtgcacatcgtctcagaggtgtgcgcctcaagtccgcctcatgagtgtgaggcgtatgccgcaatgacagcagctgaggcatagcctcaaattttttttaccacctcgcctcgaggtgcatatgcctcaaaatgaaacttagcattttacacaagcatagatacatgatagcgaaactccaaacattcaaacctagactggatccatctgaacttagatttcacttgctttttttgttacctgatatacttaaaatttatcaacatgttagatatggaacaaataatattgagggttccctagttgaatgctgactgattcttccaatatctgtagaagccatgaatcctgaagaggtacagcatcaaaaggaagcatccacttcacagaaccatgatgatgacagtatacaagaggacatatttcgggatatttttgataatgctgttgaagtacgtatatattcttctgtcaaattattgaaattgttttttattttagttgcttcataattatgtcagaaagtgcttgtgagtgctctgcttttactgaataaaactacttggtactttccatataaagataggatcttgaatatcttgaacattactttttttttttttcaataaagttattgtagatatgatgtcttacttgagatttgaagctgacatgattagtgaaacttccatatgtaatatcttatgcttggtttttgattgtgagtaatttcttttcgattatgacataatgattgttttgttccttgttatttatttgtaggaaccttcccagaacttacaccatgagatggttcctgcaaaagaattaccaaaccaagtttccaaagacaatgctagtaactccaaagaaaatgagatcacagaagaacagaaagcccgaatggaggctaacagactcaaagcactcgagaaagcggctgcgcgggcccgctcattgcaggtcacataactgttcatttcattttgttgatttgctcttcatgtatcataaggttttgcaccaacagacaactctatttctttctagtctatatgacaactgcagttgaatttcccatcaaatttaactattttcaaattcaaacattagccaattttgttagcaaccaactagtccttagctacttcacttaaacttaccaaaaagtaataacaaggtggtgatacatgtaagatggtgtttggttgggagtgaacggaatgaaattattttagtattttaaaatgcaactacataaaaagtttctatttcatttcgttacctctaaccaattgctttccaagttaataagattgttattaggtatttgggctgccagtcaaactgctccaacaaattctactcctaaagaagagtaacgttcaattatttggtttagtgttgaatttaatttggaaaaaagacattcatattaaaagaaccgacctaaattatggactttttgttggagaatatttggcatttgagtataagtttggtaaattaaataaatttacaaaattcttggtgccatttaaaggcagtattaagtatttgttagaatatataatcgtattttcataatgtcacatatatttgaccactatcaaaaatggcaagctgttctttttttttctttttctgttttaaaatggcgtcaactataaaaacaataaggtattattaatagtcatgaacattattagtacgaaataagaaaatgctgattgttgactattataattgtaaataattcttcttcaatatctgacttttgtggtcatgctttgctacctctgctctaactgaccttaattctttttcattgaaaattctaatttcttttttattattcctatttggactatggtttgaatgaaactaagtgcacatgaagtataaacaaatctaacaaaattttattgaataaattattattctactttttgaaaataaaaataaaataaataatcaacattgtttaatgctctagcaacgtaacgattctcacctaacgatatcgatatctaatgggatctaatcctaccaaaatctggatttgtgtaagtccattttattttgaacttaattatgattgtatatttatatatgcatatactaattttgaactttattcattcaggtttcaacaaattaatttcatcaaatcgattttatgtatgtatacacacggtcaatctagacaatttgtaattcttcagttcaatcacaattttagaattcttgttaggagatcaaactaaatcaaatcatctaattcttttatatatacttcatatgtttttttgtaatgaaatgatgatatttgggaataatgttaagtagaattttgatgtttacttaatattgttttaatttttttttattatgtatgtattataaacttcaataaatagaaaaaaaaatagtaaaaaaattgaataattacttagacaaatttagaataactaagaatacaaattatggttttgaaccactaatccattattaagtggatttatttgatttgatttaagcatttaaatggtagtttggttttgaatttttcaaagggctatttacaaaaatatgggaaaataaagataagttttgatatatatggcataaaaacttaattatactaaatatggcatttttttaaaaaacttacaaatatgg

SEQ ID NO: 379008 - DNA, 3887 bp, Cannabis indica
tttgttttacagaaatacgatgacaaacctcaattttgcactcatggtctcacatcttttgcagagccacgttttctgtagttcatcctattgcataatagcaaaatcacaagaatagacactcagtgaagttctaggagcatttaatgctaaaagccaagaatcgcctccaattgtaagagatctcaagaaaggaaaaggcttacatatttatgttggtgttgcagcttcaaatcttttacaagcttaataagcacgcccagtatctgctccaagacctatttggtgcaattattttaagcaaatcaaggatcattagaagaaatatttgaaaaataacagggatttctgtatgacatgaactgcttattgacatacactataatattcagcaaattttctatctgcagagtacaggtcctctcttagagtagcttcttccctttcaatctcttctatgatgaatttaaccctgatacaaccaataatgaagtgctataataacacattgcagaccagcatacataattcaagcagtgcttataaaggaaagattaccacaatcattgatttatgacaataaatctcaataaaacaaggaaactacaaacaaggacaaaaatcggccctcatgttctcgtcactaaaattatgattgacacaaatcccagcagtctacaagatgacattaattacttccttaaccgcagttgatattcaaaattcaaactaataaaactagatgatttcttcctgtaattcaaccatccagatccatacaccatatagaatgttttgagtcacatataatcttctttttttcccagccaaaatacatttaaatcaggaatgatatcttgtaagataaacaaaaggaaaattaggacatcgcacaatttaatttagttcaattacaagagaaaagcctatttaagaggataacctttctggaattcgtgtacttgaattttgatgtccagatgatgaatctacaacagcaaaagctgggattagaaataccaaatatgttaaaatatatgtaagcataggcaaattagatattatctcaaaccagaaattccccagtggatgtgatgcacttcatgacaagggcaaggttagtttatattttttttcaagagagaattatacctatgtcatccattataaaagcatcagctaaagtatcacatttagcttttaaacgagcctcaatctcacgggaaagacacaactggtactctgtcatatcctacattaataaagcagtactatgatattaataaatgaccaaagggatcaaaacaaaaatgtcactgaatagatacatatggaacatgaaatgcgtgaacaaaaaggctgaaaaaagcacactaaataacaagagtttgtactgcatcactgccttacaatggacaaggggttctgctggagttgactttgccataaataagcaggtgtaattccaaggaagcggttaggaacaccaccaactccaggttctgaatcggtagcaatagaaagaatagtatttgcagcactggaagtgctattggcagttgtgtaattggttgaattggaggttgagctgattgtaatactactacttgtactgtcaagggaacttcgtgacaagatactgcatttctcaatttcctcctcacgaaattcaccatcttttgaaataagaggaagcctcaacctttgagctgcttcagcaacaaccatacgatgctccaaagtctcatacacctgataaacaaatatgtcattctccaaacaggctaaatctaagcctcataaaataactggatatttctaagagaagctcgtcaccttagtcaagcaagatttcatccaaaatttcagccatcaacagttatgttcaatggaatacaagttcagaaccaaggacaagtaccagtaccatgttgcagaaacttacattttcttttcgctctttatgtacaacttaagtacaaaggaactacttttgaagatagcagtggaaatttgccaaaactaactttacattattgtatgaatatatatttatatggttaccactatagtagtaattgtttttaatcactatccactacctataataattgttggtattttcagtatatggataaattacaactccattttttgtacacgagagcgtatcatgtgttaccgggtcctctaacattttttttaccggatgatttaggataacaaaataagaattcaaacagtctcttgaacgtacatataaatatcaaaacaagtatgtgtgcaaatatgatgtttgaatcttaattttggtattattactactcatattgttttgaaaaattgtgggagatcccgtagaaaaacattacggagaaaacaataataataataataataataataataataataataataataatagtactctatttgtatatgtcaatagatgtcttgtggcaaacgtttcgtctatgaatttggataataattaaatcgaacgaactcatttgaaaaccgatattaaaatgtaactacttaaaacctgaggggaattctttaacccaagttgcatgaataagccctgcacatcccgaattcctccaaggttagccaccgaaaccgcctgttgatagtcttccaccattgctatagcctcactgtaaattgcctacattgagaaaatcccacctccaataagcaacttaacaaaacaatatatatatttatcaacgccaagatcatcacagaaacagagtcgaaaaaaatttccaagatataatcgataatgcataattaccatagcttccaagtagcgaagcctttccctaaacatttcctccctcgcctgaaatatttaagacgaaaaacataggttaaactcaacggaacccacattttctaggaaaccaaacaaacataaaagagcgtgttgtgataccagttggaggtcgtagtaacaggacttagagacgagagaatcatctggggccaagcaatggcgctcgagctgttcgatcacttgggtgacgtctggtgggagattttgcccttgatgaagccccttcatcataatcgtctttcttctttcttctccctctacgttccaacacgaagctgttttttggtgttgtgtctcacctgaaacccaattcggaaatccccattctcccctccctttcaccaaactccctctttcttgcaagccttaaagaacaggttcaaatcaacatcaacaaaaaaaaaaaaaaaaaaaaaaaaaaaaaaaattacaaaagacatttaccctaaaaaaaaataaataaaaaataaaccattttgagttcctaccaaaataaaggaaaattttatttttggactccaaaaattataaatccacctatttcaatattttttttacataaaactgtcaatattttaaacataaaaaaaaaataataataataaaaaaaaatatatcattactgtgtgcattagtgtccaggtgccccaaattggttaggggactgatactgaattacaacagtggtgacttttagcaattctcttaaaaaaaaataacctaaataattttcatataatttttctttgaataatattagaaattaggtgtacaaacgagtcggtctaacatgtagttacacaatctcttttttataaatgaagttcgacatggttcatataacattctttaatatatcccgatcattccaaattgttctcatcattgttgttgaccttagatttggccaactgacagcatagtcgaatttaatactaataattgccacgtgttacacaattagaatagaaaagtacacatgattttatagaggttcgtcccccttagttagcgggttatgacttactccccttttagttgt

SEQ ID NO: 379009 - DNA, 4212 bp, Cannabis indica
ggaggttacgtctaagtgacctcaatagcatgggggttccattcacaagcataaactagttttgccttcgccctaatgattcactcaaacttcatttagtcaaggtattaccaatgaaaaaatcaaacagaagatagagaataagcataggaaagctcatgtaatgaaagactatgccaagatagactagatagtagagagagatagctcattgaaattgaagacactagcacaattaataagtcaaataaaaaatatatataccccacaagaaatggcaggacaaagtatccgattccggcaaacaaatccactacaacatcatttctgcagtccagttgtgccatacgtcgcttctcagaaagattgccccaagagaacatgcacttggtagtgtcaaatgaatatataattccattttcacggtgatccacccagccactatcccccacaagaatctccaatttactgtcccttgtacctgtctgtgcaactcgcccctacaccagcaaattcaaaacatggtccgtaaagtagacagattacaatgattcttttagcatgaaaaatcttaactaaatttcccaaagatcactggttgaacttggtatttcaattttataataatatttcagcttacatgggaagagaagcaagtgggatcataacatacatgcattaggacacacatgacagaccagagagccagaccaaaatgtataaataacacacctgacgagcaaggcggcgagtattaagtgatttggcaacagtaggccagagttcttcctctatcgattcccataaaggattcttgaaagatgatattgggagcacagtaatatccccaagccgttcccatcttaggataaataaaaaagacaagtacacctagtcaataatattactttaaatagaaaaaaagatcaactaaaaataataatgcaagactgccagcaaaaaaacagtaaggagctcatataatcaattttccatctgatgcatggttgcttaacgagtaaatggatcatataagtacaactgacaggccaaataatattaattttgaatttaagaaaaccttgtaggtagctcctcgagaagttccatagaaagacctttatcctctaatagagaggctacagcttcactcattattttcaatggagatttggcagctttccttgcttcaacaacgttgtctgccagcttagaagcaccacattccttcagaatgttcaaggcttttgaagaagtgatatcattagaaactgattcatctgttttaactagggaaactaaatgatcattttgcccttcaaatgagtcttgcaaggaatgtggcttctggggatacaaacgacagaaattctcattcacaggaaagcaaatatgaactccatcttcttgagagtatactttccttgcaagatctaaccacccaaacttcttcaatatatccttcccagtttttgcatatttccgttctagctgtagagcccagtgtagagaagcaagctgctgctctccttcattaacagcagatatttcaccctcaatatccatgttaggatcttcagttccagttagagcttgtgaaagtccagcttgttgatttcgaaaatctttgtcactttctctcttcgccacttcacagccatgagaaatatgcaatcttccattttcaattggtttaaaattatccagatgatttagagaaagcaagttaattttcactggctcactaaacttagttccaaaagcatagcaagctgctccaccgccaatcataacaagatcatcaccaacaatgttagaagtgctgcgcagaaataaatctttgctaaatgaatcgagcttcacatgcctccacacacggaattgcaaatcaagtaatgataactcctcaaaatgttgtcgaattggacaaccaccaataataccaatatagtgtttgtaaacaaacattgagtgagagaatcttgcatgaggacttcttcctgctgcatcttcccttttccattgacatttttctatattaaagctgtaaagatctccaagtgctttattgccactgtaaccaccaaacaaaaataattgagatccatatgcaaccaaagaatgagaatgtcgagcacatggctgctccccagtgaccgttaattctctccactgcatactatccgtgtcaaggacatggaaggatgaggagaccgtatcattgttaagtccaccaaacacatatatctctcggcctacaactgcagcagtatgtcgatgcctgtgaaaatgaaattaataaggacatagaagggatcaaatttaatcttccatcttaagatagttgatgccacaaggatatcagaaaattcagacttcctaataaaagattaaaatgcttaagaaggtagataaaagtgaaattattaccatgtgcataaaggttgtacagccatttacagtttacagactgattctttacataacaccaattagataaaggtaacatcaagataaactcaactacaagattgtaaatgaaaaagattgccacttacctggaaggaaagatgcaaccggagcattctacaagcttccattcacccttagccgtgtttaagacccaaacttcactcagaatgttctctggatcagccctgcctccaataacaaacatgctatctccaaccaaagaagacgaatggctcaagcgtggagaagggccaccctcagcatcaaaagctttcaatgtgccagtgaatgaatcaagtagcaaacaataatttcgtcgtgaatgtcttcccatgccaccaaagccaccgaacaccatgattccattgttgtttgagctacccaacttacaagctgagtgaccccaaacaaaaagcttttcaacaggttcaccaacaatctccatcttaacaacagataaactaaaattgggaacttctgccgaccctgccaatgtttcaaagactcagactttgctttcgcattaaaatgaaaggtgtcctgcaatcaaatgcagtattagtatgtaacagtatttactcaatttaccaaataacactgtactttcacactacgaattcattacataacgttaatcctcatcagtccatttatgagtcagttctttagtcccatactagaatacaacaatcaacagagacataaattttagttccacaaatcataacacaatacagccagatatagagtacaacattcaacataaccaaattaccagaatggtttacaccgtcttctttcccttccaactcaacctcttcagctttgtcatcaagtaaggaaccgttagtatactctattccatcagtgtcctcaacccccgatcccacaaaaccacttttgcgcaatgtgagtagaaacccttctgttctcttcctattcgcctccattttctcgttagcgatcccaacaaggtatttaacgtattcaggagacaccataagcttctgagtatttcccaatggcaactccaagcgaattgaacaccgaatggcaataatcacccgcttactagcactggtaatgccagactctctaaacccagaagcaattgctaaagaaaccaaaaattgagccgaggaaaggtccttacactcgatagcgagaatgagaggctcaaacctgaagacgagatcagatggaggatcgctcggggtaggagtcgagtcggagcggaatagaagattgagaactgaatcgagttccgccggttcgtgggtaatgaagagccatgatcccccgaaggcctttttcttgagcttggttgtggagggtggcggttgggagaggatagagatacggccggagcaggaactggtagtgaagaatgaagggtgagcgttgatggtgttgatgagaggtatgattggtatatccaacgaaccctttggtgatttgtcagtcaccgttgatttcagagaagctatcgtcgccgctttccgcctttggaactccatttttgttagctctgcaaaatattattctttcttctctctgaaaagtaaaaaccctcttaaatctcagttcagaaaagacaagactgcgaaatgagagagggtaggatcgactttttactctaccagtccacaactgggctgggctgaatacatggatttaagaggtaaaaattatactctataccattttttatattgtcctcttttatttttacttcttttt

SEQ ID NO: 379010 - DNA, 1214 bp, Cannabis indica
atgaaaatttcccttaaaaaaaatgccaaaactaagtatgtggtgtaaaattccttaacgaggcccacaaacaaggcccaacacaaggcccacaaacaagcccaacactcgaatttgagtccaaaactcacaaccaaaaaaactcaaagaattgcattttgttaatttgttcataccaaacctaagcacccgatgacacatcatgcatgtacacatttgggacacgtataaggccacgtgtatacataaaataattatgtgaactttgttttcaagtaataaaaagtccacaagctagaatttccaaaatggcatgtgaaatcaagataaggccacatcccaaaacaaaaaaaatcatcaaatcatatacaagtcatcataacgtgtgtggagatgaagagttgaaagaaattctaaagtaatgaccacttttttatcatttctttgttaagttggaagttggaacctaacaatactcagtcatcacacaaccctaatgggccaattccaaacccaatatcagtatcttttagtgggccctattatgaacccaagaaagatgttttactatcaattatcaaaaggggcaaattaagtgcaccatcctcaaatagccgacttggtcaataaacatgactaccttcaatatcatctcaatgaagaatttatattggaaaaaagaatcttcttaccaataattcattaacccaatctaacattacaaaactaaaaaatattaacttttgggtaaaattttataattttactgtcacactaattttttttataaaaatattgtctttttataaaataaccgtaaaataaaaaatagaataattaaaataatagtggaacaactaaaaaataaccgtgaaaacttaacacagaaaacagtataaaacttatacagtatttaaaaaaaacacacaatatttttaaaatatattctgcctcgcaataaaaaaaataaatagttacaaatttcaatatgcggtttaaaaactcttagaaaaaatcaagactgtataactttgtggcctataatatgataaagtgggtttttgccattaatataactaggttggtaaatccttattccataccaatacaccttttatataataaccatgaagtgtaattctattttgattcatgactaattagcaattttttcccccgaacttggacatatatcaaatcatgccccttaaact

SEQ ID NO: 379011 - DNA, 5550 bp, Cannabis indica
aaaagaataagaaaagcaataaaggaaagcatgtaataaaaccattcaaaaccccttctcttttagggcttctccaatgtactgtaaaattttaaaaatagtgaagttttcacacaatattactccaaacaaacactaaacattaccttatatgtgtgggagtttatagtgtctcactattattaggccatctccaatagtaaaacttaaatttggtattaaatcaacaccaaaaaactactatttcaacactaaattttgatttcaattctaatgacaacactaaaaattacaccaaattttatattatttattattttattattttattaatataataagaatattttaatactaaatatatataattatttagttttttctcttaaaaagtattatttaattattaaaaacttaaaaagaaaaaaatagtgtagtctacagtacccccactaaatttagtgggacactatagacaaaactatttataagtatagttttagtgtcctattggagtaaattaatgtgtaaaactatactacatttagtgttttgaagtccagttagagatgaccttagtgggatattgtagacgactacaattcttttttttttttttttttggtattaatttaataatcactttatacataaaataataattaaataattatttataatcaaacttatattatattaataaatattataataataataatatatttttagtataattttagtgttgccagttgaaatgtaaaaaaaaaaaaaagtgttaaattaatacacttatagtgttaattcaacaccaaatataaattttaccattggaattgctcttactattttggatccatatatgtttgtttatatttatttattggtacttggtttggttgaaggctgttagatctagttatatataagctaacttttaattagttgtccgtacagaaagtatttataacttaattgtttgccaacggactatagttgaggtaagggtctaatttaattaagttgtgttaatttgttcttcataagtaataatcctgcctaagtggaataaattagtgatttctaccaaggtccaatagatcctcagcgacatttcatatgaaatgattgggacattaatgtatgtatatctaatgcttcagcagtagccaaagcaagttgctccttaaactatgatttgtcatctattatcactaaaaaagaaatatcacatcatcacctatacaatactcctctgagattagattaataatcatgattaattttctattcaccttgtactaagtagttggaatccaattttcttttgataatatatcaaaatttctttatgttaggcataaagttttttacaattatcaaaaatcactaagctaattcatcttttcactactcgattcaagagttttattatgatctggacataatttaaaattagctggaaacaataacgaatttaacttagtaaattaattttgttcggtatgaaaagttgaaagagtatcacacttaattacaaaactttatgataaagttactaaacaaagctatcttatcaagaaaattgtaagaaaaaagcaaccacattatcacacacaaaataacgtagtactagtatcatagttatgttaattaataaatacttatatatatatcaagcttttgatttacttttatatttttcttaagttaattatgatttttttctttcaaactttgacatgtaccaaattatgttttctgaacttttttagccgttaaaaatttctcttaaactattgaaattattagatttaaagatttttgtctaatttcaatcaattttactgttttagtgattgtgtatgtactaaacatgctctccaaactttaatatctaccaaaacatgcccctcaaactttaatatgtactaaatcatgtcccttaaactttcgtgttaaatttttttactaaaattaaataaaaatctttaaatctaacaatctcaataatttaagaaaaaaatttaatggtcaaaacaatttaaaatgcatgatttaatacctataaaaattcatgaagaaaaaaatcttaattaactgtatccaccagatgaatcatattcttgagtcaaaaaagaatctcctgtcagcaaatttgtaatttcacactagtaagagacaaggacatgcatgcacacgtggcttagcgcgtgaaaaggagggacagtttctgcatggaagagctacagttcagatatttagatatgtagtatagtctttctttctctttctattgttgctggtttttttctattgattttattattcaaaattttaaataaaataagtaaaaaggtcaactagaggtctattgctagtccaaagtccaagctctccacaaaagacgccaccgcaataaattctagcacgtaaaatctcgtattaaataattcattttcgaagtgaaattcaaaaaactcaaacacacacaataaaataaccaaacttaagattcaaatttctccaaagaagcatccaagccaccttcttcttcttctaacacctctgttctttttagacccctttttcactctcacttagttacagtactactcttatagtgatctcctttctttgtcttttcctgatctacaacttctataatatatatatatatatatcttctatttcaatatacaatctcactgtcatttccagttattataattatatttactcaaatggccggttttgattttctctgatctccttgagatcttcaaacactccctttctctttctttacacctcaatatataaaccccttaaatcttttgtatttttctgtatacattttcttataaatatatacagctttcttcttcagctctttctctctcctatctgatgatcagaagtttaatttatatatggaaagttctgattctgatcagatacaaaccctagtataattagctaggccatttattcaaattattatttttcttacaacaccaatggctgatcgagcaatggtttcttcttatgatcatcatcatcaaaaggcggtggttagaaaatcatcaattatgatcgaacgtaagccgttgatgctcaaggactatcttctcgacgatctaagttcgtgctcatccaacggcttcaaatcttttccaaggcgtcagtgctgctcgaccgtcagatttctcctcgagatcgatcttaaacagaatcatcagcaccgcagtcgtcgacataatcctaaagaacaaccaaatttggttaaggcaaagcgacatttccaaagtagcagaagcggtcgcttcaccatctcagtccttcaaagagcttcggatgccgttattaacgccgtcaaacaaatgccgttcccttcagttatgtcatccgtacaaaagagagccagaaaaggactcctgcccataagcctttcgaggaagctattatataatcgcttttggggtagaggcgccaataataataataatactgaagtcgaagatcatcatcaccgtcaagagatcatcagagaaaatatcaaccggtggagattgtgtcctgagctgccggacaatgatgatgatcaaaatattaccacgaaaaccgttatttcaagtagctcaagcggtaatagtaagagtaacagttggtgtgagagtgagtttactaccactactacaacttgttctagcagacaatccgaaaccattccaatcaccactttagctcatgaaaacgacgtgtcgcagaaggtcaaaaagaaagtagatcgtactagtactgtcggtgatgaggaggatacgacggagttaggaccaacaaccgctacctgctctcatcaacacgcaaaggtaattaacaaggattctttatttattattccatactttgcgtgcgtacactaataatatctctgtctcagactatattttttttttcccttgagttagccgaaattagtaatactaataaatttgatttgagatagaattaagtaggatgtaaaagtgagtgtagcgctacactcactttctttattaattgctatgtattttaaaagtgtttggtaaacgggaaagagagagaaaaaaaatatataataataaaagaaaacacagggctagatatggtcctaggggattgcatgatcttccatgtgtggttcttgggtcttcgattccgctactgttgccaagtagcgggatcctcggcgtcaaatataggaagactatctagtacggggacagttccatctagtatgggcgataatttaattttaaagagagttgccatagttttctttgtttaaaatgttttgtgttattttattttcaaatttttatgtgtcacatttgaatggttaataggccatatttttaactatttatgttcatttcgaagtagagaatttataatcgttcaaatttatgagtcatacgaaggagcggtagctgtttacgtttgctaataattgtagtcgtacaacagtgtaggactaggagtaaattgtattttcctttataaaatggtcacgagagaattattaattcattttgtcggtaacataaggaattggacacttggtagcttggtatttaagaggggtgtacttggatttatattctaaattataagtaatcttgtcatataggatttcagtagtgaatattaattccaaatattattacatagaatatttaaattagtataagttagttaaaaataaatggtacaagttagatatatatcatgaaaattttatatgaaaaatagagattgtgaattttaaatgaaaaagagatatttaatatttattgagattggtgatatatctacttattatgaatataaaattgaattaaaatcttaaaattaaattccccaattcatattattcttttatatgaactcatattcatattatgtttgtgattaaatttagacaaatatcctttaataggtcttatgtatgattgaacctaagtcaacagtcttggtatataccaatctagtctcaaggtatatataaaataaatgaactaattcaatttgcacgatccaattcaattcaatacacaaagtatggatatccgtacttgtgcgaattagattggaaaattcaaaatccacacttgtacggattggatgtttatttacatgtaaaaataaccatttcaattcaatctatacatatttaaaagtaaaaaattatatatacaagtaatatattaatataaagaaaatatttaattaaaagtctaatacatataatgcaattatattttaaaatttaatagatcaaatgtatatttcattcttatatatataaattttttttaacatacaatttaaaacaaaattaaatatttctttatacatatatatacttttattttcttcctttaaatttgttatttgttatttttttattttcatttattgttaaagacataaaataacaataatttatttatcttgttgctagttatgtaaaaaaaattcatacatattaaataatttaatattaaa

SEQ ID NO: 379012 - DNA, 7105 bp, Cannabis indica
taaaatacagtttttacagaatttttaaatattttttacgaattttttttatgttgtattttttattaattttattatttgatttttattatatatatatattttttttgtatttttgatgtattttgttattttgatgttatttaattattatttttatattaattttatataatttgtttaaaaaataatatatatatatataataagtgtaaatcactttttatggccctacaactaaccatcctgccataatattactgaaacgaaaaaatgaaaaagaaaaatacctttacaaaaaaaaaaaaaaaatgaaaaagaaaaaaacaaaagagaaaataaaagcccactgttatttatgcaccagctgtctacacgacatatatcgcgatatattgaagataaaatgcagttcataatcattttcgtgggctaataattaaggcttggtcgctccgaacgtcgccatgattacctggcgtaaatttcggaattatgggcctacgggcccaataggcccggtacatgcatggtatggtgaactgatattttattcaatttttggaacttattaatgttttttatataaaaaataaaactcattaataaatagcacataaatcatttttaggctgaaagaaaggccatataatttggtgtcatcaataataatattaaagaaaaaagagagaaaatttttaaattttcacaatgaagctcatttaatataactattttttttttttttaaaaaatgatgtaactactgttttcaatgtaatatatattcgaaactttgcgaaaaataaagtcatgtattcgaataattgattaggagaagtgtggataaattcaatgtatactgtttggaacttggtcctagtttctactttatatccatttgggtatgtttttttttagctatcaaatagtttatacattaatttaaaataaatataaacatggaatttgtctcaatacatgtctacaaaattactcctctaatttaaaaaaaaaaacgctaagtacaaacaagagtctagtttttactttataatattatacgttaatattaatttttttattaacatattattactataattcactcctgctatttactacggctcttcaatgaaagtatatatacaatgaagtctaaatattatttaattttacacagcaattaattgttggaattaagtggcattatcataatcaataattcaaattaaatgccaagttatgcctatttttataatctaagagaatttaataataaacacccttttatattaatttgttttttttttttctataataaaatgaaataaaataattttttaaagaagaaacatgttgggacatccttgccgtacgaaataacgaaaatcaactatagtgctagtgcatggtcaactatgcatgtcgaagtttcctctaatcacaatatgacttaattaattgggttttttaaattgagtaaatatttaaataggacttaaattttttgtttttataatttctattttgatcaaacttaatttcaaaatttgcttcactagtctagatagctctacaaaaatcatttttttttattctgcaaaaatatatatatatatgtacatttatcaaaaaagaaaataaaaataaaattataccacttttaatcatccgatgtcttgatctgattggtaaagcatacaactttaagatgtctgactcgcacctaatcaaaatcacccgagaaatataaattatagtttactgtatcattaggtataatatcgtcgcgatatatatataatatcaacccatgttaacgcaatcatttgaactaattgaaagatccaaaatctcataagtcacccaaaaaccccactaatttactaattttataattttgatcataaatttttaaattgtataaagtttctaaatataaattaaaaatagcgccattttaaaaaggaaacattctctctctttacatgagtgattttattatccaaatattattattatttttttatttactttattttaaaatcttttatgttattttggctcttctccccactggttatagcctaatagcaaattagcaaaagaaaagacctgtctttgaatccaagttttttttttttctagttgaatttccggttcctatcaccatccgaatttttgggttagtttcattttgtttagtgatttggctatggtgggtagttgctgaatcttgggtttaaaactatgtagtggtcagttattctgtttctttttcttctgggtaccattttcgttttcttgtttgtttgtcaaaaccaacccaaattttaagtgttggattcaagtgttagtaggatcttgaacttgggtagtatttattttttcataaaaatctcatctttacaaagttcattagtttttgggggtaagttttgggtaatgaattcttttgggtcttctttggtagagggaaactgagcgaaaaatgaggtcacttgccgagtatctgcttttgtttttgacatctggggttcttattgtggtctgtgaggcatttgtacacaaagaaggtatgtatttctgtgctagcatttctttcccagatctcaaattctgtaagttctgtttggttactgggaaaatgtagggaaagaaagtcaatattcgagtttttcaatcttgcttttcttctggtgctattggagttcatcaaactaaaactggaaaagtaaatatacatatatttaactttggaaaagggtctaatttttatttagttataacaattatacataacccaacgtataggttttacttatcttctattcctttttggttttttcttgatttctagtactgtcattgtctgtttggtctttgggattttgttggtgaatgtactagatcttctctgatcagaaaatcttggctttgctcagttttggcgctaacaacttttaaggaagctatatacgaagacccacatctggttttgtccaattggaatgctttagacttcgatccttgtgactggaatggaatttcatgtactgggtctcgagaccatgttataaagatgtaagatatcagatatggtctatctatgttagtacaagtcatattaattttttttgtaattagattctttgtttttgggaatttttaacaagggtgatttcattatttgttttctggttttggaactgtttttgcagtaatataactggggcatctctaaggggatttattgctccagaattgggacaacttagcttcttgcaagaactgtatggttcttctttacatgtcatactcttgttttttctcttcttcttctattggatgtttacttctaactccaaagcatgctatattgaactgaagaatatttttatcggttgctgtttgtagagttatgcatggaaacaagctgcttggagtaattcccaaggaactgagtttgttaaagaacctcctggtcttggatttggggataaatgagctcactggtccaattcctccagagtttgggaacttaactagtattatgaaaatgtaattagagtataattatatgccatttttattcgagtgcagtttatcgatcattttggatttgatttattggtgcactatacttttactcttgcagaaaccttgaatccaatgggttgactggctctcttcctgctgagcttggaaacttgagaaacctcaaggagcttcggttggacaggaataggcttcaaggaactattcctgctggtagcaatgttggttggacctctaatatgcatagaatgtaagctagatatctttgatctttcacaaatatttttattactatgaatgcttacaagcatgtcatattgaaaccttcgaagaaacacataatgttagcctgtattcatgtacataattcaatatttccagtagcattacaatcattgatggaaatgtttaagattactatgcatgttgactgtaacatgtaactgtacatgttagaccaacagtctatgcatcctaaacgcttttcgcaacagctaccagaaagcagtatttcatatattgatcttaggattagtgtccttaaaatttgtctcttattacttgttttttcttaaggtatgcaccagggtcaaactcaacaggtttctgccgttcatctcagtttcacaaggcagatttctcgtacaacttttttgttggtagtatacctaagtgcttggagtatcttccaaggtacttttatgactgtcttctttggcttgtgtgttagtaaacattgtctcacaatatcatttaattcaggacaagttttcaagggaactgcctccagcacaaagatataaaacagcgccctaaaaagcaatgcggtatgtaacaataattagtgtcttgttttaagtagctgaaatctaaggagtatctcttatccaagttagaagttatgtttaaaacaacagaaatgaatccgagtctgacattcactgtgtattttaactgctgatttttcttttgttcatctattattcttagttgcgagtggcttgtttttttcttgtcagatggtgtttcccctatcaaaagccatgcagaagccaatcaaaagcaccagccactcgactatcagtccaaacatcagggaacatcaagacctacctggcttctggctctggaagtagtgacaggagtcatggtgggctctctctttttagttgcacttctcacagccttccagaaatgcaatacaaaatcgtcccttattattccttggaagaaatcagcaagtgagaaggaacatgttagtgtatacataggtcagtacatgccacatatcttcagatgaagtttttgtaattgaagatgctgagttttttgtacaactattgattagtttgctaaagtatctttcttctttttctctttcacagattctgagttgttaaaagatgttgttagattcagtagaccagatcttgaagtagcctgtgaagacttcagtaacattattggaacttcacagatagtgttgtctacaaaggaaacatgagaggagggtctgagattgcagtgatatccctctgcatcaaagaagagaattggactggttttcttgaactctattttcagaaagaggtattgttctctgttacataaaagaaccttttaccactaaaagtcctagctaactctgaagatttaagttgtgaaacctttctaaagactgagtgttgtagttccactaattttcattcaggttgcggatttggcaagattaggtcatgagaatacagggaaattgctcggttattgtagtgagagtgttccatttacaaggatgctagtttttgaatatgcatgtaatggaacactgtatgagcaccttcattgtaagttgtgatgctttctcctttcaacatgtgcttgcttgattgtgttttgttagctcatgagtgataatttcaccacagatggagaaggatgccagttatcttggacacggcgaatgaaaattataataggcattgctcgaggactgaagtatcttcactcagaaattgaaccaccatttaccatatcagagttgaattctagtgctgtataccttactgaggatttttcccctaaggtataccaatgaatttatttttctccaaatttgtcatttctaaaattaagaacaatttcccattgtaatgagactgtagtccatagtttccatatatagctgattcaaatttgagaaattaactgaaaaattccaactttaagaacgctgtcttgaattgaaatgcagcttgttgactttgaaagctggaagggagttattgctaggtctgaaaaatattcaggctccattgacaaccaaggctctatttgtgttcttccaaattctttggaagctcgctatctcgatattcaagggaatctttatgcatttggtgttcttttactggaaataatcagtgggagacctccatactgcaaagataaaggatgcttgttggattgggtaatgaaactctctgaaattcaaattctattatttgttttctttttctaggtgactttgaatatattattatgcatcaaagcctaaagggttttctgtgctgcaggccaaggagtacattgaactgccagaagtgatgtcttatctggtggatcctgaactgaaacattttaagtatgaagatctcatggtcatatgtgaggtggtgaatctttgcataaatgaagatcccaccaagcgaccgcagatgcaggtgatatgcaacatgttggagacccgaattgacactacagtcgccatcgagctcaagtcatcatctttagcatgggctgaacttgcactctcatcctaatatcaagttgaagctaacacaccttgtaaagcagaattatatacagttttactattttctttttctgccccactcaccaccacattgagtttcatttcaagttaccattttgttttaatcttttgtaaatgttgtgttgaagagaagagttgagagagtttcatgcaagactagtctccttgtatactaacaagtgaattaatatatagccattttttttttccatgcttttgcttgaacataaaagtactttgattatttgttacttgttttgaaggatttgccagttgtaagctcaatttaaatcttagtcgttatatatgtaatgaaagtgtgatattatcaactcttgttttcaaaagatagaaaaatatttaattaatgtttggaatgagtgctacctgtatcataaatataaagctaaaaaagagacaagaatcttaaattgtggtgcagccttaaattgcacacaggttctatgcaacatcatttaaagattccttgagtaaataaagccgttgggagaggaaattaaaattgtatagagctagacaaaaagtaaaaataataatataaaagggaaaattagaatgcactcaaccaaatttgaccacttcttggcaaaatgactttaatgtatcaaaacaatttaagaaatagaaacatttatcgtattatttcacaaatacataaatataataaaaaaattataaaaatataatttca

SEQ ID NO: 379013 - DNA, 2680 bp, Cannabis indica
ccaataatataaaaatgaaagaactccataccaatcatagactccatctcttggatcagaatttagcaaattgaaggaaagcacaatctttccatcagcaccaacaggcataaactccccatgaatcgaaccttcttcttttccaccattaacaaacactttaacaaaaatctccgccactcgagacaatgccgccgtctcagaaaccttcccggaaatccaagcgtgcctatactttccgatgacagctctaacatcctcatctctattcaccaacaccacagtataaaccttcccgcctcgggcaagctcggaacaaccgcccaaagcagactctaacgactcatcaacagcctcatcatcaccaccaccaaaatcaacgttacttaaggcaccgcacctccatggacacgatgatttactggttggtgattggatacagtgggaatcagagtcaataaccaccgagacagtatagttagtgccacacgtaccacattctggagttcctgaacccaatttgttcattcgatcgagaagtgaggcctccaggtcctctgaagatttgaattcgaaaccgatgaagatagcctgaaagtgacagggaaattgtaatggagtggaatctagctgagccgagaggtggtcgatttcgcggaacggtagaggtgcacggtagatttccactgatttccatagcaatgggaaacctgtaacgcaaaaaaggaaatgaattagagatcaaaagcaataatagaaagagacgaggagaaagaataaggattttaggacctagtacgaaggagaagagcactgaaatggtgaggactaggcgcttaaggccaggcttagtctttcgcattgattttggatcgaaggtcgattgtggatcatgttgttcagatacttctgatttggtaatttcagagacttccgccattgatgaaaggcaaagctccgattcactgtataatttctgttcgggttttatttctttttattttttatttttttttttttttttttaatttcgaaaacagattatcttcaatatataataattttatttcatcaaagccgtcttagctcagccggtagagcgcatggcttttaaccatgtggtcgtgggttcgattcccacagacggcgttttatttaaatatctaattttgaaacttagaggaaaatatatgataaataacatttttcgtctgtttttaaaataaaatttaataataatttaatttaaataagacatgttactgtctttaaattagttatgttaaaaaaaaattaagataagtgttttatttatacaaaattagagagtatgagatttttttttattatttaataaaacagaaggtataattaattattttcacaaaataaaaagtctaaactattataaaccaaaaaaataaatgtaaatttgactctttattatttatttattttggaaagggacttcatttctttagttcatacatttcaaatgatcacatcatttgtttgttcctacaaaatctaatgtggatgaaggttaaatatgatgtaattaatcttaatcatataattaaatatgatgtgatcctattttaaatatcctaattaaaattagtaagacaagacgtcataatataaaatttaagtgagtaaattgagaagcatcactatcattattattattacattagtaggtacacatatgtgccttcaaattgatttttcattacacaataattgttttggccaatttcttagccattttactagcttcattcctatcagcttgatttccagcaaacttcttcctaaacaactccacatcttcatctttctatacaacaacaaatcacaagagacataaattaatcaagagaaatttataacaaaacaaattaaaatgagttaacaatggttttatttaagaagtaatataaataatttccataccaattccttaaataaaggttctggtgttccaattttatggccagcaggtacaagctcccaaggtttcctaaacctttcagcaacatttccatcttcattgctaagtgaaagttgattttcatgggagataccaagctgctttagtaccttaacaaaagagtgtcaataaaaagaagagtaatttgttagaatattcatatgggcagtgtcattattagcattattagcatataagagtaactatataatcggtattgcatgatattctatttctatcattaggccataatatgatagacataatgtgctaacacgtttgggacttatggacatgttctaaaatatctttggttagtccaatggtcaagaaattaattctttcaaattgagcatgtagacccaatcggcccaaggttgtgcccttttattggtgaccaagaggaatgtgtgtggctaagatgtgtgcaaagtgtaaaagagttgcgttcatcgaactctgttagagagtcccacattgttaatgtgtggaaagaaaatagaacatataagataaatgattactcctcccattatcaattggttttgagataaaaccacattcaccctatcccaaattctaacaaaccccttacatttttttcttatgtttgtgtgggtggatgacactgaagaacagggacggacccaagtatattaatgtgggggctatagcccccactaacaa

SEQ ID NO: 379014 - DNA, 4699 bp, Cannabis indica
atttttttaaaatttttctatattatattttaatatttatgttaatataaattttagtgaaaaattatagttactataatttaataaaaaactaatgaattatagttactattgcaaaaatatgaaattctaaattactgcatattgaaatggttataacttatgacatgctgattggagtggttgaatactcctagaggctgtaatcacatgcaatttattagacaaaagttttttaaaagaaggaaaacaaaaaagctctttaattgcttagcttgtatgaaaactactccactatacctcatcatttcataatccaataaaggagaagagctagaaacaaaacaaaagcaacaggttaagaagaaagagtgtgaaatggaccttgttaattctgagatttactaacgaaacgagccatcaattcagttatgagtgttccttattaccaaaagttttattagcttaaacatttactaaattagtcattatcattatactgtaacctatcactttggttgtacaatatatacggacaaaataagagttacttgcaatgaatttttttagtaccatcaacagttgtaagattcctaactctactgtttccctttgtctttacttttgatttcattgcatcattgacataaatttaatcttttgttttttgttttttttccattgctcaaattagcagacccattgtccaattttttaattttgtttttggttactgaagcgaactcaattattagacatattcatccacagtgtgtcaccaacaaaataaattaatagtattttaatagtatattatgtgctacaattacgcatgtttggctactatagtttgtctctcttgcgttcctggcccaataactaaatgaagtgtgtgctaatcatggggaagttgaatatgaacaaagataatgatggtgaggtcactaaccactagtgtatagtacgtggcatcaacaagggttatttggataataggcctttaaattatattgcttataagtaataccacatacataaataagcacctactacataattatatgtataattttcttataaccaaaaaaagggccttgcttagtcacttaattgtcacttagttttgatcacctacgtggggtgtgtccgcactccacacagattgggaatcagtttgaattccgtagcttaatcatgttggaaacagaacaaggaagaaaagaaaatattccactcagtgatgcatgcattagccaatagaaatccttcttccataaaaaagcaaaagaaaattttagctcttaaaatggtatagatatttctctaggtgggttgtttttttaataccagtcaaaattatagcagtttaaactaattttaatcaaagctgagtgggagagcgagtgtgagtgagcgttatctagtaaaggcgaaggtaccgtactacttttgctttttattattttctcaagccaataaatcatacagtttctagagtctaaaggctcataatcatgctgtaggaaaagcagagttgagtacttttcaataattgttcatactaatcacagtaatacaaagttgaaaaacactaattattgttataatttgtattttgctcatatatttatgatacatcgggacttgggactgaagattattctctctttctctctttacggacaaatataagcaaacaagaaaaaaactaattgacccctttgttctcggttgtcttgtagtagcagttgatcctgaatgaaccaaacatacataaacaaaccaaacacaacccatattttcttttggcctaaaagccaaacctcaattcgaagattcaatcattggaccctttttgagttcagaactggggccttcgttgcctggaagattgtgataacaacagatcatagtaatgacggttaataatttcgatcagaatctgtttgacaaaatgctccaatgtggcctttggtttcattacgagcgagctagtactcccataagaatggctcctcgagccggagtcctgtatcggctgcacataaatgccaccacggaggataatagcaaaactcagtgctgctctccgtaccgccgatgaaaagatcaggcaagtcgaacaatgtatcctcataattatcagctgaagaaggagaactagttgattcttgagtactaccaatttcaatggtagttgaagacgaagttgtactaaacgacgtgggaatctcggctgggctgggctcggcttcggcttctgcctcgggtgtgtcatggtcaattgttgcacatggtaacttggctccctcaaaggctgcagccgccttggcagcggcggcttggatgtccttgggagccgtggagaccgggcgtggaagatcattgcttaattcagggaaattgaggtaagctgaggcgcctttgatggctagagcggctacatcatgggctcgagctgccatttcggctgtggggtacgttccaagccaaattctggatttcttcctcggctcacgaatttcagacacccatttgccccagttacgcattcttacacccctatatgtagggtgtttattctcttcattacttcttgacctcttcttgctttgttgatcatttgaccctttaatgctaccatttttcattccttcaactgcttttggtgagccattttgatcagcattcttcgtgtatttctggttgagcccaccaaagaatttggatgaaaactctaacgaggaggaggaggaagaggaagaacacgatgtggtggtggttgttgttgtgctgagcaggttttcttgagcatcactctccatgttgatctcttctgccatgatgttgagtcttcctagttctagagctagacaaaagtgtatatgtatgtgagagagtactgtctataaaataaaattgagaggtggtgttggcctttttattattctttggccaaaaataaaatacgtaaagaaatctagggaaataaaaggaaaagagaaagaatataaaaaagaaaagatggggtccaaaacgtcacaatagaagactacatacagttcaactatgctgtttcccatgtgggaattgaataatgtatgtttttagatgttcaattttttcaagtttaattaccaatattattgtgtagagacataattttatagtaagtaataaacataatgaatgtgtatatatatacacaaaaatattatacatatacgtttttgtttgtctacttcggacaaaactcaaatatattttgcttaggttgttggttatataggaaaagttttacatttaaaagttagaaccatgagtttcacatgaactctgaaatggtcctacacattattcgtagagtagatttgcgggtccgcgccatatttgtaaccccaaaccgtctagatctttcatttgtatttaattaatatttggtttccacattgtatttgcataattatattaagtattagtaaagtttttgctgatccatcaatctcaactagtcccaattgtgtctccctccacctactctttgaacattcttatcagacacgaaggtggctaaacacctttatatcatgaccttctataactaattagtaattttttataatttttatttaattaaaattaatagcattttatattaaattacactaatagcgatatcagtttagaaataggtgctctttagcatttctcccaactctttagcctcttctcataaaaacatcccaattaaaatattactttaatacatctattatacaagtatatgtataaatgctacaagtttcaatatcatattaaatggctaaataaagcaaacaattggtcaacaaaaatgtgactaatgtgatggaatctagagatgaaagccacatagtaggggaatgctcatgatcatgagaggaaagtgcctctcattacctaaacaaacatcagaagtttctcttaatttcacgtttggctcttatggaaagagacaatcgatcgatgctccctaacacatatataatcacatgaagaatgttgtaaattgacagatgcaggctagttttcttaactacatatatgaaaatctcttctatttaatcacttgtctatgcacttgtgtaaactgaaagatattgcttgtggttatataataataattaattagtattctaaattttacagagtacacttgtattatgtgtgtgtgtataaatgtataaggaattagatcatatgggtggttctgcttttctttttaatgatacatatatgcaacaacatatgggcatagatggtgcgcatgtgagtgggtcctgaaatagccaaagccagatatcttagccctgtattgggatctactgttcaacctttgattctttttcttggtgaaattaattgaatggtattggacacgtttacttgtctctagtcaataacttgtttgattgaagagattaagttttcagttgcattatattatttgttttttaaatttaagctgtagggtaatagtgtgatttttccaattcatttataacagctattggttttacagaaataatcattatcgaatctttttatttaggtggcatttggtaacacttttttaatcagttttctgtttttaaaattggaaaagtgcaaaatattttcaaaaacatgttctataaaactgttttcacttttcaatttt

SEQ ID NO: 379015 - DNA, 2126 bp, Cannabis indica
taaaaagtaaaattataattattgtgatgggcattatatttatatagaaccaaccaaacattattaatgacttcgttttggggtggacaacccatcacaaataagttaatacatttatttatttattttatttgcccattacacatgaattaatagcctaagacgtgttagctgtatccaccgtgaccgtttccaagtgcttttagaattaaatttaagtcatatctttatattttccaccatccctatctcacctgtaaaatcctttttttttttatttttttaaattttaatcactgccgtcaaaaatgtgatccgacggctgaagtgggaatatgatcgggtctaacgtgagggaccgcgtcaaacgtggcaatatagtagacgtagctggagatagttgggatgatgacgtggcaacataaagacgattcatctttcaaatcccaaccacgtgaaattgcatttcgttccattttgagtcgatagcgactccacgtgtcttgtctgcggttcgtcaatgcaatcatttaaccaagttaagggatccaattaaggattatatctacaaacaaataaaaataaaactcacgcgccacttacacgccgtctacaatactcgcttcaccttgcttttataggcctctttttttttttaatatcttgagtgtagaaaataatttttttttttaaaaaaaatttaattttaaaaaattataaattatataatctgtttttaaaaaatactataaggaacttctaatgtgcctacccttacaaaaagtactacaccaagatacctcttgttgttttggcattaagaaaaaaaaaatttgtaaatattttttttattatcgtgtacattataattatttaagacgctttataaattttaaaaaatttaaaataatttataatataaaagtaatatttaattttattattcacaaacttataaaataaaagaaacacttacgtgataaactgtttgaatattattaatttttaatgtgttaaatttgtttgaattttttaaaattttatagaaaatcataaataactataatatacttaattatgaaaaagaattaaataattttcttagagtgcaccgtataattttctaatactatatatgtgtatattttccaatttgaaaatgttgcatttatctggacgtagtccaatttgatgaaaaaataaagagtagtctttgttataaactaattaatatatcatctagagaaaaataaaagaaggcggtcgcctccacttaattttttgatttaaattttatatatcaataatttatcaaatttaaagcttatattagcaatagaccaaaatataaatatttaaatttgattgtaagagagaagaaaactttacttaaaatagaagtaaacatacgcataaaactatttagtctagcttagtgtccaaattgtacaacatacagtgtgtttaatttaatttatttgtatgacaaattttattggttttgtcagtttattttttgtgtattatatgtatagtaatttaatgattaatctgcctaagaaaattatgatagaaaaagtcatatatttaatctaatggaaacataacacctgtagctttgttaaggatttaattaaatattacgattatggtagtcggcagaggtgtaaatcacgtgagctaaaaacttttacattattatatatttaaattttaggatgtaattatgtcctattgactgttattggacaccaatatattttcaaataataataacaattcgttggtttgtttttttaatccgggtaacaatttattggtgttcagataatgataatatagtatatgttgagaattagaaattttgttttaaaattaatttgtaataagttgagtagtttatattcttataatttattatttttatatttaatagatatgggataatattatccaatagtatgcattaatttcttttaaaaaaatatatagtagtaatagtatacattaaattatacaaaaatagaataagtgctggaatgaccgttcaatatacttaaacatgaatagatataatatatatttttattgtaaccatatgcttacatttttctttaacctgtaat

SEQ ID NO: 379016 - DNA, 878 bp, Cannabis indica
cagaaaaatttaactgagacttttgtcgttatttgtgagcaattgttataatttggagatgtgataaaactagaaaaagaaaaaaatatgagcagagcttcgttgttttcaattgtgagaaattaggagaaaataattagatccaacaaatgaatcaaataaatagatgtgagaaaaatatttcattgccttttggaggaaatcacaataatttatcagaaatttttgaagaaatcccaaaccaaccggaaaaaatagaggagagagaggcttcatcatttgaattttggagccgagcttatgtttctatttggagaatgaatataatgtgaattatacccttatataactaagagtattttaggtactacaaaattataaaggtcatttattatattattttaaaaaaaagaactttaatcttcagtaaaaattgatacagggcgatttgctactatttctcaaaaacaatactaaatttttgcataaattgtataaaaatagtgtaatttcactattttattattcttgttcagttaggccccaagaaggcctgcattgaatctatgttgggcttggtccactaaattgtgttatcccaactacatgtccccatatttttcatccccaaacaaagtaacaaaagtgattcaaaaaaaatcttataatccaaaaataaattaaaacttcaaacatgtatgatattaatttaaacattcactactaactaatagagtatttcctttcaaaaaataacaaaaaaactaatatcccaaactaaagtctcagttaaatgttgataaatgattattgttggtgttgttggaaaagtcactactacttctatttataatgaattttaaatattttttttttga

SEQ ID NO: 379017 - DNA, 930 bp, Cannabis indica
tttcttaatcctaatattgtctcatggtcatcaaaggaacagaaaacaatgtctagatcaagttctgaagcggagtatagaagccttactcatgctacaacagacttagtttggatccaagccttactcactgagggttgttgttcatctacaacaacttccagtgatttggtgtgattatcaaagtgttattctgatggctgccaatcccattatgcattctcgaaccaaacacatcgagttggacttatattttatttgagaaagagtgataaacaagcagcttttggtcaaacacactcaatcttgtgaccagattacatatatctttactaaagctttatttagcaccagatttttgtatcttagagacaaacttagcttagattttttatctagtctaagtttaaggaaagttttagcactgttatgtgaaattatttaggatgttagttacactaattgtacatactcttacttactcttttctgttattgagttatgtatactttgtacattgtatttgtagagagcaattgctcattcaatgaatgtacataattcattccagtcattttctctttctctcttccaattgttctctctattcttacaagatgaaatttagaggaaagttaaatggaaaaattaccatagtgagcatggtagtcatagttgaaatctaatttaaagaagtcttccataaaaatatttaaacctttggaggcacgtttaggtaccacaacaacgaccaccaatttgaatacgataaaaaagccaatcttattgtaacaccaaatacgagtgaaattttctctagttttatcttcatatctgttaattccatttttggcatatttaattgacaaaaatattttattatttaatgtatatttcggctggcatatattgatatggtttccctatttg

SEQ ID NO: 379018 - DNA, 8499 bp, Cannabis indica
aaaaaataaaaaagtgttaggcacctaaatttattagcttcaaccaaatggtagctaagtttagtacctgaatgaaaagagtaattgaagtgagtcaagttattgatgagatttggtgagtgttggatttgggtggatccataagcctccacatataccaagccccaacagttctataaggcttccatttctcacacaatttctccatctccaatggccgaggcacttctttcaacccatacaacctctgaacccctttcctcacaccaagatcacccaccggaagaacatccggtctctgcagagaaaatatcataaacatatgaactgtccaaaccccaattcctttcaccattgttagcatcctaagcagagattcatcgtccatctcaagaatcgacgaatctgacaaacacccatttctgaacttctccgccagatcatgaaggtaactcgcttttctcccggaaacaccggcttcccggagttgaatagccgatagtgaactcactgagtcggggatcactagtgactcgccgccgcagagcgtgacgaatcgggtgtagatcgagttcgctgctttgtacgcgagttgctggtaaattatgcttctcgacagagattggaacggtaagctatcggatttgaattccggtggcggatgggtatcgattagggttgcgagaagcgggtcggagctccgtaaatagttgagggcgatttcgatttcgggtttggaagttaagggtttgagggtttggggcaaaacagaggagagtttcaacggtgggttttcattgacggagacggagacttggacggttggggatttggatgagagttttcgggcttttctggctcggaatggaattttggaaaagtttggggggtttttagaaataatggcggtggccatttctggttgtgtttccgtttgtgactgaactttggcacgtttaaccattagaaaaaataacggttttccggcaaaagaaaaggtaaacggttaaatgtgatatgggtggttgggtatttaacaaaggagtacttggatatggtccgactttgatcgtgctctgcaagttttgttttgattttcatactattgtttttttttaaggtattataaggtttgattggttgggtcaaacaaatatttatttatttagttaagtgaggagtggggacttatatgataagtgatgttgtgttgaggaagataggagaataaaatgttacaggaaaaaaagaaaaccacatagaaaaaaaaaaaacgatgtttagtcacattgagcatgtgaattaaacgtgggtgttagttaaaaactcaagtggtacgtgtgagttggagcattgttatatagaattcaataattaattgtataaatagcaatataatattgaggagagtgtaagacacacgagtgctttttaacactccctttcgagctttcaagaaagactctttccactagcaagcttcagcaacaaccttttgctaatcctaacatcagcccagaggagttttgtaccttaccaatagtctattgttgcattgtagacttatgagttatgactctattgccaagttggttcagcagctctccaaattaataggccttcaccaggtgaggttcttattggcacgttggatgataaacatatacacccgaattcaagtcaaaccatgttaatagtttaagcttgatcggcctgaatggtcccttagccacttcacccaatcaaaagacatttagctcaatatcatatttatcactcaactaacattgttcaattgatactaaagttaagtcataaatattccatcccaagtatatagcatgggacaggtagaataatcaacaaagattaccttgcaaggttaaatgttcaaattcgtgagtgagagatagtaaattagtacccatgaggaaagggtaattcttaaaaaaaaactaacgaaacttcgtcaagcacaatgtttacatgtaagcttattctaatcaagcacaacaatacatagctaaagagcttgatagaacagccaagcatagcatgaaagaaacttcaatgatcaacctcaacacccgctacaactcgaagatacacaagaatctactttgggggcccttgttttttcagtgagccactaagagcagcctttgtttttgcccattctttcaatgatgtagcacttctcataaaggagcaagtgttacttatctcaactttcattggagatgtttgttttgctgctgcaacacttttttgttctgacatcagtatggatgattcgttattacctaactcagtttgttgttcctcctcctcagtgctccttgatacatccctcttcttccccattttagaaacatcaggactatcttctctagcagggtttactacgttgttattcttgacattggaaaaattggcaacgaacggattgttgggcttcgccgtgatctgttgattggatgtgacaccaggaattacttgtgaaatgctaaatgaagtactctctccaatcaattgtgtccaagaggatttatgccgccaaaaagcacctctccctgcctgatttgaaacaaccttttcgtcagcaggttgagcttctagtcctactagctcttttgctttcatctcgcaggatgtgtctttcatttctccatctctttccaagttatccattttgtcagcaggttgagcttcttgtactactagctcctctgctcttctgctttccaattctccatttctttccaaattgtcttttttgtcagaagcctcaacttcttcttcttctactcctattagttcgtctgttttcattaagcatgaagtgttttccaattctccatctgtttccatgctgtcgttttcgttatcagagtcacaagaagtatctgatcttggcttaacttcctcagcaacaggcatactgaacaaatttcccgagatgctgaatggacttttcttgctatcatcaagaagttccttccatgaagatttctttgacccggaagcacttgacttgtgtttaactgatttatttgaaccaccaagcacgccttctttattttccaatgcaggagattcaaattcttttccactggttttgtcattcacaactgactttttctttttgaatggtggctccttatcattcgctttcttgattgcagacacatccacaaaaggtccccttttcggtcttggttcctaaggcgacagaagtagcagagttagagttgagaataatactaggagaatgagaaaattagttcaattaaagagtgtgtttacttgaagaagttgtggtctcccaaatgaagggactggttggtctttggtaacaacattgatgatgagattatcttcatcttcatcttgatcatggttttggttttggctttgaaagaggttattcatcactttattcattatttcaagctcttgttcattgatcccaccactctgtgactctacttgagcaacttgtttgtctttctcattttcaggtaaagaagaagaatgttcttcgcaatcacagaagtactttggaagagaaggaacatcaactcgctggaaactgtacttgtgcttaccgcttccactgaaaggcagagatttcacctgaacaaacaagaaaaccatttaaaattacaataacaatattcatcatgttcatgtgtatgcatattacaattagcaatgaaaaagcaaaaaatgtgtgtttttgattcattggttccttttcttcacatagatatgtttactacaatccgtaatgaaaatgaaaaagagtgaaggagtgagttttcttctcgtcggtgctacctatatacacctacaactaataatagaaaagcaggtgacttttcgattcatggctttgatactataaatatatatatatatataactataattcgtaaccaaaatagaaaggttagtctttgattcattgggttttttttctcattgacaatacgtactgcaagtcataatgaaaaacaaaggtgagtttttgaattagataaatcttaaaacatgtttaatagaagagaatgagagaaatagaccttgtataatctggggaaataaatgcgaataaggttggtgttatcagggtcaagttgtttccggtggatatggataggaggaggcggaggagcttgagcttgagcttgggctttagctttagcttcttcttcttcttgcttttgcttttcttgtgaccactctcgattcaagcgaatgagataatgttctttggccttttcgagtctgagtttgcctcctttccaagcgcagccattgtacttggcgaagagattggaaagtgacttgggagaggaagggagaaagtcgacataggctaaggagcgacctttggtgcggacgaagtccacagagtcaaccactccgccagtcaactgaaagagccgactgagttcctccgctgtcactgactcccccaaacccccaacgtagatcctcactttctcctctttctcttcttccatggtgtttcgattggactgaacactcttacactcaaaactctcaaccctttcttctttctttctcttgtatatttcttgacctgatattttagagtttatagattcaagaattggatagataacatataatcaaacaatgaagacaagctaaaagccatatcatatactgttatcgatgaagagtgaagacaacatttaatgataacccatatgcatatctgattaaaaaaaatagaagccaaaattcataactaaaatgcccaatgcccaatgcccaaaacccattgtctatcatatcaaattcaaatagaaacaaagaaagtaattatcaaatacataacctaaaatctaaaatgcccaatgccattttctatcatctcaaattcaaataaaaaccaaaaaaattaatgatcaaacaaaattacaaataataatcagattcattatcatattcaaaacaataaacaaaataaacaacaaagcaatttgaaggtcaagaggcaagtcttttacttctagtcttcacctcgaatacttaaaataataacaaacagaaaacagttttacataaacataaattacttgcagacatagaaatgtattagttgcacacataattgaaatcaaagcacaaatgaaagaacagaacaccacataacaaaggactgaagacactctacaattcactaggaaaatgtcaataataaacaaatgactctctcactttcaaaacaagtaaaaataaaatcaaacagatctaaaggctacaactttatataaagaattaaacaattttcatatcagagtaagaacaagaagaacctcacactaacttcttccaccttaaaatgaagttcaaaacccataatattagagtattttcataagaaaaagaaaaaagaatgataccaaataatataggaatgcatacctaaaagctctctttttgtttggggctaaagaagtgtatgtgaacaaggtcttcgagagtgaggtgtacggctggccatgcgcctgaggcctgaggtttacgtgtgacgcctgcgtgaggagtggggaaggaatgaggagttacgacgaacgagagaagaaaggagaaagaaagagaaagaggattcgttggtgagatgaagcctctggtctgagaatgagtcgagagacagagccagggaaaggcgacttggtttcttcatttaggttttatacagggcattttacatatatactcaaaaatatggcaaagattacaaaaatacaataattgaataattttacttaatatactgaaaaatatgggaaagattacaaaaatacaatcatatgaataattttacatttatactttactcggtaatttttgtttcttttgtactatatttagaatataggccaaaatgagtgaaacctcgtcattctcagtaactatagtcgaaaataaccgatgaactacaacaaaataacaaaaaaaataaataaataaataaataaataaataaccattatttcggtcatgtaagtatttaagatttttttttttttttagaaattttttactattattataaatcaaaattcatttgaaaaaatgggatgtggaatctccccatccaacaaaagtcttcttccaaccctaaagcatacttagctaagttgtgggcagtttaatttgcatgcctacgaacatgagcgacagtaatactaagaaaaaaggataaaagacagcgtacatcatttattaaattagaaaaacaagataagtctttgtgtttgtgtgtagaaaccaaagcagtagatactcttaatgcatcagtctctacttgcatcatcgagagttgttgttggaaagcccaattaagactctggaaaagagcatttgcttccgtttcatcacttctaaaacagccttgtactggtctggataatgcagcaaccacttctcctttgtggtttctaataacagctccaattcttaatttcttttctttgtcatttaatgatgcatctacattcattttaaaataatgtatgttaggtggctgccgtggtgtcaagtctgatttattggcctttcgaattgctgtcatctggtttgtatggtccacgggcagagtatttgaactctgctggcacatagcagaatgcgttgcattttgatgttgatgcagcaacaaaaattcgattggcgttgcattagaaagatgttgagaccgagtagcatttgattcaaattgatgctgatgcatagcatttatttcctggtgctgcagcaggcattatgactctatgccgatgcaacaatgaagaatgtgacaagttaacatcattatcagcacctactggtcgaagtgcattggatgcttgctggtgcaaagttggacaatcagcatgttgttaaacattatccaatgaagttggattatgttgttgctggctcatagcagcagaagtggttccaagctgctggtgcagaggagggctgttgtggatattgttgttctttaggtgtatcttcctataattattcacataatttattgcttgtgttactaaaacagcagcatcacgttttgttcccctatggagtatcttatttctttcattccaaatgctccacatgacacaaattaagagttcaaattcagccttttccatagttgtggagagatgaataaagtagtcaccattatacataccatgagcactttgaaaatcaatatgaaattgtgttgatttccaaactgattttgcatgtttacatgtgaataaagcatgcccaattgactcccaagcactcatacatcttgtgcaaaccgctgaatcaataacttttcgcttgtgtaaagcagtggcaactgacaatgcgtgttggatgaccttccaagcgaaaattttcacctttagaggtattttcaatgcccaaaagaatttccaccagtttttgtaattatcaaatgtaagtatttaagatttcacttttaaaataataatataaaatttaattaaaacaacaatacaactacaaaaataaaataatcaaataaaataaaaaaaaaattatgtctcaataatttttttgtcagtaaagacttccatatctttcaccttaaaaaatgttttcttaccttaaatacattaaaaaataatttagaacaataacaaaaaaaataattgttaaaaatataaaaatcaagtatattattaaacaccgaagagcacatacagaacaaaaaaaatatataaaatttaaggctaattagaatttttacctcccgaattttgacatgtattaaatcatgctccctaaacttttaaggttattaaaaatgccctctgaactattgagattgttggatttaaggacttttgtctaattttagtaaaaaaaaaactaatatggatgaaagttgtgtgggcatgatttagtatatgtcaaagttcgaggggcatgatttggtagatattaaaatccgggaacatggtttagtatataaacaatcactgaaatagtaaaattgaatgaaattaaataaaagtccttaaatctaacaatctcaatagttcaggaggaatttttaacggccagaaaagttcatgtgacatgatttggtagatattaaagtctgaggagcatagtttagtacataaacaatctgaaatagtaaaattgagtgagtttattattattattagaataaagggtaaataccattttggatcctgtgttttgcaaaagttaccgattggaccctgtatttttttaaatgacaaaatagaccctgtattttccaaaatagtaaaaataggaccctgagcttaatttttgtactaacttttttttttaattataatcaacttgaaaacaattcctaatacgaacagatacagaaaatgtaaacaattttgtcataacacttttagatcggattataattaaattttattttagataaaaaaatcaattcagggtcct

SEQ ID NO: 379019 - DNA, 5125 bp, Cannabis indica
tctctctctctctctccttatttattgtttatgccatgttctataactatgtttgtactctacatgttaaataagaatagatatataaatgaacttactaatatatatatacatgttatcatagtctatatatacagttataaagatttgatatctgggtcacctaatatggggtcttcttgttgctcagaaagaaataatgggcaatctattatgttgtataaaagttgatcagtcaacagttgctgtcaaagaaagatttggcaagtttactgaagtgcttgagccaggatgccattgtctaccatggatttttgggtctcaactcgctggtcatctctctcttcggctacaacagttagatgttcgttgcgagaccaaaacaaaggttccattatcatctccatccatgtctgaaatttccattttcttaagctgcaagcaacatcataccaaattagtaccttttaatattttgttgtgttctttcaaaataatattttgttgtgtaggataatgtgtttgtcaacgttgttgcatctgtacaataccgggttatcatcgacaaggctagtgaagcttactacaaactcagtaatccccggactcaaatccaagcctatgtttttgatggtatgtatggcttttcaaaatttctattacagacaagattttaatttgtttaaatgttgaagaacaagtgttcaatgactaggttttactttgattgttcagtgatcagagctagtgttcctaagctgaacttggatgatgtttttgagcaaaagaatgaaatcgctagagctgtggaagatgagcttgaaaaggtaaaacatttatcagtatgaagaaaagtctaaaacattttcttataataattcatttttgatgattaaacaggctatgtgtgcttatggatatgaaatagttcagacactcattattgatatcgagccagatgaacatgtcaaacgatcaatgaatgaaatcaatgcaggtaaaatacttagccttgaatattcttgacaagttttaagagagaatttattgacctggtaaactgtatcattatctggcagctgcaaggatgaggttggccactaatgagagagccgaagcagagaaaatcatacagattaagcgagcagagggcgaggctgaatccaagtatctgtctggtgtaggcatagctaggcagcgacaggcgatcgttgatggcctgagagagagcgtggttggtttctccctcaacgtgccgggaaccactgccaaagatgtgttggacatggtccttctaacacagtattttgacaccatgaaagaaattggagccacctcaaagtcttcaacagtgttcatcccccatggaccaggcgtcgtgagagacgtggccactcagattcgagatgggctgcttcaggcaacctcaacctcatctcctcacagtcactcttgaggaatcgatgtacaaaatgtttgtgctgaataagttggcctacttgctaagatttatttagcaaagctctcatcatagactacattatggtgactgaaataggtcgaacaacataccatataactaaaagaatttcttgcttgttttaattattttgtccataactgaatttttgccaaaaaaggaaaagaaaaaacaaagaacacaaggcagtagggaatataaatagccatcaaaattggaaatgaagctcaactcaaaaaccccctccataactggtttcatcaccctctttcaggagtgtgtcaataggagtaatagttcaaaacggtctatgacaccaagaacatttattttttacaacaggaaaaaaggaaaccgccaagaaattaataatgtaccataaagacttgtttcaaggaggaaaaaaaacagaatccacaatttgaattaaagagaagtcagtctgaaatctgaacggactactatgctaagctcctcaatggtgaaccctaccatggtgaccaattggaaataactcactcatggcttgagaaccaaagccaatccaaccttagcactcttttcaatggccttggtgtctacatccccagaaatggtgaagaatgactttggtcgccactcatgctggataagagcactagccttgccaaggttgttcactcgtgctttcacagaggtcaatggatccaatgcgtgctgagcaccaactgtgaatgtattctcgttggatgagaagctatgggttgcctcagcaccaaccgcggtgctagtgaaaggattaacaatgtgatagtatgaggcactcaaggtgtcacctttgtcgtttctgtaacattcggaaaaacttcaattaaactaagcaagaacagattgacagaattgcaaaacatggatgtagtaaaccacatctctatcaacgtgaaatagaacaacattatgaaaatgtgggtggattctccactccagtgaaatacggtcacaaacatgtacgtaaacaaaagaaataaacatcaatactcacacagtcaatgaagctagtaggtcggcattggtgaagctcaatccaccattgaatttggtgaaatttccagtttttgagtcaaatgagacatcagtgccaagtgcaacagcattggttccaataacaccagaaaagttgacaataggattagctgtcaacccaacactggtgcttatacctgcatactcatgcaaatactggagttccacctgtttaaaaaaaggtataaaacggtagtttcagtactgattcgagtcaggtcgtctgctatgtaacatatgcctctagataatgttacttcatagacatccaagccatcattatgccaaactcgcagataaaactgcttaccttgccagatctttgatcaggaactctgaagcttaaaattgttttcaagccaggacaagcttcatcaacagtaacagttgcaatgagctgaaaatagtaaataatttcagtaaaatgataaaaatttcaaatataattaattagaccaactctgtttagaatcatttgcaaaataaattctcatcacactcaataacacttcagtctgagtattaaaaatgtgagtaagtgttgtatattgtcaagaaagctattttgcgaagaatttattagcaaaggccattttgcaaaacactctttgaaaacaaagtgttttttttactagttctccgcattatcatataaaccaagttacaattttgattccattgcttcaattagaaaattgaccatgaacctgtgaatcttaactattatcatcatgtgaagaaataaaatattttaaaaaaatcataaagattccgacatgaatagcaagacggaaaacacatcatatggaaacatagaaggtaaaacgaaaataaactgtaagacatcggggggcttacattggagtttgtgtcaactttgatatcagttgtgatgtttttgttcttaagctgagtgttaacatcagccaaaaacagctcacccttctttgttccagacgatgtaatagcctacagaaatgaaaaaataataattatttagtaagttaaattatcaatttatggcacaaacggtattgaagatatcatcacacgaactaaactaggtttaaatgcgaacaaaacataactctcacaatcacataataaatggatcccttaaatctaaatatgtatgaagaaagcaattacaacaatacaataaccaaaattatatcataaataggtaagaccgatgcatttccccagttctacaaaccaaaaccaattgacaaaacctatatattaaagcagaaagacatgcaaatccgaaaaaccctagcttcgtgattcaatacagagttatatagatcttatggtcaaattaaaggaactcaccactccagttggggagtaggtagtgagagtgaacttttggtcagtctggtaatccttgtagagaagatctagcacaacagaaacaaaaattaataaacgaatctcaaattttagattgagaaccctagtttcagagaacatatatgaaaaaattaaaaataaaaacacataataatacatttgtagagagagaaacgaacctctagcttttttgccgatatcggtgtagagaccaggacccttgcccatatttgccgaaagaagagaaatgaagatggaatttgcagagaataaaaatggcaagggaagaagaaatggtattagctcggacaaccagattttgggttttgcccttttccctaatatatatgggtttcaaaaccctaatttgagctttttttttcaattttcttggaaagggtgaaatttgataattattattttaatttctgttatctaaatgtgaaaaaacgtggagcgttggatggaataaaagggaagacgtagtgattaatctgagcgttgattatgcaaaggctgtggtggagtggagctaatccaagtgcgtttattatgacgtgggttttgttgaaattagtaaaataaaaaataggtaacggtgacggtgacggaagccttggcttcaccgactgaggaggagagaatagaggtcttgccgattagcctctttctaatctgccgtcactagacatgtcctcacgtttttcttttatcagatttgtgtgtttttttttaaaagggaaaataatactttaacacttaacagattataataaattaattttaagaatacttatttatttatgaaaaattttacaccgttttggtattagaatttttagtttaatttttttataattgtcaatgtcaacattttatggtgtgtttggaaagtcaattgaattgtgtattagaggtaattacacaatttggcatctgaccatgtaatgacaatgtaattgaaagtaattgaggggttccaattacactttccaattctcataggcccatgagaattgaatgaaattacattgtgtaattactaaaaacttttcatattaaacattagctactaaaaaatattatttttccatgtcattactaattattttaccaaacaaaatattaaaaattcacatgtaattaccacctcatatccaaacacatcttgcattttcaaaatatagtgtaattactaaaactgtgtaattaccactctaataatta

SEQ ID NO: 379020 - DNA, 1899 bp, Cannabis indica
tttttttttttttgaatgcagaatgtatttatgtattaaaattaaataagtattgatgggattgattcgacaaacataagtatactgtatattgcaccataatttggctatggatttacattcccctgtgtcctttgtagtattctacatataaacatacaaacaaaatgctaaagtagtttgaggaaacatttaacttgctccacccagttccaaactgtaagattcgttctaatgttcctcatattctatctttggtcagttgtaggtaattattcattctaatagttttatgacatctacaagaaaactttgtcgatttcaacaagaacctctcagtaagtaccatgatcgagcacatagttcttcaattacaaatgttttcctctttttcaggaaaattgtgctaagaaccataattgcagacatttaattcgttcaactacataaattaacaccatgaaatacgaagattcaactaaaggatccaacaacaagaaaaagaaagatgtttgcagcaagaaagatagagagaatagcgaaaacaaaccaaaaagctcgcaagcttgacgaacacggtgaggcggccattgaagatttagagggagttcgagcaatttctgccagaaatcggaggatacggggaaggacttttctccaacgaaagtagcgatcaggtactccgccgtgtcctgtggccgtgcgctgctccagcgcggggttgaaggcacggcccccattggttgagatcgttcagccgaataaactcgactaggtcaatgtggtgagtgtactctaatcaaagtggcccgagtccgagggatctaaggaagagtcgcgcttgattcacgtaaacggcattacatatcaaaagctagaaagcgatagagatcataaggtcagatcggctgggttcaatggagatggataccgaagacagctccgcgaaacacaacaatggtgatagagagagaaatagaaatggagtgagaaggacagagcttcgtagagaagttttttagagcaatgtttagagagagaaaaatgtaaacagattaggctttgggtttttagaacgaatatacgtcattacgaagttccatggaccattttgtccttttccttctcctcaaagctttgttaaacctttattttcataattaaactcgtcatttaatatttgcactattatatttttcagtcaaagtcatctcgaaactccttgtgtaatgaatgcagcaaaataaaataaaatactctaaataatttcagggttttcagatacttttaaaattatacatatttattaaattgaactaaataaagattgataactatgacaaggaagtgcttctttttgttaaaatgaaaaactcgacaatggttatagttactgttggcaaaacggtatgatatgattatcacacgactaaaaattcattcgaagaattagttgatttggatttaccttaaatgagttcgagttgtgttcggattgactcgtttaatacgaaactaacatattaatctaggacttgggtgagagagggaggaatagcatagaataaatcaagtagaagtgcagttcctatcagaaactaacatattaatgacttatttaaaattattttagtattttaatatatcataaataggttacaaacgtgtaatactttataaaatgtattattaattgataaacaaaatatgcttataaattgattatataggttgtatcgtgtcaacccgtttataaacgggtcgtgttcgggtcgagcatatatctattatacacgagtctcgacatgatataaatacaacatgcgaacacgaattgtcaccccaagtaattgttgggattttatgccctaaataaaactcattacaatctaatctgat

SEQ ID NO: 379021 - DNA, 2081 bp, Cannabis indica
aaaattatataatttacgtattcatttttgttttgtttcttatttttcctttaatactataatttcttttgccatatatatctcttgtgattaagtttctttactatttttattgtattgttcattaattaataccatttactttaatcttgaccattaacatatttttttccgggttcagaatatgcctacaccacgactctgagtgaaaagggtgatgtatatagttttggagtggtggcgttagaaacaatcatgggaagacatccaacagagattatttctttgatactttcaagaacattattgtcttctaatactcccatcattatgataaaagatgttttagattcacgtctatcacccccaaatggtaatcacattcttgcctccaacattgtcttggtagctacaatagccttagcatgtctgtgttctgaaccaaaatctcggccgacgatgatgaatgtttgtcgatggcttcttcttccaagaacacctctgctgcgacatccttttcattcaatttcactacagcagctctttaaccaagaaatctataaaatagatgattataagcgctagaaactgaaccagaggcatatttatgttgaagccgaagaggcacactcttctatgatgaaatatagtttttttttttttggttaattattgaaaaatggctaaagagggagattaacatgtatattgttgttgagaatctggggttccatctcaaaaccaattggcaatgagtggagtagtccatgttcttatatatagctcaatactttcacatttaattcatgtgagacaatattctccaatgtccaatacaattgactcaaaagattgattgatgtgtgaagttggctcctatttcgactaatgaaatgacttcattcgtattagtgctgaagactattaatgtctgtcataactaactgttgtgaagactcaccagtaatagaattatcaggtaattcgttaactctatttataacccttagtactgatcaacctaataattagacaaataataacacagcttgtatatatatctgttaacacacttcaagtctgttagttagttatttctgttagttttctgttagttagttagtggttatcaactgttttctgttatgagctaattgctctgcttttgtatctgtatatatactctcttcttcagttgaatacagtgagctttctttgcattctctttctctcttttcttttcttttctttgttaactcgaatcctgcatatctccaatggcgtcgaaaggatcagttactcctctcttggttacgatcatcaatgtcagaaactgttcttgcatctgttgcaaattatgatacctcctactctgtttggcgtgcgcttgaacagaagtttgcctctcaaactaaagccaggcgtcttcaacttaagggccaattttctcatgtgcataagggcaatctctctatttctgagttctttgacaaagtacaatctatagctgattctctggctattgcaggagcacctgttgatgatcaagatttaattctacagctcctaaatggccttggccctgagttcgattcagtagtttctggaatcacatcaagaagcgacaccttgtcgatcgaagaagttcaggctcttcttctctcccatgaaagcaggattgagcatcatctagctatgaatgagctcaatgtcaaactgcaggccaatatgactcttggtcaaggacgatcctcaggtgttcgatcttttgcccacaacaatcaatccactgcacctggccgtggcagaggtttttccaagtttcccactcagaaagttgtttgccaagtttgcatgagagttggtcacactgcggctgtgtgtcactatcgttttgataggaactggacaacaccaaaaccaggtaataatcgtgctttcttgactgagattgattgtgaatgtgatcctcaggcctatgctaccacaatgatacaagactttggcgaggacaactgttggtatgttgattcaggagccacaacccatgtgactttcgaccctgcaaatcttgatgattc

SEQ ID NO: 379022 - DNA, 2155 bp, Cannabis indica
acagatcctaaaataaactcaaaatcaaaactacttgaacctatcacaatatctaacaaagaaaattatcataaaacatattatattatccaaactaatctggatagattttggtagaatatttaaataatacaattcaaactctgaaattacagccaaaaaatcttacagaaacaaaaaatcaaacagttaatctacacaagggaaagtaaaatcaaagatacaaatacaatcaaatcaccaaaccatgaaatttcaaagataacccaaaaacaattaagttgaaaaattacctcataagtataaaaaaaagcttatcagaaagcttctcctaaattcaacgaacttggcaaaagaaacccataaattatttcagagccgcaacagagagaagaacaagaacaagaacagttgagtgagcaataataaaaaaccagaaaaccccattaacctaaaagacaaacacagctacctcaaaaagccaagtgggtttatctgaacaaccattaaagaaagcttagatcaacctcaaaaataatatttttatataaaaaatcaaaaaaaaaattcagatttgctgagccagaatctgatgagaaaatagagagatcccacaacccagatagaagatcttccctatagaaaagcaactcatgacttcttcaagaacaacaatgacttcaattttgtcaacttgtggtctgccattattctatataccttgctttctctaataaagctttcatttttattttttattttttatttttgaaattttatatttattttatatttttatttttctggttttttgaggatgtgaaagatatgggtattgtttttattaatattataattattaatttccacattttctagattctctccaccttccatgctttttgggtacacatatttatatattaggaaagtacttaagaaaatatatagacacctgggtttactcacccaacaacaacctaacactaacacacttctccaatctaactaatttagtgtcggactcagaattttaattaagttaaaattaatgtaaatttatatttttattagcggagtttagttgatattttatttagttgtaatcaataatgttagatacatatttaaattgggatcacattaatattaattgtgtggttcagattaattatactttgttatgtgcgatttgagtgtgtctcaatcattaatagtatctgcgttcttatattataaatgtagtgatactaccataattgatgatcttgttaaattacttttatcttcagatcacgttatgatttagtagtcgagtctttttaacagcacgtgagtcttgtaatcgtttttctttttataaataccgtttaatgataatctcatttctttaaaaagaattgtattttttattgtattaactataatttaaagtaaatataaaactataaaaagtttgtggggaaacttatataaaccactatttatggtaaaaaaattataattttacgtttaaattttttatatatatttttatgatactttataaagacacaaaaaaataacaaaaaaatcacataaaaataataataaaataatatcaaaacataaaaaataatatacaaataataaaaaaatcaactaaaagtacaatataaaaatacattaaaagaccacattttatgtaaataaaactctatgtaactgtatttttataattttttttattatttttatattttttttgaaataattctaaatttgaatctaatgattaaggtagtaaatatgagtcttaatggtaagagtttaaattttttttaaaaaaatatcacttttataattaaaaatacatgttataattaattaaaatattatatatatttttagggtcggttacacccatggtctctatgtggaccctcttctcttcactagacagtacattccacgcgctgttttactcgattgagttctgtgtctctctaaagtacattaatactgtactaagttatcaactctaattgtgacatctttggtttgattattttccacgcgttttctttagagcgtggcttaggattatttcctttctaattaaaaaacacttttttagtatagtaaaaggaagtttttttaaaaaaagaaaaaaaaa

SEQ ID NO: 379023 - DNA, 2127 bp, Cannabis indica
gtcctatatttcaacaatatgaatatcaccaaccctaacaaaaactaaaaatacaagatacaaagttcaaccgtttaactcaacataaatagcgcactttagacaacgtacattaacaggacatttattttatttttactacttttaaacggaaacacgttaaaaatcaagacctatggacaaattaaacctacaatatttcaacacatttgcacaaaaagcacaaactagcaattcttccataagagaaccaaaaccaaatagagaaagggtaatgaatcccaaaaattgcattaaggtccttcacttctttatgcagatatgggtattctctcttcagaagaattcacaacggtcctatctttgaaacctaacatcttgtttatcgcaccaatgtaagcctttacacttgaaaccacaatatccattcctgacccgttcccactggcaaaagaagaagagaattcatttcacacatatacacaagaacaattgtgtcaccaaacgagaaacaaccattaaacatgcaaatacctaaatgtccgagtaactccttcaacagttgaaccatgactagacaagttgctcttttcctctcggattagcacacgggtggttgcaattgcatctataccttcagtaacagcattcattgaatactccaggagtgctactggttcctgcacagaacacaggtatacaagacaccatcaaaaaacatggtgtgcacagatatatagaaggaaaacaaatttaatatttataacataaacaaaataaacaattgacttttgaggtatcaaatcatcagcccatatcaatgaaattcctgttcacttcaaccaaaatcatgcttactgattctaacaatgaattacatactaccaactatgtccttgtcctgcaatagaaagacttagcttcttaaatcagcctcaacattcaaggacatccacttaacgtcggtcaaaatagtacaataggtcggtatcaaatttagacacacccttgcagcaatcatatgcacaaaataatacagaaaagatttatcatttatttttctttcaaaccttcacaatcagatcaacagctttgtaagccgagtccactggaccagttcctactgaacaagcaacatgctctttcccatctgaaccaataagtttgacggttgcagttgaaagaccaagagttccacatgtaacctgtgctacgttcacatcatttggtgagaattttccctttaaaacttataatttttttttgagcgctttaaaacatataaaattagatgataagaaaaagcaaagttgtgtctagattcacctgcaaatcaacaaacttccagatgacttctggttgaaaaacttcatctgaaactagtgctctgaggtcagcatcagttatcctctgagattttaaattaataatagaaggcaacaattaaaaataagaaaacacacaaaatagcatagctgatggtggcaagtctagtcactttttaaattggccaagaagaataagaccatgcaagtttaaatacaaaataatgcacagagcagtgttatggatacattaaacaatgggttctcttcccattcagatccagaactcattacaaccaaacaacactactgagacaagtaaggatgtaataaagcaaggagcaaaaacaacagaaatacttttgtgcacatagttgaaatttacagcagtataaactaaataataaatacagaaaacattacccatttaaacctaccttcttaagttcagccacagatttgaagcgccagaatatactctcaagttgctcatcctcaagctcataaccaagctataacaagagcagaaaaagaatactaaatactaatcccatataggtaggagtaaggtaagcagactgcaaagatatgagatcatatcatacctcctcaagttgttgtttcaatgcatggcgaccactgtaccaaaaacaaaaagaaacattaccagaagaaattgagtttgattaagaaagattaataaaaaagaagcacaaacagaaaaactagcacccgagagcaaaaatatgagtttaaaaatagggaaatttatagctttgcatacattatataattttattac

SEQ ID NO: 379024 - DNA, 1962 bp, Cannabis indica
gagagagagagaaagaaaaagaagaatggcgaggaagaagaccttcttgtatttaggtctctcacttttgccagcgccattttgttgggctagtaaaagtcttatctggaaccctaagatgaaacatagtgtttcattaaatagttcaattttgttagcacagttatgcgtatgcaaaactttgttcccccaaaaccaattcccatgcaagaattttgcccccaaatttttggttacttttgccggtgcagttgcgcgagagtaaaactttaaccttctctagtaaaactattttatggaggaaaactcttcaccaaatttttttaacctttatattaaaccacaaaaatgtgatatgctttttagcggttcctactaagctttttgttagcacaattagataaatacgctgggaaaaccgtgatttaccgtccaaaatatacgccaacaaaaactaaacctaactaaatcagcgattggaagctacttcttttgccggcaacctttacaaacgcgtttaaccaactactcggataaaagtggccattcatgtaatgattttaaccgtagataaataaactaatatatatatgaagagaccttgacttccaatcgtactatatagtttatgcttatatgttttttttcttttttgtctttttacttcgagctttgtgaaactaaaagttagcatattgttcccttaatttactcagacttaaaaatagtgcggagtaaataatgttaagtggacatttatattgctaataagatataatttcatgtcaatagaatatttcgtccacttaaaaattttatgagcaagatattaattcgttactactagctatagctagtctgtgtattaattatatacatatcttattaaagacaaaacataaagtagtaaattgcaagagctatcatttcttgtttgacaaacccaaccaaaacatgagatagtttatttaatgaaagctcatagtactcatctttgacttgaagaatgtctgcatgtgcagttcatgtgttaagcatagactaaagttttgaagcagtccaattattaattattaacaaaaacatggaaattaattagttatttcctagctttactaattttgtatatatccttgtttattcatcatatacatatatatgagaggtgggggtcaagctaagctgctttgataggtcagaaaaaggagctggtaaccaaactttccccaccaatatcgatattttttgtaacatattttttaaataaaaaatttgccccaagaaaggtgaagggggttgatggtgacgccctttttaaaccataaagtcctcctagtaggaaaggagggaggcttctatttgactatttcaagactatgctgaagccactaagattatcttagcggtgagggaaggataaaaaaaagagagatcatgagttcgaactcaagacttttaagctattatttaattggaaaatatcattaagttacactcaaaaaaaaaaaataaataaataaataaaaatcaagattgtgctgccctggccctatatttatttacagaccatcgcaatcgccactaagggggcttcgtctccaggagccttcttcaacctccctccagctcaaaaaatgcgagattctgacggtagtttgaaggggtttcgatcataattaaatttctaatagatctattaagggaatgtgatgcgaaataatgaatgaaccaaaagatatgacatgatggtcgaaactaagaacaaaaaccgaaaatttgaagtcgaacatatatataaggttcggtcatgataataaaggctcggtcatacataaaattaaaagaatttatgctagataaagcaagaaaaaaataaacatgtaacaaaacctgttagaatttggaataaagtaaatgaggttttatttttttttgacttttggctcttggattaattttttt

SEQ ID NO: 379025 - DNA, 4715 bp, Cannabis indica
tttttttttttttgatcaagaaataacacaaaatacaacttacagactcttaatgatcttttcaatcaaacaatatgaatgctcaattctagtgatgttttcctgtatgtacactaggttttgaatcctatacctaatcaacatattagtataatcaatagaataagataggacttactattgtttgtttgttcaaccaagtagagtacaaaataaaattaaatacaatttatttaggactcaattgtttatggatttcatttcaaattaattctgtggtcatctttatggtttggtttggtctttagatttttttaggatcagcatagttattatgggtcttgcttttaatctttttttaaggggtttttatattaacttcattcctttactttgtttattcattcaacttattctgacacttgattttttttaagttgattttcagtagttgatattgtatattttgcttcagctcctatggatgatcattttcatgttgtttcgtgtttgttaatggtattgatttatgcagccctagctcaaattttgaagataaagttgaggccaatgatggtaattcttcagaagcacctgtgaaattggatccacacatagaaaagaacaagtacttttctcattcccttttaggctttatatctctactctcaattgcttgaattcaatctaacatggctgaaactttttataataaatatgaattaatctaataaaattgataattctcagttcttcttttcttaattgttgagttcatattaatggaagtaattgcgttttcagcagattggtggtgaagcatggcatgaatttcctcacaatgcattttgttaaaccttagctttttaattgtgaaactcttatagttttctcttacaatactaattaaaatgattcatttattatttacaaagaactagaaaaacaaacatttgtatttttgaaaactctttattcaacttatattggaaattcttttaatgtggattatacatgttctgctatttaacttctttgataatcaatcttaatggaaatctttaattctatttaaccttgacactttcatttcttacatgcatttttggaattatctttattctacacttatttagaacaatataattttgattattagctgttttttcatttgaggaagaagtatatatattgttacaccctttatggatcttctttttatatactttacgtatagatataaatatatattaataagtgtttcttccttgatttaaaactctctcaacctgttgggattgggatgcaccaaacaatgttgagtctgatactttgaacactgagaaggtagcagatacagaactaagttcttgaatatacgatacagagcaataatggtggtgtccaagaaagttcttaaaacacaactgctagaatatgggaataagcttgtggaacctccgttgtttgtcgatgaactcattcctcttctcgacagagttgagtgttgtctatcaaaggttctgcagtctccttctgaatcaatgaaaaatgcactttctccgtcattgaaagcattggttgatgaaaaacttttaggacattcaaatgttgatgtcaaagttgcagttgcatcttgcatcagtgagataacgagaattactgcacctgatgttccttacaatgatgtccagatgaaggcggtcttccagcttattgtgtcatcatttgaaaatttgtgtgacaagtcaagccgatcatacacaaaaagaatctcaattcttgaaactgttgcaaagctcaggtcttgtgtcgtgatgttggattttgagtgtgatgcattgatcgtggagatgttccagcattttctaaaggcgattagggactatcatccacagcatgttttttcatccatggagacaataatgactcttgttttagaagaaagtgaagtaattccaactgagcttctcagccctatactagattctgtgaaaattggcaacaaagatgttttgcccattgctcgaaaattgggagagagagttcttgaaatatgtgctgccaagcttaagccttacttggtacaagctgtaaaggacctgggtgtttcattagatgactacagtaaaattgtatctaccatatgccaagatgctgatgatggtaatgttgagcagaataaagtccaagcttctgatgagaatatggtacttatctttgtattaagaactgtgatttcattgcttattctgtgaaaaaatatatcttgtggtttgtatgaatttatcttattcttctatggaaattgtttagaattctttgtgtttgatttttccttcttttgttcagcaaagggttttatttgatgcatgcaatgttgtcatgttatctcactttcttgcactaactgtatcttcattaattttcctaactccttagttctgttattgtgactcaattatacacatgtttttgcaggttgttgagaacaggtcgacgaagccacccttggataacagatcccaggcatgtcatctttctactttaatttaatttattgagataattgtgacataagtacttacaattttgagtttgtaagcagcacgagtacttaatattaataaaactgtaatttttatatagtttcgtcagtagagattctattttaaatttattaaaagaagatttgaaagcaatttttaccgatttctctttgctgaagctttgagattaacttaaaataagtcttacccaacttagtttcttatgcaggaggataaagcgggaatcccagaagcagcgtcattagaacaacctctattttctatggatagatctcctcagtctgcaatgagtaagggtatcaccaagactgcaggagatgactctttggctgattctagctccctgaagaagcaagaggatgatcagagaaccgagagtaccgaggatttggatgcaccaaacaatgttgatcctgatactttgaacactgagaaggcagcagcagatacagaatcaaagctagagcagagcaataagaatgttgggggaaatactagtttgtctgcaaactctactccttcagaaagtcctcatgttttaaatgagaaggaaagtgctgataatgagaagaaaatgcagatgatgagaagaaaacttcaaaaaatgaagagaaaagtgcggataatgagaagaaaagcgcagaaaattagaaggaaagttcagaaaatgaggagggaaatgcagacaatggaaagttcaaatatggtcctcatatatttcatctcttcctgggttcttttgttgtttctgtgtttcactaatatatttcatttttagtccaattacttttttgtaattggaagtattttaactgcttttggatgtttgacatcgataatttggagggtttgaagcactggaatgattaatatttaatggtcgattattttactttcatggttatgaattttagttcttagaggtattgtgtgctggctcaagatcaagatacttgtttgtaagaaatctgtcttttatttttatttgatagcaaggattttttggcatgcttatagtcctgagagattaaatatcacctcttcaaataatgattggttttcaatacatcaataaattgtttctgtaaggattatcagacaccatttatcttttaattagtattatattgtacattttgagcctaaattcttacagttttttttgggtaccttctcaaaaggtctcattccaatggagatagtgttcatctttatttggctctgataccacttgtaagaatcgtcagacactatctatttctctattggtatgatattgtcagctttgggcctaagcccttacggatttgtttttgggcaccttcccaatagacctcattctaatagaaatagtgttcattcttatatacccaagatctgtcctatttttagccaatgtgagactttggttgtacacccaacagtttttttcatatttttcatgatatatttatatgaactattattttaatcacaaaacattcaagattaacatattaaggttactaggttagctcaactttcctttttgtagctgagaaaaattaatatatacaagtcttcaaatctttttatatagtaagaatctatccttgttcactcatcaaaatatgtttctatagctaattttttgtttttcttagaccattttcaatgaatggtatatattttggattaaatttggctaaaaatatatcataaaattatatttagctaatttttttgtatttgtgctccaatgcacaaagtacaaattaactataaaagtcaatattaccattaatgctcattcaatatattcaaaataattaatttcatttatattattttaatactttataaatatatcttattcaaagtcaatgaatagtattaataagtggcaaagagataattaaaaaaatggtgaattgcggcataaatacctaatgttacagattttatacacttaagtacttaatgtttatttttagaggcaaaaatacctaatgttacaattctcttacaccgttactaccacttccgttaacttatcataaatatagacatgtggagggctcaaatgcattacatttatttattttattttaaaatttaatattcttaatatcaaaaactaaatactacttgtttaacaaaaaaaaa

SEQ ID NO: 379026 - DNA, 1383 bp, Cannabis indica
taaataattaatatatatatatgcgtgaataaaatccttttaagattattatcattgtcgtacatttgttactataaccgagctatgttatacgttcttatgtataccattacctgttcatgatgataattatttttcacttccagtgtcatcacgtaaacaagtgtagcaatacaaaggggacagtatctatacttacatatacggcacgtgcgtgcatgcacgtacgttcaattacattctactatatatttttgtatgttcctaaaattaccataaatatttagagcattgtaataaattttgagcagaatcatctgtagagatgacatggagccagctgatctaagtatatattaattataaattcccttcattatatttatgcacataagtactgcatgtgtggtgaggaaaatactttctaaaataatggttttcggtcaattactgattattgtatatattggtcccacttaaccaccatattctttacccgtgaaatatattttggcatattgcggcttctttttaatgagtaaagtacaatcaaagagtgcaaaattcttgactagttaatagttattatatatatatatttatatatattcattacattcatatttatatttcaaattgattgaaaacataagctaacataattaaaattaatgagcatataatcagggcgagaaaataattcaacataataaagtggacatgtgagactacatagcccttatctaattaataaattaattacaagtaatagattcttctttcaagaaatataagaaaattatttatcctatacaacaaagctaattggccaattaattaatggttcttaaatagctccatcataataacttttcattattatgtgtgcgcatatttaaatataaagattgagaaacttacaatatgtgcagaaaccgcggaaggggccaaaatgtaataaaataactttgaaggggttaatatataaatataaaagaattgataaaataagcggtttttttccttatacttttattacatctaaactttatttttttttacctccaagtacaaaataaaaaaaatatataaaataaatatttcttttttcaaaaatacgatctctacatgagaccttcccaaaatggtttcttccaaaaattttaaatctgaaatcaacatggacatcgatcacctccagaaaatcctagatctccaagacacctgtagaactatggagtggtcgtatacctagtttacgctattataggatctcgaggtgccctaccaggcccagccctgggcataggcaagctaggcctgtgcctagggcccacccagcccaggggcccaaattttttttttcctcttttaaaactatac

SEQ ID NO: 379027 - DNA, 3046 bp, Cannabis indica
acttagtaataatataatatctctacaattcctattattttgcaactaaaactaactaatccttatttttctcgacactaacgttagtattctgattttttatctttacttgatcatactaaaatactaagtaataatgcttaattactcgtataccaattgaaactaaaacacttaaaaaaatgtttcaaaattcaaaaatctcatctttttcttcttcttcatctctccacaaatctccattgcagattcaaaggagtatgtccactgcaccaagcaaagtcctttcatcatggtaacaaattttctcatttacttttttatttgattaattatagctcaaaatatttgactcaaaaaatattatcttcttcttaggattgccaagcctatttcttcttcatatgatattgagttatatgtaagtaattctaaaaccccattaagttattaatactctaattatgattatgatgattttgatttgatttatgtgttaatctttataggaagttttggctacaaaatgtgctaacattgattcaattctcaaaaatggatcatcacctaaagatgttactcaatttcttggtgaaatcactatgaattcaaagactttagagcttgttataagcttttgtcaaggctatgaaattcatatctcacaagataatgtgattcaactctattgtgttgctcatcatttgggaatgaatgaaactcattcaaaaaacaatcttttgaaaagggctcttagttatttcgaaaaaaatgtactttctagttgggatcaaacactcaagtcacttagaacaattgacaacaacattcttgatcaagcaattcaacttggtttagttggtacttgtttgaattccctaattgccaaggctctcaccgatcctcgccttctcggtgagccaatcaacaatgatgaaaacactaatgatagtgatgatgatgaggaggaggaagaggaagatgaagagtggccaaaagcaaaaagaaggcttttcggtttgagttggcaacaaaatgaggatcttactacattgtcactcaaactctatgagcctttaatctatgaaatgatcaagagaggtgttccattaaactatgtgacatcttcacttcttaactatgttaagaaaagggtgttaattcccactatgacagagagaaattcagagaaagaaatcattgaagctgtggagaaacttttgccaagagaaagaggactaatcataattccttgttctatattgcttgagattctaagatcagcaatgttattcaatgctagcttggaatgtttagaaggtttggagtttagaattggaacaaatcttcatcatgcaagtgttaaagatctcatgataatctctcaaaaccgagttgacattgattgcataagaaggattttgaagcatttttatggaaactactcaagttctcatttgacaggtttgattttagttgctgaattatttgaagaattcttagctgaaattgctagttgtgatatagatttaaagttagagactttcatggaattagctgagttatcagttagtttatcaatgggaactaatagaaactcagatggattatacagagctattgacatttacttagacaaacataagtacttaaccgaatcagagcgagagaaagtgtgtcaagctttagatttcaacaacatgtcagaagaagcttgtgatcatgctgcgaaaaacgagaggctcccattgagagtgacgattcaagtattgtttgtggcacaattgcaacttagagagtcaatcatgaaggaagttcaaggttgtcaaggtagcgctcggtttggggagaaaaaggaggaagaagaagaagaagaagaagaagaggcgagattggtgtgtggtgaggaggagagtatgaggattgagatggagaagatgagtatgaaactagttgagcttgagaaagagtgttgtgttataaagaaggagattgagaaagatgagagtaagaagaaaaagaagaagaagaagaatgagaaagagaaagagaagaaggtgagtttgtggagagaaatgaagagaaagtttggttgtgttagtaatagtaattgtaatgtgagtaatgattcgaatcgccatggaaagaatcagaatcaaaatcagaatcatcagaacaagaataaaaagaagaaagtgtaataattagaaggaagtgaattgtttttgcttagttctttaattcatttagtataataatttgtttttttttttttgctttcttagagaaattaagagctctaagatgaagaagagatcattaagtttgttaagtttattatttttttttttgttgttgttgttttgattgtttaaacatttggatggtttttcacaaacaagtgtcttcttttgtactttcctatgattatgtttttaataattagcatgcatttatatctatactatagattttcattatttatataaattttttccatctcattgattgttaaaatattatatagtatcattactcaaactatacaagagtacactcatatatatatatctcatattttgtttaaataataataataataataaatcatatttttaatttatatttttttgctagaacattataataatatatttaaataatgatttagcaaagcaccttccttttgtccaaatgaagaatgatttgttttgaattttgatatgatatgcaataaacaatttaaatataattttaacattcaaaattgtttaaatttattaaaaattataatatatatatatatgtatatatatatattacaaatttccttaaaaatgtgtaggagctcttgatcaattatattatgtatccctgtaaaaaaaaaaattagggttgcaatttatcaaaatattaaaaagtattttttctttctcagaaatagcttaaatatgaaaagaaaaataagtattttttccttcacttatttttttcatttctatatttttctctctttgctcgtctacaacccaaaccgaaccacaac

SEQ ID NO: 379028 - DNA, 2444 bp, Cannabis indica
ttatatgaaatttttttagaaaacaataaaaaatataacatgatttagaaaaaaatatgaaaataaaattaaaataaatattaaaatttacataaaataatgtgagaaatttctttcataaaaatattaaaagtattttttaaaaattattaaaagtttatttttttttaggttaattagtattttttgccctctcaactttgacatctaggaaatcatactaagttttaagaatggtcaaaatgattctaaactattgagattgttagatttcagtattagttttattttttaataatagagtgcacttatcatagagcaactagaactcctcaattaaactctcctccatttctgatatatatgaaaaaacccctacttataattgatatcacgacgcactttgtgccctcgttcactgttcggatatggagatcggagagtaggaattcctttccaatcattggccgtataatcaactacttcactcactacaggtactttacttacggtttgagactgctaatgaggattaaatacaaagaaatgatggaaactttttctggttgtttgagttttctcaagtgattctctctgttttgtatagagttctacgttgccattctacagggatatgatagcgattatccaattctttttcttttttaagttagtcaggtttgtcttagtttatagtgtttagttccaagatttaggagttgtgtatattattgtgtagattttgttctaatctggatggttcgaaattttgttctcaatctctttccattttgaaacgcaagggtcaggccaaagaaacattgataactttctgatttatgttcaataaaagaatttctgtttcttacatgtgaatcccatttgtatggtattccttcgtaaatatattttttattttcgtactgtgttttggtttgggataattctatatctttgtgttgatgaactatttggtgacattgagaaacttggcttcaaataaaatataaattatggtgtttctaggcaatttgaattgtaattattttaactactcatagggacaatgagttacctggaacaattttgtgttgtcgattgattggagagataatttatagctgtttcaagttttatatccaatttaaaaggagaagcaaaataggcagtgcttcattaaataggttaccaattaatagcctgaagaagatttgaaccaaaatggacaatgcttggtaccaagtattaacgtgttcaaaaagttgtgaagaattatgatttattcaattgttttagctaacctaaaatgagtatatgatttctaattttgaaaaattgcataagcgtacagtgatatttttgatgtatctttgttttgtattgttgagttattagcttttatatatcagattttggagtggcttgaatctctcacattgttgaatagaattgtgagttttcgacctgcaactcttttaaattgatcagttattttatatcagttccaggcagacctaatttatataacctaaggtgtttataaaaattgtgtacttttaactaattttagcataattcttaaactgagaataatgggcaacctaaactttcctttatctgtactcaatcaaacgaagtaaacacctaaatgtttataaggatagcaaattgaaaataaatgtacatagatacatacttattgaacaagcactctgccacatgtctaattcaaccttctttaaactaaaatttgttgtgttatgtattcttctgaatttatgctcaatatttgtgtggtgaacgagtgataatttagaatctaaaagatagtgtcatttcaagaacatttttgaactgaggcaaaaaatattttgacacactgaaagtgacacaaaatggttttttttcttgtagtgactatgtgtatgatctttcttgttcttaaaaatataaaatttgtatgatttcgattatgatcatacataattatgtacaccaactgttagattaaatgcttcattgattgtatgatgattttgggtgggttttatgacttttatggtcacttatattcttggtttttggatttatcattattggttctttgaattgagtattttctcattttccatgtttccatgttttcacttttatagtctgcattcatattcttttgagtttattggattagggccttagcgttactggaagtcctttttttttggtggtatagttctagatatactgcgtaatataagcacaaacgaaaccccatatggtgattatgatgttatgtattatcattcaatctacgttggatacaactacgttttattttctgcccagtttgaaggtcctaatgagttttatttattggctaattagaattttacctcctaaagtttaacatgtaccaaatcatacccctgaacttttttggccgt

SEQ ID NO: 379029 - DNA, 4950 bp, Cannabis indica
tatagaagtaaaaagaaagaataaataaaaaaaaaaaaaaaaaactttcttgattctttattgctgagtatcatcacgacataatatcaaactagttcaaagaatagaaactattttacatataaataaatgggcttagcaaatagaactcttaatgaataaagctggaaactgtcttgttccttgtccaaaacaaacaaggcattgctaaatttccaggaacacacaacaaaacaaagttgatttcatcttctaggagtaatatctgaaaatgaaaaatcatgggcaggcggacctgcaacaagataaaaaatattgaggtatatcatatccttaatgattattagattggctgccattatttacttcactagttaatactttcatttagattggctgccattatttcaatatttggtatttttaaagggaacaaatagttgataaggcttttaccttcttgtgaacctagaatataaaatggaatatgtgcaatcatctttgtcgaaccatcactccacttcatagtgcctggattctgctcatgtacattcgaaggttgtgaaggccccaagattgacaacgaaattgctggttcgttcattaaacccaaataatcacgagcacgccttgaaaccctagcatctgaaatccgagatcgggctacctaaggaatgcacaacacagtttgactggtgcgaataggaaaatttatgtgtactacacgtgtgaactgataaagaatgtgtaaaacaattttcagacctttcccaaggaaacacgcgccctcggtagtaactcacgatggtacgtcgcaagttttgctattgctgtaacaacaaaacatagaagcctcgactgtgatgacttcctgatgatttggctcgaggatccatatgcagattcccttagtcctactcggctacaaaaatataaaaaataaataaataaaagaaaaagaaattctaggtattaaaaaatccaaccaaaaccagagaaaaataaaaaaagagaaaatatcaacaaaacataatttacacctagatgtaagattttcatataagagtagctctaaactctcgaaaagctcacgagctgcgtctttgtgagacgcaccacccccaccatgctcccctatggcccaacacagctgcaaagctaactcggcctacaggaatatgaaaataatgaagcaattttttcaacacagttacaggacctaataaccttgactaacaaaaagcaattcactaaccttttctgggctatcataggcttctgcaagcctgtccattatgggcttctacaaaaggtattaactagaatttatgattttgcacaaggaaaataagaagattttaactgaagaaaacataaataaacagaaatataccttcagaagtgcaataaaatttggtgaacgctgaaatgaagaaagcatgaattctagaaacctttttctaacctgcagtgatacataactcgtaattataacatcgcactgattgaaatttttggggattataaaattttaaaaattatattcacattagaataatactgttagctgtaaatcatatatatatatttcgttgcccaatagcttgattcctagttttgtataaatgcatcagttttcaatgaagttaaggttgaatatcatttattttcatcaaacataacatggtattagccggcacagcaaggaagcccagccctcaatctccacagccctgaagtccggcaaccacattcgtcgcaggtgggtcccacgcactgccaacaacaacagcatccttcccaggcacatggaggcgcatgacaatgccttttcactagtgatctcctttaattccattcctcttctacaatgacgcttccctacttcgtttagggtggttgactctcgcaattttgtatttgttcatgttttggttgttggttttggaacttcacctattttgcctcatttttcctatcttcttggtgcttggttgagcctctctctttttgctgctttgttgggttttgtttgtttgtatttgttcgttttgggtggtttgattcttgcaactttgtatttgttcaagttttaggtatttggttttggatttctcacctactttttctgctttaatgtttggttgagcctctctttgttttcactgccttgttgggttttgtttgtctgggtgcttgtgatcttgttgatttatgagttacgattttatttttaaaaaggaaaaaaaggccacttgtcttagagtcgccccctcccactatgtatagataatcctcacttgtggaagaagaagaccatggttacataaaaggagcttagcaaaagagaaaacagattaccacaaacaaaggagattctacaaataaattacatcaaagttctctccaaaatctaaccctctcccatatttcttctacttaacattcaaccccttcaaaaattctgctattttttttccacccacttagcttactatcatcagaggtaccgagacaagtattacccatttaacatcaaactcattcggcaaaagaatccaaagtgtacgaaaaactacactccaaaaataggagtaccagctcttcttcacttcttttacaacaaaacacaccagcccggggataaacacaaaaatgaccttctcttttgcatcatttcgtgcacatttaatttacctagagccactaaccaaccaaaaattatgactttagaaggacctctacctttccataagatcttagtccagcacaactctctttgattctgattcgcaaggaaccaatcaaatgctgatttgcaggagaaaacctcactcattggaaagcgatggtgactagcatatgagaggtactaaactgaatattgggaaacaaagataaacaagtatcaaagtagcccgtgaaatctgtagcttacatcattaagtttaaatcttcatgttcaagggctaacgattcaggaacaaaccgatattcgttgctcatcaattgaagcctcagatgagacaaaacactagcttcaacagtgtcattgtccacgtcaagtaatcctccgcacatcgctccaattttcttgaatattttcatgtgccatagattcaagggaagaccttgaactccaatccaggatgcctctgcattctactttaatgtcgaccttttggagatcccatctgaaagagtccctagaactctcagacaatgcaactctattagttcatctctttccttctcatctttgctccaaatgatacatctatcattgattaactgactgaccaccagctttcagcctaattctcttgatagattgtagaaaataatactctagtctacatgactattatctctagtaaagataattgccaaactccaatctctagattgtgcattggacaacatatataaaggacaacatatattcaaaaagactcggttcattgagtcttttcaccaggtagagattctttggtttgaagctggggttgattggtggatacaagtctctccattctatgtgccctctgccacgaacagctgttgagacagactttctcctacttgtgttgtggtttaggtgctggtttcatcaaatttttactatattaacccaagaacgttgattcatgttcccccctctcttcatctattccctagactgactggagtagacatgtgaacttgtcttctgtcgatccatgttgtcaatgggtgtctctgtcttccttctcaataaccttctaatacattcttcaaaatccttccaacccttcgctggtctctcttccggaacaatcaccatcttcattttgttgagtctcaagactgaaagtttgagaaaaagcccctagtattcatgaaacattccaagaaacaacagttagagctgtttctgaaagatcttttgaagttaattcgttgttgtccttctcttttctgcaattcctccaaaacttccataatcacactctacatcgattgatacaacaacctcaaagcctaagagtagttctctcacaaatcctgactgaacctcgatcacttgttaaactttgtgttcagttccaaagctccaatacctttttggtacaggcttataattgcttccaacctgttttaagtgaccaatactaatggagtagtggccagatttcttccctagaccagtggggtcatggtagcatgcatatctcaaaagtaggagagagaagagagcatattttaagagagaaaaatatcttgatcattgcttttgcttgtttaggttaaccatctccctttgaagcacattataagttcaagatgttagcccacatgtaactaaattagatcctaagtccttgaaatgggtcttggttattttcgtattcataaagattatagatattattgtcctagtcttaagaaatatcttgtctcaattaatgttacttcatgaaaaataaacattctttgctcgcccaatcctgcttgtcaaggtgaggatgatcatttgttggtctattctatcacatcctctaatcttgtctcgaaactaactccagcccagcctcctattattccagtctattccaggtgtcttacctcctaattcatgtcctgcacctactccttcatcatcagatagtgtccaagttaaatggaagtaaacgcaaaacaaagttatagaaaacaatgatattagcaacaatttgggccgtatggcttgaaagaaatgccagaatctttgaagggactactaaatcagaagaggatgtgtgggagtaagtcaaattttggacagctacttgggtctttaaaactaaacattttgaggacctatcttttttagatttgtgtagagaatggaattcatttgtatagggccagtatgtggatgtatttacttctttttcttctgaggcagagtgggggaatactcttgcctta

SEQ ID NO: 379030 - DNA, 4934 bp, Cannabis indica
taagtttgtttttaatggcttgactttcagtcttttctttgctaatgatcgtcatatcatcaacatatagtaataggtacacaaccttaggtgtccctatttccttgtagtagagacaagagtcaaattttgatcttgaaaagccaatactttgaacaaactgattgaacctttgagtccactgtctgggtgattgtttcaacccatacaaagatcttttaagcaagcaaaccagatctgttttgccattttccacttgaaaactaggtggttgctccatgaaaatctcttcatccagaaaaccatttaagaaagcaattttgacatataactgctcaacctccaagtcattgtgtgcatcaatggctagcatcattcttatggttttgtactttacaatgggtgagaagatgtttgtgtaatctaccccctcaacctgtgtgaaccccttagctaccaatctagcttgtatctaggtggctctccctttgtcattccctctttctctttaaacaaccatctgcaggagacaactttcttatcttgtggcctaggcaccaaaatccaagttttgttcttcttcaaggagtgcattttttcacccagagcagcaagccactttttctttgatttgcaagcagtggtttcttcataggtagtaggttcaggatcactttcagattgaaccacagctaaggcatagactatcaaatcagcctcagcatgcatgctaggggttagatcctctctcctggtcctgtctcaaagattttcaacctgctgctacttgcacatgtggtgctatgaaaaacctcttggattactacaaccagaaccaagttcttcaattctcgattggtttaaatgaatcttatggctctgtccaagctcagatcttttcaaccaacatattccctcaatttccaaggtcttttccatgatcgttcaagaagaacggcaaagaacccttggatcctctctttctttagacgctaccacccgcccatccacaaaccatcctactcaatctcgcacaaagaaaccacgaccatcttgctccaattgtggcaaaccggggcatcttgtggaaaaattctatttcatccatggatttcccctggatatggtgacaagataaagtagacaaaggcaaatctgctgttaatttggccacttccaacgagtaactcactgattcaaatgaggcttctacctccaacattaatctttatttttagtgtcagcaactaatctctttgcttagtcaacaactcaacaatcaagctcctcgagttgaccctacacctgcacccgcatctaatatgtctggtaacactccttccccttttttctcttggattgttgactacggtgctacacaccacatgtgttgcaataaactatgttttgcatctttttcaaatacttctttccctaaaattgttctgttaccaaatagaacatctattcctattgaaaatattggcacagtttacatctcaccgcacatttctctccataatattcaatcatttaggttcaatctttttttagtcaatgattatctcaacaacaatgctcatgatgtggtttttcgcacaaattgttgttatatttaggatccatctcagactttgttgattgggacaactagaaagcaaggaaatctataccagcttcttcaaagctgttccatcgcaactgcctcttgtcaatcttctcttatagttcataagaatgtaattgaaaggccaaatcgccttattttctgttatgtagaccaatgggacaatcgccttagtcacccttccatgtatatttccaacatgatcaataaaaagattgatagttctttttcttcacaactaaatcctcattgttccattctccatttagccatggaaaaaaagctaccatttatttttcaaaataactttgctgctgctatttttgacctcattcacattgatatatgggtgccttttaatataatcagtgtggtaggttacaaatattttttaataattgttgatgaacactcaaggtatacttggacatacatgctaaaaactaagtctgaagttcagaccattatttcgtcctttcatagcatgatatgtactcaattttctacctctattaaaatacttagacatacatgctaaaaactaagtctgaagttcagaccattattcctgcctttcatagcatgatatgtactcaattttctacctctattaaaactattcattcagataatgctaaagagttcaatttgacaacttttttttgcctctaaaggcattatacatcatcattcgtgtgtggacaaaccacaacaaaactcagttgtggaaagaaaacaccaacacccattgaatgtggcccgggcattgagtttccaatccaatgttcctttagtatattggccctacaacattcaaacaaccacctacttaatcaataggatcccatcagtcctattcaaaggcaaaacacctttctttcttctacacaacaaagaaccaaattatgatcacttaagaacatttaggtgtttagcttatgcttccacccttgattctcaaaggcataaattctcccctaaaaccagagcttctgtttttctaggataccctgacggtatgaaggcatacactcttcttgacctttaaaccaatcaattatatcactcccaagatgtggtatttcatgaaactatatttcttttccaaaatcatacttcagaaaatgatatacataaccacttcacaccccatattttacatgttcatagtcccattacctcttctcttcaacctttcccttctcctaaggatcctcctgagaagaaaataacatatggccggactatcaaaactccaaataaccttgtgactacatttgtcatgctacatctacatcctttccactctcaaactttttgtcatattacaatctatctccatcattcaaaatagccatccttacagcctatactgctatagaaccaaaaagctataaagaagcttctaaattctccaaatggctcaatgctatggatattgaaatcgatgctcttaaaagaataatacttggataattacaaaactcccacccggccacaaggctattgggtacaaatgggtgtataagatcaaatacaactctcgtggagaatataaagctcctcttgttgccaaaagcttctcccaacaacaaggtgtcgattcaaacatatgccccagtcgcaaagttcaacacgttaaaagtgctccttgcacttgcaaccatgaatgactggacttttcaccaattagatgtcaataacgccttcttacatagtgacctccatgaaaaagtatacatgaaagttccccggctatccatgtcctgccaactttgtctgcaaattgcaaaagagtatatatggcctcaaacaagcctctcaccaatggtatgaaaaactttgtacaacacttctcaatgatggtttcaaacagtctctatcagatcattctctcttcataagacaaacattaacatcttttattgtcgttctcatttatgttgacgatatattaatttctagcaataacacaattgtcattacctcatttaaaaagtccttggacagaaaattcaaacttaaggacattggttccttacgattcttggcttagagatcaaccgttccaaagaaggcataaatatatcacaatggccattcacgcttcaactcctcaccaatacaggttatactggtgtaaaaccagcctccacacttatggatccaaatttaaatctcaccaaagatcaaggcgagctcctgtccgatcctacttcatatcagagtctcattggtaaacttatctacttaaccattactcaacctgacattacttatgttgtcaataggttaagtcaatttttaactccccccaagtaccccatttaaatctcaccaaagatcaaggtgagctcctgtccgatcctacttcatatcagagcttgattggtaaacttatttacttaaccattactcaacctgacattacttatgttgtcaataggtttaagtcaatttttaactccccccaagtacctcatttacatcctacacaaaggatcctacaatacctttaagctacttcgtgtcaaggcatttgttttctcatccaaaactactacaaaacgccctgcttatgtagaaaccagcctttccccccagattgtcccctgtcttttttctcagatgcaaactggggtggctgctaggatacaaggcattcaatttctggctattgtgtttttttaggctcttctcttatctcctggaagttcaaaaagcagcccactgtttctcgttcatcagttgaagccgagtatcgggtaatggccaatggcccttgtgaagtaacttggatccttgctctcctcaaagatctcgaggtcaaccatactcctcctgccaatctctactacggcaacactgctgcaattcatatcagtgaaaaccctgtctttcatgagcacacaaagtatgtggagatagattgccattttgtccgcaagaaagttcatcaaggagtcctcaagttactacatgtttcttctcggaacaacttatatagctgatatatttaccaaggatttgtttctttttattttttttgaaattgtttccaagatgggtgtcatatatttaattttatacacaccatcatgagggaggctattagaatttgtaataagctttaccttaattgtaattagttgttaattagttgagtttgttataacggatttgagcttaactctgtctactacaaccctatataaactcttccttgctctgtaataaaacaattttttccagatataataatcaataaaaagagtttttgtaacgccctaatgctaaggcacgctac

SEQ ID NO: 379031 - DNA, 1567 bp, Cannabis indica
tatatatatattatacttgtaatagacaactgtttatattttatattataaactatttaaaaaatttataaatatatagtttcaaataattataaagtactcctaagaaaaaaaaaaaaatgaaaaacatgagaaatacgacatacacgttacacgcatcataaataatttgtaataaatcgaaaagaaaaagaagaaatttgctaatcgtagtttttttgggaaaagaaaaaaaggaataaagaaaaaggagtagttgaagatataaataaagttgttggaagaaataaatgtatataggtacagtgttgtataaacactaactagcaatcacctataaatacaactgctcttgccgatttgttatcaaaccaagttcttgctttgctttgctttggtcgatcgatcaacatatataataatttaaattaagaataatggcaacagtaacacgtcagccaccaaaacatggccaaatggtcactattcttagtgttgatggaggaggaatcagaggaataatccccggtgttcttattgagtacctcgagtctcaacttcaggtatatactaatatttggtacataattaatatgaaatattgttaagtatgtggcaaagcgcaccacttataattgtattaaacatttatatgaaagctctcatagtacatgctataaatgaatgaaattaattatgtacatttataggagctagatgggaaggatgctcgaattgctgactacttcgatatgatatctgggacaagtacaggagggcttatcacggccatgttaacagctcccaaccaacacaatcgcccattatatgctgccaatgaaatcgtaccattttatcttgagcactgccctaaaatcttcccacagttaaagtacgtatatatatatatatatttggaaatatatatgtatagtactaattcacacgtgtctaattatataatgatgaaaaatgcatgcagtggtatctttggtattcttgatccagtgagaggtgttgcaattggaccaaaatataatgggcagtatcttcatgacactgttagaaagatattaggtaccacaaggttgcatgagaccctcacaaatgttgtcattccagcttttgatatcaagaaactccaacctgtcatattttccactcatatggtaataatatttatatatctataatgttaattaattaattaaggtaaattattactcatgtactattttttttattttttttcaaatttacggtttggatttctaaagtggttgcagcgctagttgcaataagggtttctatacgattttttattgcaatttatgaaaatgacccattaaaggatgataacatataatatatgtaaatataggctaagacggtgacatcgttagatgctcatcttgcggacatttgtattgggacatcggcagctccaacataccttcttcccattattttcaaaccagacaagatggaaagactgctgaatttgatctcatcgacgtggcatggccgccaagtaatcctgtacacatatcaatcaaactctttttat

SEQ ID NO: 379032 - DNA, 1978 bp, Cannabis indica
gcatttttaccatagtcatgcacacacacctagcaagaagagcaagggattactactattgactagtactatgaagttttatagaatataagcatgacatgacatgcgaaaaaatactttcagtaagagacaatatatatttgtaattacattggcttgtatggttgttcaatgttggggagtggggtggctttggtttggctttggtctctattccttgaaatgaaatgtaatgtagttaatagacattattattgactatctatatactattgagcatgtaatattaatctaatgagtctatgtttcttcgatctgtcttctataatctgatgttggcttttttgtttctagggttgaggtggtatggtggtggtgcagtggtgctttttgttagttaaataatgtataaatttgaatttgtatatattttcgtgtacatatagtttttttttgtgtctgtttttttggtatttctagtgtaaatatggtggtggtggtgatgtggcggttcaacttttttttattttttgcttcggttcataactgaagcaaaaatcaattagcgtcaaatgtattaatattagctttggttatgaacgaagcaaaaacctttttttttttgcaaccgaagtaaaaaatatcactatttgcgtctgtggttatagcgttggttacacaagccgaagcaaattctttatatgtcacttaaaaactaaagcaaaaagtctttttttgtagcagtgatcctcagtgtaccacttgtctatcaagttcccaatggcagttggtatctgttgtctccttagcaatcaaagaactgcccgcgagtgttacaacacatcgttatcactcgccaagatgaccttctctgctgctacggatttagaggggttgaacaagacctccactattgttatggcactaggggggacgagcaaggcctctcccacaaaatccagagaaacaacgaagacctccagagatcaaactataaagaagacagaggtggcacctaaagccacttgaaggtgtgcccaagatagggacgacattgacccctatgttggggaaattgactcgagagttggtctgaccaaggacctccgagaacttcccctcaacacatcagacccgatcaccaagattgtcaatattggaacaaatctaacaaaggtcttgtgttagatgctcatggctttcctcaagagaaatcaagacatcttcacctggtcgcagacatgattgggattcatgacccccaagtcatctgtcatgccctcaacatagacaaaattaacttcaagcctctacaactgaatcataggctccttgacaaagagtgttagaaagctctcaaggaataagttgaaagactacgagagaataactttagtagggaagctttctacttggtttgggtatccaaccatgttcttgtgcctaaactgaatggaaagtggagaagttgtgttgacttcaccgacctcaataaagcttgccctaaatattatttcccactactaagaattgattaactggtggacgcgacagccagccatgaactcctcacattcatggatgtttattctagctacaaccagattagtatgcacacattagacgaagaacaaatgagtttttaaactggaattaggctttattgctacaaagtaatgcctttggactcaagaatgcaggtgcaaattatcaaagagtagtcgtccgtatattccacaaccaaattagaaaaaatatggaagtctacgttgatgatatgttggttaagtctaaaagatccgaagaccacatcaaagatctagagtagtgcttcaacatcttgagagaatattaaatgaagctcacccctctaaaatgtgcctttggcgtccaattaaaaatatttcttggattcattatcaactcaagaggtattgaaatgaatcaagagaagatcaaggccttgcaagacatgaag

SEQ ID NO: 379033 - DNA, 5561 bp, Cannabis indica
attatgttgcgtttttattggagagagaagcagctgaatcacattgaattcaattacatttacttctctctctctctctctctctctctctctttcttttcttcttattacgccaaatttctgccattctgtgtctacaaacagtgttcgcctattgcgcctatttttctattctttcttttctctttttaatattttttctttcttttaccctgctggttggaggggtagtagtgaattgtgatttctagagcgtcatcaatgtcatcataaaagctcgaaatctctgcgaacaacgtgaaaatcgaggcggtggtataagattaagggaactcgatattcaatgagattattaccactttaatggttcgttcggtggttgcgtgttttagaaagagagagagagagagaaaaagatagtagagaaagaggagataagtctcatttgagggaggaaccaccatttatggtctcggtttctggtttatcttttgtctgtttgagttggaaggggacagtgaagaagacgaagtcacagaacgcgccgttttgaaagcgtgaacctttggtactctactactgctgtgctggttactggcagcctgtgcttcttagaagaaaaagtaaaagaggttttagtttgtgaagcatcctggtcatttcagaagaatatattcagggtttaaaaatgaagtttatgaagttgggatccaagcctgatacattccaagctgatgggaaatctattaggtaagtaacagagcttttattgttttatttatggcggttttcattctttatagctcgagttttgaatataagcttttatattgtctttttagttcaatcttttatcatatttgagttttgcgttagaaacttccttcaaactgttttacttggtatatcatttagagagaaaaatgaagaaaagcacatgttaggccaaatgttttcggttccagaacacttgttttgagacttttatctcttgtttcttaatttgtgtacacaaaattggtttttgaaaaaacatttctttcgccagaaaggtgatttgtgaccaaagtagattgaaatgtaaaagattgagcatgccatgtagaaagtttatgttaaaaatgttaaaaataaagaaatccaaaggggagaaaatcacatggcttttgttttgttttgtactgtttttcctttattctattgatatttgctatttaccattaatactatcattatggagaacggataaaagggtgttcaattgggtctttcaggatgtggtccagcctttagagttgtactacttttaatgagtttgtggtccatgtttggtaaagtctttacccgagtcccatggcctttaatcatccatgtggggacattcttcgttgaagtttgatcgatcacaatggtttaaccaatcatttccccggatatttcttttttacatgttgttgtaactagtaacgttaggttaattctattatttatacagagtctgctaaaatggaatttgtctcagtccaccacatacactattctgtgatttgccaatgtcgattgatgttcccccagttttttatttttgtcttctttgtaactttgatttattcctgtcttttattcacgttaaagcgtctaatattcatgcaggtacgtttcatctgatttggcatcggatgtcatcataaatgttggtgaggtgaagttttaccttcataaggtatgtaccgaatgttcacaattgttttattattcgtatgtgagaatgttttttttttaccatcactgttgattgattccttttatgctgtgaattttgccttctgtgcttattcttttacccgatgaccatacatgagaaaattttcaaattgacaagatttacagctgtctcttacctatgttaacttgggaatgtatccaaaaattgaaaccttttatgttaagcacttaaacttgctagtgtttatttacagtgtttttcaactttagtacattgggtacaatgaagttagcagtttttgagttaaatgataataatagtaggactgagggacaatattaccgattatttttgttgtttaaatataacagagttgtcttaaatcaactcgtagtaaggacctgtgagattttttttttaataaaaattacattgattctatctccattttttctttgtagtttcctctcttgtccaagagcagtcggttgcaaaaactagtgtcgaaagcaactgaggagaattctgatgaaattaatatggttgatttccctggtggtccaaaagcatttgaaatttgtgcgaaattttgctatggtatgactgttacactcaatgcttacaatgttgtggctgctagatgtgcatctgagtatctagagatgactgaggacattgatcgaggcaatttaatatttaagattgaggtatttctcaactcaagcatcttaagaacatggaaagactccattattgttctccaaaccacaaaatctcttctgccgtgggctgaggatttgaagattgttggaaggtgcatagattcaattgcttcaaaaacttctgtggatcccgctaatgttacttggtcatacacttttaaccgaaaattagcagagcctgataaaatcgttgaagatggtatgaagtttcgagaaagatcagagtctgttccaaaggattggtgggttgaagatatatgtgaacttgatattgatctctacaagagagtcatgattgctgtgaagtctaagggtagaatggatggtgctgtgatcggcgaggctctgaaaacttatgcagtaagatggttgccagattctattgaaaatttggtttctgaagctcatagcatgaggaacaaatcgctggtagaaacaattatttgcttgttgccatctgacaaaagtatgggctgttcatgtagtttcttgttgaaattgttgaaggttgctattttacttggagcagatgaattgttgagagaagatttgatcaagaggatcagttcgaggctgcatgaagcttctgttagtgatctcttgattcctgctaagcctccccagattacccaatatgatgttgagttggttcagtccattgtaaatcaatatgcaaagcgtaatgggaatttggaagctgttgagaagaatgaaaagggtattgatggttttctcctgggcaatggatctttattgaatgtgggtagattgattgatggttatctagctgaaattgctcgcgatacaaatctcgcactcttcagtttcatagaattgtcaaagtctattcctgaatcagctaggcctattcatgatgggttatacaaagccattgacacctacctgaaggtattaatttttccttgattcatttcaattagctcctttcaacgtcaacgcaatttactcatgataattatttgttgccctactgtttcaggagcatcatagtttaacaaaatccgacaagaaaaagatctgcggactaatggacgtgaagaagttgacaacgaatgcatccatgcacgccgcacaaaatgaacgtctgccacttcgagtcgtggtgcaagtactcttttttgagcaagttagagcctctgctgcagccgcacagcctgctgtaaacaatcatccccgcgacgcttctccatcagcaacgaacaccgacgaggaagaatgcgaaaagccagctgtggcagcacaaaaatgtaagaacgggaaactggcaaagaagagcagcaaaaacagtcgtagtggtttgcaattgttaccatctcgatcgagaagaatatttgacaaactttgggcagttggcaaaggaggtcacgtagagaacaggagctcagaaacgtctgcgagttctcagagtccaacttctttggttcctggtgatgccaagtcctctggttcatcttcaaggcagaggaggcactcaatctcataggtaaaagaaatggggggttatgcttatgttggctctaataagaacaaatctagcccaggaaaattcaaccgccgaagtgtaaagaaagaaaagatggtaggattttgttgtagctaatggtgaaatgtctacgttatatcagaattgctgctatatagtatatttcgggattgtttttcttttttctttttacatatatagtagatatgctatccagtttattggtgtgtctatctaacatcagtggtcgtccaattgtaatattttcctactattatatatatatttatatatttctgttacctcatgctgtagagatccagaagcaggtgatgttgtaaatgtttaacaaattacatatgttaatctgttgttggagaaatttagatcaagtattcggagaaaactatgaacgctcgaagtagaaaagagctagtatttagaaaaccgagtcgtaaaaggaaagactagaggattataatggttcaacaaaacttgtttgccaacatttagattgaatatctgttatattaagtgatccttcacatatgattgtaattgaaacataaatttcaacaatctaaattgtttctatgtttagaacttatgcattaatatcatttaatgacatgtcgcgtttaagtgttaattgacctaagctcgtgggttatgaagggtcatcgcactaatggttatatgcgaacccatgtcgcagattaatatgaagacccaacatacgaatatagtggagaactattttgtctttgtatattttacctatatgttgcaactatatatgttctctattttcccgcaactaattattcatccatgtatttcttatgatgtgccaatatgttaatatggtgcgcggaatgtatatttctcatcgctctcattgcatatcttctcacatacaaacatacgaattaatatactttatacttaatgtaagtatgaaatcctaaattattctatgtcgtcctaatatgttttatacttagtataagtatgaagtactaaattattttacgtcatcagactttaggtttatgtgcgttttataatgcgcataaaagatgaaatttataaccataattgaaggtaaacaaccatttgggttaccatgtggttttgatactttatgcttttaataatactcattagtcattaccatataagtacaaatcatacatatttggtaaataaatttgagtttagaatgccaataatcaagagcatttagttatatggatcgaatttgagtttaaagtactacatatattccatatgagtgtacttttaatagatattcttatgtatatatatgatttcagataataaaatactagtaaagtttgataaatataaagtatcaaataaatatttactaatttagtattaagtcttataagctgcctaacaaaaatcgtaatttcactcctcttaacctttgtttggtaagaaaggtggaaatagctaagaatacttaagagaaataaaaataaaatttgacattttaataaacttgttttataatgtttatatatatatatttatatatactagcaaaatactacgtgcgaggcacgtatattaaatttatgct

SEQ ID NO: 379034 - DNA, 5121 bp, Cannabis indica
aaggctataggtacgtagcatgagagccaatgtcaatgaagcataaaataaatatcgatattcgtatattcataacaaccagtaaaggcaatcaaatgagagtattatatcgatataaaaaatttcacttaaggaataaatatggaaatcatctagatagagacaattactcaaagaagtagaatatattattacatatttagtcaaagtcattttgttattaaactaactataaattatgtcttcagtcctcggtgaaggatattatctttagtgagtcagcacgttataatgatcaccttcacatgcttttaatgtaattaagtgtcaagttaccatttgacttggtttcttgcttgattcttattaccatattttaggaaccattcttgtactattaaactatgtaaaaaaaaccctttgactaactaatttgattgcgtatgatatcaaattttattagcacataacaagtactttctccaagtagaattaattcgaaccaaaaatagaaaaagcctaaagcgttgaccaattaaaataattaaggaagcccttttcatgcttgctatttacttaatggtaatgatgcacaaagagtagaaaaacttatagaagtcttttgtgcatttcttgggaataatctgataagctagagtttagagttaaagctaaattatattaagggaccgacttcaaatcatatatttcagatgccatgggaacttcgaactcacaaaaaatcgtacttttatctttctttgtcttctttgttgtaccaccaaccattgttgatggtgattctactagtacttcttcaacttatcatcaagaacatgttgctcttctcaattggaaagccacccttgaaaactactctctttcaattctagcttcatggagttataacaataataatagtagtaattctaactcttcaaaaaacaggacaagtccatgcacttggtttggagtttcttgcaacaaagttggaagtgttatcaagcttaaccttaccaaatctggtttacaaggtacgcttcatgaatttccttttacttcattgcctaatctcaaatactttgacctcaacacaaactctattttgggcaaaatcccaactcaaatctcttccctttccaaactcatttatcttgatatctcttttaacaacttaagagggaccattcctttagaaatggggaatctatcacgtttagtagagcttcacatggattacaacaatctcaggggtcatatccctaaaacatttggaagccttaaaaagctaaaagttttgtccattaatcacaaccgcctttctggtccaatccctgaaagtttatatgatttaacaaatctttcctatatttatctataccgtaatagactttcaggtccaatttcatatcatattggaagactgaaatctcttgttagtctagaattgtgggagaatcaactcaatggaactcttcccacttcacttggtaacctgaccaaattaaagtctctacacatccgtgacaacaatttctcaggcaccattcctcaatcaatacaaaatctcaccagcttgactgttttaagacttgccagaaaccaattcaccggttacttgccccaaaacatatgccataacaaccttcttcaaatcttcacagccaatggcaattattttgaaggtccaatcccaaaagtcttgaaaaattgttcaagcttgcatagactaaccctccaagacaaccatctcactggaaatatatctgagtattttggtcatatctatccttacttattcatgttaaacctgaataacaacaaatttcatggcgaaatttcacctaattggggtagttctaaaaatctacaaagtttttacattggtgggaattacatctcaggtactataccaccagagattggaaacttatccaaacttacagtacttgacttttcatcaaaccttttagtaggagagattcccaagtcatttgggaaactctcttctttgatgaaattgtacttgtacagcaataaactctctggcagtataccttctgaactcagtttactaactcaaatagagtctcttgacttgtcttcaaacactttgaccaactcaatcccaacaagccttggtcttaataacaacttgttaaagcttcacaccatgaatttgagccataacatgttaagcaacgaaatcccatttgagttggggaagctaactcagctctcgacacttgatttgagttataactatctcattggaaaaataccaaacgagttggggtttttacaaagcttgttgacactaaatctctcccataacaatctttctggctctattcccagcagttttgatcgaatcccaggattgttgtacgttgacatatcctataacaatttgtggggtccacttcccaacaacaaagcattccttaacgcttctatacaatcattagaaggaaacagaggcttgtgtggtaatgttacaagagggcaaggacaaggaggtctacagctctgcaacaaatcctctctccctggatcaaaacgcacccaccttattgtcgttatcccaattcttgtagttcttgtcgtcgttttttgcctagcttttttttgtaattatacggagaaggacaaggaagaagaagcaagagacagaggatggtcaacaggtggaaatggttagccaaaaaccgttgttttctgtttcaaatttcgacgggaaaaagctttatgaagaaattataagagcaacagaggattttgattctgcttattgcatagggagaggaggtattggaaccgtttacaaagctgagcttccttcttcttactcatcaccatcatcatcatcaagaagtagcttagtagtagctgtgaaaaaaactagaatatggtcattctaggccgttgaccttattatcccagaaggagtttttcaacgaggtgatagcgttgacccatataagacatcgaaacattgttaagcttcatgggttctgctcccatttgaggcactcgttcttgatctacgagtaccatgaaaagggtagcttgagttcaaagctaaaaaacgaccaggaagctagagagttggattggaagaagagagtgaatatcattagaggagtggcagatgggttgtcgtacatgcattctgagactttcccaccgattgttcatcgagatatatcgaccaaaaacattttgttagattccaattatgaggcttgcatttcagatttggtactgctaagcttttagaacaggattcatctaactggactgtccttgctggcactttcggctacgtcgcaccaggtaacattaaaatcaattaatactaatcaaatatttttatttcctcaattctttgttgaaatttttaaaatatgtatgtatgtttctgcagagtttgcttacacaatgaaagtaaccgaaaaaagtgatgtgtatagttttggagtattggtaatagaaactataaaaggaaggcacccggggaatctaaccttgtgtttgtcgtctccggcgaaaagggcagaggttgctcttgaagatgtgttggacgagcgtcttcaacctccacccacacaaacgttggaccaacttgttcgtatcttaaagcttgcagttgcatgcttacatgagaacccacaatctaggccgaccatgaaagatgtttctcaaattttgtccactatcattaatgctacctaatagtaataataataatgcttagttacatttacaaaattaattactgctaattaatttgtgtttttaattttcatgtatatatatatttgtagaacttcgagtttggaggatcaatacttgttagatcttataaatacgtgtacatacacatgtaatgtaaattgtatttgtatatagcttgcttggtaataaaaatttgtatattcttaattagtttcaataactggggatgatatgttttttattttatttttatttatctaactcatttaaaattaaaatgttaagtacacatttaacaaacaagatgctaattaataagtattgggtccatcatccaaatattttagttgagcattgttagttaaggcaccataggacacagagtcatattattttttttttttttttttgaagggagggatgcccttaaagaaaaagaagagaactaagattacaggggtcatcaccaatcaaaaccggtacttcatctaactccaaagcccaattagcaaacttatgagcgaagatatttgcaaatcggctaatatgggacacatgggcatctgggaggagagacaaagttgccataatttgtttaataaggtcaccaaaaagcgaaaggtcttctttagggttcgccaaagcgttagtgatagctttgcaatccgtttccacctggtggacaagaaaactctcttcaatgcagtagagaagggaagcaaggagtcatttcgcttcaagcatggcaacatccccaccgccaatgtggggaaaggcgactacggcaacaacttgactttcactattacgaatgactcctccaaaaccgacttttgcattactctttggaattgcagcatcagtgttcaacttgaggcgaccaagagccagaggaatccaggttgtgactgagggagaccgagtcacaagagcagagagcttgcgggctgaagatgacgacttatagtccgacaaaaagctttgagccaaattcactatggcatggggctgatcctgcgattgactcataagagccatgttcctattgtgccaaataaaccaagcaacacaaagaaagcattctacatcttccttagttaaagtaatatatatcatgtgaacaatatcatgaaaataaacagtgaaagaagaagaaaaaatataagggtagaaaactgtaactttccagactcttcgaacgctcttgtagaagaacagggcatgagagactgattcattatggtttccacaacgaggacaaactgggaactggataattttcctatatgcaaggttcctattggttggaaggattgagttggaggcacggaaagcaaaatgtttcaccttaggcgggatattaagatgtcagaggtttttcca

SEQ ID NO: 379035 - DNA, 3604 bp, Cannabis indica
atttaatattttaataaaaaaagagttagtaaattttattatactgaaatttctcctacaaattaaaaggaaaaatacaaaaaacaaaagataaataacataatggtacaattaaaatatatatatatatatatgtatacataacatatacaatacaaattttttaatcttttgaaatatatttgtgtagacatcaataggctgaagggaataaataaataaccttaatagtaattataactttatatttttatgttagtgttagtgttcttctcagaattattttattcgtagttaactgcagataaatttctatagtaacaatttctataaattatttaaaattattatttttaaatcattagtaacataaaatatataaatatattataggccttgctcaaagggagagccttgggccttgccccaccctagagccaacactgattccacccatacaatcataatcaccaattttctataaagttcccccatataatttaatcacatgcagcatgtttctgattttaataaaatcctacatcatattagcactttaacatgtacattttggtaagtttcctatcacaataaagaaggaagttctgtcagaattattatcgcttctttttatataatatgcagattccttcttcgacaagtaataatatcacaatattgttcaatagttttgaccatttttcagaaagcaagtcagttggacataccacccaaacatgaaagtattaaaacatgaagaaaagtgagttctcaaccacaccattgataatggaaacatcctcacgataatatgaacacataaattcaataaatagattcatttaccaaaatattgcgacattcttgatgagaagatccagcaggaggacatgaagagccttctcgaaaatcatgttgcctcaatgtcccatcttcacttgcgctccatacaacgttagggtttccaacttcaacctgcaatagaaagcagcattgtcattgaaactgaggccacaattaagttccaagaacccatcactcttttaaacagaaaatcttacagccaacttcttgactcttcttgtatgacattgatacgtagctgatggagcaatagcactgtcatcagctcctctcccacttaatcgagacaaattaaataaccgaacctgcaaggaaatcagaaattacattttcaacattaaaacaaagtttagatgaagaaaacatctatcagtaagaatttctaatttcaaaacattacttctgcatctcccgctccagaaaccacaagttcgtcaccagtctcaggaataaatttgctacaaaatatatttgcacaatgcccagtctctaaggaatgcaaaaggttcctgccagcatagctccatatattaatctgcagaaaattgtacagaacagaaacattaattacactttctaagctgaaatatgtctactacttatgcttacacagctacagaatagaaaaagttttgagacagcaaatattattaaaattaaagttatggtaaaaccttagcattgttttaaattatatttattttggtaacacgtgtttcacaactataagtgggagaagataactagatccatatgcatcgtaatcgaacatatctcctaccaaaatctttgtttcagataatatataacagtattgttattatgtcgcatcaaatctttaatttattttcctcccatcttgctgtagtctaataggccttcaataaatataacatgacatgaaaaacaggaattctatgcctagtattcaacttatgtattttactctattttgtaatagaatagttagttatattccagctggatcattaggatcataaaaaactatactgtgactgtgagattgtagagggtattggggaattgaagaatagggttgtggagagagaggaaggtctctcaaattacctccaaactttgtgcctgagtttttacctataaaatgcagaaatatctctcttcatctctaatgttcttttagttctttgctactgccatatctagatttagagtcctatcataaccatgctaatgtggccatcagttgtattgctttccacactgaatatattaaggtaccatacccgtgtgtcatctgatccggatatcagaagtgaaccgctggaattccaagcaatagcattaacacaaccttcatgcccctgaagaaaaaaaaactttaagaacaatttttcttcaagcacagaatggtaactagataaattctagaatgcaggagccacattttacaacagactcaaatttagaaattaaagtacacttaataattaacttacaaaaaaataataattaacttacgggaaaaaagaaaaaaacttagataaatattaatgtctgaccaacataaaagttaaaacaatctacttctcccctcaagttgccttcgagcagaaagcaaactatcgatccctaaacatctgcatccgaagtgacgatttcccagttgataaatacaacaacttcgaacttttactatttcttaaacttttattttctggagcattcttttctaagcttagatattattacctagacgactctgctactcaaacttccaaaacagaaagaaatctatacctctaaatgacaaacttcattttatcactacaactttagcacaagaacatgaaaaaggggaggtcaagaaacattgtcaacggtaggacaggcacaaaaatgttaaagatgaatccccattggtggattatgaattcataatgaactgtctgttatcatactcttatccaattaaagttaccaacctccaactctttttcctgtgaaagccttcgtatcagtgatgaatgaagctgaaaactgcgatttgcatcctacacaaaattgaaaacgagccaaattgtcttcatggaatgactgagcaacctatataacaataataataataacaataacggaatactcccgtagcaacatgatttaacaccacacaactactagtccaccgtaacatatattaaagcaaccaattgaacaatgtaaaataaataaataaacccagaacagcaatcagaagtaaattcataaaccaactcatttaagccattagggaaagaaaccagtttacatttttcatgccagcttagtgtgtagaaaagaacagaaaaaaacatcactgaatattactacgtttaaatttttggtcaaaatattcaaattgcatagctaatgaattaaagtcaaaataatccaagcaacaaaatagagttaaaagagaaatagaagagaaaggggtgtacttgagggccatggaggtatcgtctgtgaagcaaatcgtagatattaccgtcgtgaaaaggccagggttccattgaaaatgaaactccaacaaaaatcaaatgaaatcacagccctaactagtatggattaatagaagagctttcgatccttctacactctcctacccttcttctacccttttctctgtctagtttccttctttttcctttttttttataaataaataaaatataactatatatttggtttcttgcaaaaaaaaaaaacaaaaactaatact

SEQ ID NO: 379036 - DNA, 549 bp, Cannabis indica
agttagattttagtcactgcaaacgtgtgctgataaaactttgacctttttgccagcacagattgcaaaatgcgcgggtaaagttttaccagcgcaataacgaactgtattagtaaagtgacatttcttgtaatgctttctgtcgatgtgagctcctggaaaagatctttattttggcaaattgattcctactctttagctttcttgcatcttcagtagtggtccaagttaattaaagggcacgtaatgaacttctaccttgaaggctcggtcctagatgaatatgggtcggacttgtgtatggtaccccttttttttttaaaaaaaaaaaactatttcagatttatcccaaattataaaacatttatgtttttacagaattttaaattttttttatatttttaccaatttttttcttacaaaccattgtttatacgttgttataaaaatataaatattttcacatggcagaaatgtaatacaacgttgtgacaatatgaaaatatcattgaaagaacacaaaataataaaaaatataaataaaaaaaa

SEQ ID NO: 379037 - DNA, 1988 bp, Cannabis indica
ataaatacattggacagtagaatttctctccaagaatacacttagaaccaagaaaattatattctaattaagagattaattataactaaatagagttgcactacaaaaaaaaatcaaaataccaaaaaatattaatataataataaaaataaataatcattaatattttttcataatagaattatttttgaataaatataatatttatacatgcattacaatttagaagaaaattattaattttacgtaaataaatttataaaatatatgtatctagggacttcaaaaataactaattataatttaaaagttatttttatttataattgagccaaattggtacttaattttttttatataacaaattagaaattattttttaataaagtattcttaaatagattttttactggatatataaaaatgagaaatgctaaagggcaccagtggtgcctagcaccctcttacgtgtcaatatcgctattggtctaactaagtatcgggtcccatataatttaatataatagcttttagggagtatcgctagccaatcgcaatggaacatgtcgagaaggtgctagacaccactggtgcctaatagcaatactaaatatatagagatgtatttaagtaatgaaaaactaaataccctgaaaatgcatgcattaatttcttgggtattaaaataaaaagatttaggaaactctggctcgcagaatccgacttcccatgtacctgcacaaaccatatagctttaattaatacatactatgagtttaatttcaaaaaaaaaaattaatacatactgtatctttaatcgagaaatactaaaaaaaaattaatagtgcgtatacgtgttatattgctgaaattaaatattaaattttaaataatttaatttaatgagtattataataaatcattaactatttagaagacacagtgttaatactcctatttaaatgacaataatacacagatacatttttctcaaagacactgcagatatatatgagatattttaaaaggcatcagtggagtttagcaccctcttatgtgttaatattacttagtccaactaagtatcgggtcccttataatttaatataatagtttttagagactatctctagctaatcgcaacgcgacaggtcgagaaagtgctaggcagcactggtggctaatatcaatgctatatttatatatagtaagattatattgattaccttcctaacatcataacagtagcttgaggattagttccaggagatgcgagaaaagtagaaccatcaacaaccctcaaagcatcaacaccaagaaccttatactcattatcaacaactttaccaacttgacaacctccatggtaatgccatatggtcattacagtgtctttgcaaaattgttccaaagagaaagaatcaccaatgtgcctgggcctcagattgagaggaacaacagatattaagctagtgtagacttgaacaggtatctgtccgtaccgaagcttggaaaatgcttttgacattataacctttttaatggttttcataccctcaacacacttatttaagtcttgctcttctttgtagtagttaaaggtcactgatgggttgtctgctgggtttgtgttctttagttgtagatgtcctgtggagagtggaccgtcgattttttggagtatgactccaccattaattgttaaattatcgggaaccactttctgtatcacacaaaaataaataaaatgggcattacttttaagttatattaacgaagaatgtgaaaaaaaaaaccaattaaatctagagtatcatattaattttcaaatttaataactattatcataatcatttagtggtaacaccatttctaattgattgattgaaaattgtgctaaattttgcttaaaaatgaaccaatattatacttatccaaaattctacaattattttccaatgcatttgaggtaaatcaatttttttttt

SEQ ID NO: 379038 - DNA, 1540 bp, Cannabis indica
aaaaaaattaggcaaaaatataaggtagataatttatatttaatattaaaaaatttatttattgtattgataatttgtgataagctatttattatgaaaattaaatatgcgatactaattatgttgatcattattatgtaatgtaatataagtatagctgacacgcaaatatgataagtcgacaagaaaacacgacatgtcaagttagggttgtgatttcttgacacgaaatatatatgggtcgggttagggttgaccaattaaatatgtcaacttgcataacacgaacatgtatatgatacgggaacacgaatttccacccctatacttaatccacttttacaagaatttaaaattagtcttattatgtgtggatcatctctttatatagaaagtatatgattctttaattacataagcactcaggcatgatcgttacttataacaaatgcattaaattaaatacaaatttttgtaaaataaatgaaagaacaattttgattgttcttgttaaagtttgaaattggtacgactatcttggttgaatattgatcgttcttatactagtaacttaaaaactcaagggttcagacgagttatcacgtatatttagtttttggattaaccgatgtgaagctacgactttcacatagggtacgagagaaaaacgttgagtcatcgcgtataattaatatacgtcacgactagcttacttctctctacatcctacttttattttatttagttatgcaatgcataacgtgcgactagaccctgtcttgatcacaaccttcttacatgtttctatcatgcgaggatatgttgattttcggggttttacacctttggcacattgtcatttttcttatgggaaaattagtctacgtgccaattttatgcgagactatactcgtgatttgaatgaaaaaaatcatctaatgacattatatacatcagacgagtttgaccgggttcgggttcgggtttttgggtatcgggtgtaggaaatcacataccgaacccacctggtttaaatttatcgagtttcgagtcggagttttacttaggtagattaaatcgagttttgggcaggtttgggctttcatctggtttgggcttcccaattttcaatttatttatttttacaattgcaatttttttaacagcaaacaaaatttgacccatattttaatcaagcctatagatagaaagcacaactaagtacaaagaagagagaacaacaacaataatcacaacgttgtattcaaaaataaaatttacagtacactattaatagaaaagaaataaaacaacaacgaagagagagagtgtgtgtgttgctgcccctgtgattggaacacgatggtaagggggttagctacttcgcctgcgacgataatggaagggactggctacttcgtctacgatgacggtggaggaggatggctgcttcgccttcgacaacggtggaggatgctagctgttagggtgttcactaagtatccgatccaatccaatctaatccaatccgcacttgtgc

SEQ ID NO: 379039 - DNA, 5583 bp, Cannabis indica
cctttcccttttatacataaaggagaaatggcaccactgaaatattgtttaggccttattacacaaatctctttgtatatattaagacccatagtcgaaaacgtccaaactatattactcaaaaagcattggtcttccgttactggggagagagtggaagatgataacaaaaaggcaaagagaaaaagaaacaaggtaccgtaaaaagaacaaataactttgatgatcgagttgtatctttttcaagtatgagtttgtaaaagtgaacaattgatatgtatatatatatggagagagataaagagagagaaacaaaggagagagagagagattgttattagttacctctgcaaaagccacaacgtgttggtatccgaacccgtaacatcgtaaagtgaatgttgcaaccaatggacagcaacggcctcccgcttgctgacattcagcctctcagggtccaaatttccgaccttatcggccaccgggaagaactcaaaaggaagacccaacttgtcggcgaaatcagtcaaccttttaccggtggcctcgagtgcctccatcgagttgcctaggccagtcagtctaacgtaagggggtccacctggtctagacgccaatatgtggaaaaggcctggccattgcaaaccctgcatgatatcaagatcgattatgtgaaccctttcctctctttcaaacgcctcctggatcgcttgattggctgtgaaatgagagaacttcacgaacggacttatcccattgaacacctggaaagccgaagccatcctctggctatggttttgcggaaccccaaccgaaggcatagccgcgtatatccccaaacacgagctcacaagccgagccgacattgcctccgagaagtaagccgccacgcgttgcgccgacgtcccgaacggcgtcgacagctccgaaatctcgagaagaatcttgttcgcatcgtcaaagttgtctgccgatactgcctctgcgcattggagcaaaagggttaacagatgtaaaccctcttcgtcccgcttctgttgccgaagctcttccttcttctcccggagtagtaccgccggggatggtaccgatacaggttcctccacaggagagggattctccggctgttgttgttggatgacatcagcagtattggttgcggttgacgtaggaagaggagtgggaggagggggaagcacagctcctcccccccagtgcaagtactgatcgttgggtgaagattccaggggaggagagaaaacggggacgttggatgggtcggatgctaggagggagcggaggcggtactcgaggagagtggctaggtttgggttgcaaggatgaatgatttcccttacgttgtggatgagttgagggattgagacgttggtggaactgtggatgaggtccttaatgataccatcgatccatgccgtagcggaggcactgttgttgtgattattattgttgttgttgttatcatccattgatgacgttgtagtgctgctggtggtgtttgaggggctaataaccctacagccagaaccagcagtaggagttggactaagattgttgtgaatggtattattgttagagttgttgatactaataatattggcagtagtagtagtgtttatttcacggctagtagtagtagtagtactttcgggtgggaacaaaggcagacccgaaaacccacaaacggctggggactggtactggtggtggtgggtctgggggagtgacctgatttgattaggattattattgtgatgaagatgttgataatggagagggtcgatttgggtcaagttgggacttgtagaacaagtagtagtagtattagttgataaaaccccagaaaccccacctgacgtcagatttgtcaaactgggtaacaaagtggagtagttggggttaatcccggtcgtactcactgatgatggtctggccgaggtcggagaactattatttggattaggaggaataataccataattattattattattattactatcaccagtggccggaaaagagaacccgatggccataggaacaccacgccgagagagcctaagataatcagcggcggttgcagtctggacttccatctcggaagccatcctctttctcaccatctttccagctccagactctacagattgtaccctttgttgttgttgttgttgttctgctagtaaacgacgccggtttaaggccaagtcttcagtactgctcccgctgctattggaaccaccaccaccggcaccggagctcggacgagagcttccaacatgagcagttgtagtggtactattaattgtataattggtggcagggtttccagtcaaatcagtagtagcgtctcccccgacattgtcactaatcaaagcagtcataatgaattgaaacccaaataagaaaaagagaaaaagtaataaaaatggggttattcagaagagtatataaatgagaagataagtacttacatagtgaagaagaataagaagatgatgatgatgatgatgaagaagataagtagatgtgatgagaaggcagtagccaagcagataacagccgtgaggaactggacagtggcttcgggattcttttctctctctctctctctaaaaacaaattgattgctcaaacatagtctctacaccccaaaacacgacctcctatgctctcttattataaccttcttctctttccttcttcttttgattttaataatacgactaagccgaagttttgccttttggatccatctgatccttacctattcttatacactttatacaacccagaatcccaaataaatcaataaaatattattaatagaaaaatcgaaaaaaaaataaaaataaaaaatgggagagccgaggctgtctcagttgtttatttctgatagtagtgaaaggtggtggcgattgtctttgctcgaatggattagcttcatttgtctctgctcaaacccatatgcagcagcatttatatataaatgattaaaaatcaataaagtttttcaaatgaaatacgtatttaataataataataattatgagaaacgagaaaagaaaaatgggtaggcgggggaattaatgcaagtgaaagaaaaagaaaaagaaaagagaggagcagagaagagaagagagtgggagacgaagaagagaagattagggaaagaattaaagattgggtgggattttgcgtttgtttgtttgttcgtcgttgagcatttaacgttttcaaaatggttaaagacaaaacgacgaccattactatgtagtccgaggcgtacagggtccaagctgtatagtagtaaatatggtagctagcgttatcgagccaaacacacagaaagaaattaaacaaattttgggtttcacagcatttaagttttattcaattaatgcaaacatcagaagcatttaatttggttaggtaaaaatattcttcgcatttatgtttgttttgataatgacacttcaagctcatgcttcataaaatattattagggaacaagaatgttttgtagtatttttattattagtagtagtagtagtaattaacactttggaaaagaaaaataatattaataactaaaaataaaaacttgttaaattgtcctcttccttgcgtcttataatcagagatgatggaattatttgaaacattcatgggatttaactaaaatgttttcgctaccaaaaaaaacatttattaattttaaaaaggagtcagtgttgtatttttttttattattatttttcccgtcttcttcttttttttaacatacaccacaaattaaagtgtaaataattttttgccagcaatgaaaatgtgtttatataattatttaagttaatttattttaacaatttgaattagtaatgatattaaaggaagagattctaattcaaaattagtattttaaaaatgaaaacttgatggaaattgggcaggcaatgtagagaaagtgctttcttcaactctattcccgttaactattttaatacatattctctccctctattgggatgataactcctgtggaaactcatttatttaaaaattaatatatttataaataaaaaagataaattatgtaaaaattaaaataataaatatatgttattaattttaaatatataatattatttaaaataaaatataaatatttaaaaaattgctaataaattacaaaaaacacataaaaatatatgtataataactaaaaataatattacaaaataaataaataaaatcaaacgggacctgttaaggtgggagttgctatcccatccctgtcttgtttagcatttgggaatggaaaattatccctattccttattttggcaggaaatccttgtctcgttaagggtaggtatctacgagatcttagcaaggcatttgatcgcattgaatcggcttaccttaatgctatgcttcttaagctcgattttcatgagaaatgggtttctctcattcaccattgtttatcctctgtcaaatataaagtaatatgtgggaatcatgagaccaatgtctttagtccaactagagggataaggctaggcgatcccctctcccctctccccttacctgttcctggtgtgtgttgaaggtctctctgctcttataagacatttagaagttagaggctggttgcacggctgtaaagttgccagaggagctccagttgtgtctcatatgctctttgttgacgatagttatctttattgtcgtgctactggtgttgaaattaacaaagttaaagagctcttgttaaccttcgaaaaagcatcaggccagcaagtcaattttaacaagtcttccgcttttttcagctccaatactacccaaaactcaaaaaatctcatttgtagctcaatgggaatctgtgaagcaactgaagacaacaaatacttaagcctccgtagaactcttggaagaaataaaaacgttgttcttggctttctcaaagacaaaatgcaaaagaggatccatagtggggatggaaagttcttatctcgtgctggaaaagaagtcatgatcaaatcagtggttcaatccctccctagttatgctatgaatgtttttctcctctcaaaagacacgtgcaaataaatggaaactctcatgaatcgtttctggtggcaatcaaaaggtgaaaactcttagtaaaaatctcagtaaaagcaaatccaaaggcggaatggggtttagaaatttgagagatttcaatattgctttattgggtaaacaaggatgtcgtcttctggttaatcacaacagccttgttgggcgtatctttaaggcttgatacttcccaaacctgaatttcgtctggcgtagcttatttgagacaaaaaaaaaagtctgcttcttgctggctgtagatgctttatgtaatgaacgctttagtaatttggattagtaaaggcaattagcactaattttcaatattttattattatttatgaatttaattattttaggaccccaatatttagaaataaatattagagttataatttctcaatttcagagattttattaaactctaggggtatt

SEQ ID NO: 379040 - DNA, 4666 bp, Cannabis indica
atatagatatatttatatatatagaaatagggagatagactatatgctcttgtctcatgtcctaataaaagcaccatatattaaaattacaatcatatttgaactcggtaagatggaaaaaaaaatatttatatgctagtttgatctctaaactaacaaacctgctaagaacattatctaactgatttgactaatttggttaacaaattacatctacacacaagattaggtaagatattgaaatcattgaagaaaccagccctggtgtatttacagacctacaggttgggctgatcaggtaaacatacacagattaagagacacattcctcactcttatgcatacatgaaactatcatcgtccaacaacttatcgatttcaatcaggtcgtcataagttgtttcttctgattcattcattgtaaaatccgtctgacaaatataaaaaggattgttaaagccccaccaaattagttacagcatttgtagcaacagaatgaacatgaagataatgaccataataatagaattgctattaaacaactagtcattcacagtagaaagaaagtaacattccaagcaaaactaaaaacaaaaacgggacagggccaactggcaaggaaacaggttttcccagttaacctttcagaacagaagctttttgcgaaatgaaaagaattatttctgacaaataaacaagaagacaatccactcagaaggatcatagacagtcatacatccagtatagtgaatataaattgacatgcgtccttatttactcaaataaggtacatatttgtttaaaagaggttgctaaacaaaatgaaaatcacatccattattatgcaaatttttcaaagtaggcaaatttgtgaagtttcgtacataggtgaacagtggatacttaataaaaagatgtcacaaattataggagcgtaagactagttgacgagcataaagacttagtaattagtaaaggtttgacagatgacttcaagaacttgagccagatctaataaattctagagctattcacttaataatttgaaaagctgaaaacggtattcatcaatgatccctttacttgagaaacaagttggacattatgataagctttagacaatatgcaatggaatgaagaacattgaccctttgaaaacattaacactgacttatacataccttggtctctcgtagcccttcaacaacatttagcactctgcgatactgagctcgtccctctggatattgaaccattgactttaccctagtaagtgccttttgtaacctttcctctgtttgcttccgtccttccttaaagaaatcataatcatcttcttttaagggtaaactttgcatgactgcctctttattaactgcatcaggtcgaaatccccgcaaaccactccctttacgtctccaacgcaatataaccttttccaggatccctactgaccaggtgattgctctatactgtttccttacctggtgtcctcttacatgggccttcaaacaattaaaactagaagttagcattcttgttcataatcaatgatttctaatatggaagaagttagctttaatgtgagtgtaaagaataataatttctgaaacggaagaagttagcattcttggtcatgaccaatgactcttaagaagttaactttaatgtgaatttaaagataaaaatttccgatacggaagaagttatagcattctagctcattatcaatgaattaagaaattaactatattgtgagtttaaaagattaataataatttctaacatgaaaatactcttttcgccctcttggagagtaaatttgaacttcatcaattgtcattcactacacattagttaattactatcgacacatttagatttataaagtagaaataaattaagacgagcagcttttgggccatttttcttttggttcatctaagtgtgtgtatataatatatatttattaatttacataatatcaaaatgtacaaagataaaatcaatcattatagaacaatgacagccaggtagttactcccaggataccacagcccaagacccaaaactatgttcctagattctggttccaggattttcaaaattaaatgaaaacagattatatttttctcctgaagcaaccttaattttgccagtcataaaaagccacaaattccaaacagctcccattcagatttttcaaagactacattagtatgtggagcacaatttaaaggtgagctagaagatcttcctcagagagggtggttacaaaatacatccaaaaagaaaaagttcaactaacctgtattttaacaattctttgccgaattatcaggaactcttttctcttcttccaaccccgatattttttctgtatttgtacagcagcagtatgagtttgcccatcatttggtccagccttgcttgacttcccagccaaaagtgaaagagctcgctcatctaatagtccatcatcaccatactcatttaatcgtcttctctctaatgactgcatccggaacatttgatgtatacgatcagcagcttgtgtggcattacgaacagcagtaagtgaatccttcagtgaaagtgcatctggcatttcaccgtaagtcctaggagttgttgttctttctgaaacggtttggatagccttcgtagcagaactttcaacaacaccatcttcctttgaatcaacaagttccagggaagaaaggtgacttgttaaggaagactctgcaaggaaaccagagatacctttgtgtccattaacagatgctaggtctgccggtgttctaccagacaggaattctggagatggatcagtcacaaatccaggagctgccccaagagagacaagatatgcaactgtctgctccctatattttaagagtaaaaagcaagaaaagaaattagctttccaaacaagattgacatcaatggtagttcatatacaaataataaatacatgaaagcaatcagtaacttagaaacagttgagacacattttcagcaatcatctacatatgtatctagatgctacatatttagatgattgctcaaaatgtgcctcaactgttttggtaccgtatgtttttagttcgttttgtgctaaagctattgtatccacggtattcctccgctacaagtgagggtttcaataacttaacgggggaggggttagacgacaagtgacctttctcttttttcaaaaaaataaatatgtagctagatgcttacatggtacttgaaatatctaggatacaaaagagaacttcggtttgtcagattagtctatgtataaaacataaggcagttgttcaaaacaaaaaaaacttaaaggcagtcaaattagtctatctacaaacttaaggtagacacataaatacatttatagacggaaataatcacaatataaacatacattgaaacagcacaaagttaggggcccttacctgccatagaatgctgcccaatgaagcgcagtccaaccgttaatatcacggaaattaatgctaactcctgccgtgacaattggcttaattgcccagtcataaccgagagcagctgctagatgtaacacaccttgcccgtcatcatctaatatatttggccctttaccatcttcgattgttttgtgaagaagccacgagtacagtttctctttcatcagcttagtaagtagatgatctctcacctcatattgggagaaaccagtatcgtttgtttggtctacctgctggtaaccttcatcttcctccttcagtgaaataatcttattaatcaagtttcgtttctccgcgacaattttaaaggagaagcttgaagggtttacagcaagtgacagtaatttctcaagtcttaggtgaagagaaagctcaattgtattgccatcatagatatctgtgatttctatatctttagtagagccaaacttataattaaactccctcaactcactacaagctaacctgttggaacaggtaacatagaacggaaccaaaccatccctgtgtggtggagcttggcaacaaagaatcccatatgctaaaacctctgcagcaacctccacctctccaaacatacaggaccacctgtattttgccacctcttgttgactctttaaaaaatttccaaataccagaacctgtttaaaaataaataaagtaaataataataataataattaagattccacaataagaataaaagcatcatcaatctcatccacagatattgtatgtagcgcagtgaaattcaacagatggcaaagtgtcagtaacatgctttttaaagcaaattaacaaattatattatgaaataatatcaaaaatatactatattcagcttctaacacattttcttaattttaacaaagatcatatttctttacagtgatcatatgtctaagactgacctcctcccaaatttattaggagcctcacttatggcagaggacaaccgtgttgaccaaacaagtaaaaacataaggatagataagctttctacacaaaacctattttcctcagcagaagaaaaagaaaaataagccgagataaagacccaaaatagtagcttattgcagaaagcattcacactctctactgaggccttggaaagaaagtccctcaaaacctttggtcttgtagacccaagttgc

SEQ ID NO: 379041 - DNA, 3025 bp, Cannabis indica
taaataaaagagatatttttcaaaaaaaattctagtctaatttcctcctatatttaaggcctattttgctccaagcccattatgtattttaccccctttcttgggccgcattagctagctcagcccaaaaagcgaattgtacgaaagtaaaggaacaatggaaaccagaaacaaatacacagattggagacaaagacaatggttggtttttttccacggaaatttctggttagactcttggagtctgatgttcttgaattgattgattctcgatgatccccgtttgacaaactcaattgggttctcttgtcagtagaatccaccatgaaccgatttcgagcttcacggacttcggtttcaggctccgccgcagttgcccagttgaggaagaaagcttttaattcatgggcggccattcaggacacatttttttcaaccaaagtactttccttctttcaccaacccctcttataaatatatatattttcatgtacatcgctttctttcactaattttgtttcagcgatttatagggtttttattatgttttattataggatatatttgaaaggcatagggtggtgtttacagttgggacctctatagcatcagtagccacagcatggcttggtatgttttccatctattattaccgtgatatccatttcaattatcatttatagttggtttttaaaggtttatggcataagggtcttactgagtttttagttgtataaggagattttttgaaggggatgggataaatgatgaacatttctcaattttatgtgagttcaaggaaattctagagttgtatttagaaattccaattatgatggaaatatatttactggagtaatatgcaatatgcatgcattgaggtgtagaaggttattgccttaactgttgtcatcttcacatagtgatacagctgaaattttaaatttggatgcagggtattctttacgccacctacacgattctaaagttgatcaaaggcttgaatcaatcgagaaagctgtaagcaaaatatgaaaatactagacctttctttaattgcttacttcctctgctaattgaaattttggtattgatgtattttttcttacatttaataccgaaagcgttcaagttaaatgttgaacaattccataacctattaaaaaaaaatgacttctattagttttcttgtgtgtatgttggcttggaatacttttaagtcatgtttgatgaatgtttgttcaataggattggatgatttttattatgtgtaattgttataaaattagtgaggatattgcaaaaatggatcttacaatcttatggataaaataatttgaaaaatttgggactattatatcctatacaatccctatctttactcaaatgagaaagagattgcaacttctaatacacattgttttcatctaatttattgttgagttgattgaataataatcaactcattcattcttctatgttgtttctcttatacctttttaatggaaatctattctaacattgtactctatcattttataatatctctaattcatcttttattttatgtaagaaacaagcctgtttctgaacattcttttatgtaattttgttgaaactcatttctttgttctgttggcttatttcttagttgcatttttttaataagtttttattgatcccttcttctaatttctgttatatcttgttgtgttgttacatttgtatggcagatgaaaagcaaccatcttagtgaacattcagagattaggaagattgttgattccagaggtttcagcacatcttcttgtgtagccactgctggaaccactttaattattgggtttgatcctgtatcttatttctttggcacatgtttctattttcatattttcctcatagataaagttgaaacacgcatggttttaggatatagttaaccttatcatattgcaacgttaaacaatcgttgctgtcaaaattatttcttatgtaatacggggttccctaagagggggcatgtagtgttttcgtacttcctttttgccaaacattgtatagattgcctagaatatgctctcactgcaggctgtaagtcaaactcattatgcttgtaaataaaacaaccaaggattatgtcatttactttctcacttgcaggtatggcttgggttggcgaggtggaagatggtactcgaatagacaatttagaaaagagcagatgaaaatgctaggccaactaaaacctaagagatggcagttacttgggcgggtaaatcctagagcattgcagctccagctcccaacatttcttaaaagaccatcggccagatcgaaagctgcagaaactgcaaccaaactacctgaaaagatgaaagaggctcctatctcttgcagttctaaaggaaccccttcttcttgttaaattaacgtatagaatgaaaggaattacgtcaaatagattggttatggaaaaatgatggaaaatactatctccagtacagcccatttgagatagtctattaatactgttatttgttttgggaaaggatgatataaatcctcagttttgggctctcttagagttactttttcattaatttacgttttcactcatttgtgtctgtataatgtaaatacaattttgggggatagaaattttcccattagacactggatttttattttattgtaaaaatatttgacattatatttatacacattcgttgggtttgtcaggcttgcaacctcttcaataatccattcaattggagactaattttatttaattatttttttttcttttacattagaaatgatacacatttctatctcaactcagtttattgctcgtattctaaaatgttcttaataaaaaaaaaaacaaaaacaaaaaatgtgaaatgggaactagtcaaaatattttcgttaaaaagagcaccacaggagttatttgacgctttaaaccaattgagtgaggttttttttttttttttgcttgaaatatggatccatggcagaaaca

SEQ ID NO: 379042 - DNA, 3319 bp, Cannabis indica
gcagcatgacatcaaaagcttagaggaattgtctaataatggtttgctccaacctttaccgactgatattagttctcatgctgcagagaacatactttcaccttatctttattaaaatggactactgaaaggaaatgctcacgtgcctttggtgtttcgcaagtctgcgaggtgatctttggtctgctgcacatagtcaagactggagaaagtttgaaatttgcgtctgcatgcgttgatgtagtgttacacgtaaactgggaccatggaggtaacattctatttagttgatgtgtagaggaatagattgaaatggaggttcagccttcaggatgtgtagacttaggacaggtactagttgatggctggtctaaaggtgttggaattgatgaatgaagtttatgagtatttggctgattcaaatctataaatcattcccaattttgtgatttatggttgtagttctcctcttgaatcacaaagttggagaagtattgaaggtgttcaaagaaagttacatccattgagtaaaaatttcttggaagtaagacaataacatttgtatgtatcccttcttgttgggtgagtatccaataaagatacattttgtggctcttgcatcaaatttacctcaattttgactatggatatgagcaatacagtatatcctaagactttgagaggaatttgtgaaaccaaatgagattttggaaagtattcaaggaacgtttgcattggagttctgaactttagaattctagaaggcattcttatgaagtaggttgcagcaagaatcgcttccccacaaaatctcttaggaatagtaaaagtgaagagcaatgatcgagccacctcaagaagatgtctatttttgcatctgccactccattttattgtggtgtgtccatgcatgaacgttgatcaacgatcccattataaacaaggtaagggccaagagaggaattgaagaaatctcttgcattatctgttttgagcacttgaatattcatttggaattgggtttgaactatagcatgaaagatttgaaaatttaacttgtttcagatttttctttcataagaaaagtccaacttaggcttgtgtgatcatctgccaataacaagaaccatttgacaccagtgatattggatatttttgtaggtccccaaatatcatcatgaatgagagagaaaggatgatttataaggttgaggaggatagttgttgcgggtatgttttgaaaattggcaaacatcacattggaatagttttggatttttattattgaataacgagtgaaacaagcgctttaaatacataaaattaggatgacctaatcattggtgccacaacataatttcactatccttacttgattcaaaactgatattttgacactaataaataggaacacgacatgaacatgaattgtttcctttgaggatgtataagctagagcaaagttcagcattgctaatcgtctttcccgaatctagatcttgaaaaacacaagagtttgttaggaatttagtttcacagttcaaatctttattaagtttgataagtgagagctaattacagtcaagatcagggacaaataagactaaatgaagagttaagattttagagagatgtatggttcctttcccaacgactctggcatgagaaccatttgctatccgaacagtatgacaactcatagttggagagtattgagagaaaaatgacttgtcacctatcatttgatttgatgcgccaaaatcgacaatccaagggctagaagatgactttgcaacatgtagagaatgcttatcagaccttggttgagtgagtgcccctaaatcagaagccatggttggttgagaaggcctattgaatagttgttgaagcatctcaagctaatattttgtgaaagacacattttgcagattgggcatggtttttcagcttcaactgaggcgtattgcttttgctgtcccaatctcattttggtttctaatttagtggtttgccgtgcaacacccaataagtctccttgtagtgcccatatttcttacaatgatcacaccatggactacctttatgagactaattgtcatgatgctgaggcccccacgactattaaatgctgttgaatcgggtatgacctaatttttaagggctaccaatgttgatccatccatttctatagcagattcaggctgtcccatcatcactatctcgcaactttcctctctacgaacctcaaaaaatgcctctcgaagactaggtagaggtttggtactgagtatacgacctctcacctcatctgaggatttattaaggcccaaaagaaacttggaaacacgtcttttcttagtgattcgtttaaattggttgctgtcatctcgacacctccatgcataaatttcaaagagatctagttgctgccaacatcgattaagggcagagtagtatgtgataatagagtttccaccttgtcaaaggtcgtggagaagattttccacatgaaataattcagaagtattatcttggctggagtaagtatctcgggttgcttcccaaatatcttgtgctattttgtagagaataaaattcttactgacttcaattgtcattgagttgattagccaagacatcaccaagccgttctcagcacgccagctcctatattgggggtcatcaatacttggctaaatgtcagccccagtaagatagtcatcatgtcctcgaccattgttgaacatcataacagattgggaccattgaaaataattctgatcgttgagtttgtgactgatcactagaataatagtgctatcggatgggagcaaagtgattggagttgaagattttgagaattagtcgtggaaaggagtcaccactttttggagatatgtttccaccattttccattaaagtaaataaaaagagataacagattaggatgaaataatgatgaagagtaattgacaaaaggttgtacttttgaggagcaggagctctgttttggttactgaaaaacagaggtgaatagagaagccaactgtgattctgatagcatgaagcttactgtggtaaaagaataattttattctatatctttttcacagagtacaggggcatatatatacatacatatagctaattgataaaccactaattcgatttgttcttgagggtgttgaatttgttcttctggaataatagcctcatcttgatttgggagttgttcaatattgtcttgttgaggttccagattcatttcttgatcaatgacaggtttggaagcctgtacattgtctagaatgatagtagg

SEQ ID NO: 379043 - DNA, 5518 bp, Cannabis indica
agtgtttactctatcaaatgatagtctgaaattgcataattttcaactgtcataatcatccatgtgtgaaagaaataacagtttggaaagtaatggttctcgttaatttggaaatgaagtattacagccttttaagtagaagactacagagaaacccaaaaagactaaattacccttacctattaactaattaactaattaacagagttagttacaataggtactaaacattattactcttaacactctccctaaaacttagggtagatagggactctactcgaagtttgtttctaagcagtataaaccttgcattggacagtgcttttgtgaggatttcggttgtttgatcatatgcaggagtgtgcttaaccaccagagttttagctaggaccttctcccttacaaagtataggtcaagttctatgtattttgttcttgcatgaagaacatgctttgcagacatcaaagcagtgctaaggttatcacaacacactgttggccttggaatggatattctgagttcagatagtagtgactggatccaagtgggttcagctgtgacactggatagactcctgtactcggcctcagtgcttgatcgggaaactttttgttgtttcttagatgcccagctaaccaaatgggagccaaagtatacacataatcttgtagttgaccttctatcatccatgtctgatgccatcagaatcacaaaatcttacaagatcaagggaatttgatttttggagtgtaaggccatagttaggtgtccttttcaagtatctcaaaatacgtttcacagttctccaatgagactttaatggtgagtgcatgaacttgcacgctttattgacagcatgggaaatctcaggtcttgttatggtagcatattggagagctcccacaaggcttctgtagtattgagggtctttaactggatcactcccaatggaagataggttctccccccaaactttggagttggcaaactgttggcaaattgaagcttggctttgcatagaacatttgtgatatgtttggtctgagagagatgtgttgcagtgtgtgtcacctgaattccaaggaattagttgatgttaccaaggtctttgagagcaaattgagaattcagttgagtgataagtcttgcgatctcagcagagccatttccagttacaagaatatacactaggatgaatgtggtatgattggggagaattgttacaaaaagaggtgtctgccttggaactgttgacacccaattgagtaagtgtttttctgagctgatcaaaccaagctcgaggagcttgcttcaagccatacaaggctttatgtaatttgtagactagggtggtatcttcatgctcaaagccagggggttgttgcataaagacttcatttaatgtgccatgtagaaaggcattgttaatatcgagttgtttaattagccactgtcttgagagagtaagagcatctccaaccatgttctctaaacacactccttagctaaaataggtagtgagctttaaaaatatgaactccaaccatacaaaaaatgactctctatgatagagaatggatagagagctctctaaatgtagggagctctctactttttcgctaaatttttttaatagtattttaatctaaaactttattactttttcattattttattaaattaatttattttaacatatttaaattataaatattattaaataatcaaatataaaaaaaggggaatggaacaaaaaaaaaaaaatggccccccaatttaaactttttagctattttagctaaaatttggctaaaaaatagagagaggttggagatgctctaatagcgagtataattctgatggtaggtgacttgactacagggttgaatgtttcttagaagtcaaggccacattgttggtgaaagccttttgcaaccaatcgggctttgtatttagagactgttccattagggttctccttgatccttaaaacccatctgcaacctatgacttttctttcatgaggtaacttgacaagtgtccaagtttttttgtttttttttgagagcatacacttcactattcatggctgcattccacttgggatcaacaagagcatcaacaagagtcaagggttttttggagctgatgtatacctttggtttatagacatttgcctttgctcttgttttcatatggtgagcattggtagagggtaactgcaggagaggaaatggagggtggagaggaagattctagatcagtgatggtggtgtaggctcaggtgtagactgagatggtgagttaagagttggagtagcagggtgaaaaatagatggcctttggaacaggaatagtaggagttggatcttcagttgtaatagttttgagtaggtgtaggctgtttatgtttagcatagggaaagtggtactcattgaagatgacatctcgagataaagagtctgccagaggtagacagacacattatagcctttatgttttagactataaccaagaaaagtgcattcctcagttctaaaggcaagtatgtgtctattgtagcaggcgcacccgaaaacccttatttgagagtagtcagactgcatgtgaaagagtttgttaaagggagtattccctttgagtgctgaagatgacaacctgttaataggaaaggtagaggcacgaactgcctcatcccaaaattttaatggaagagaagcacgagcaagaagtgtcaaggcagtttcaatgagatgctttatgttttttctctgccacactattttgttcatgagtggtgggacaagagattctatgatcaatgccattgtcaacaagatatggggtgaaggcttgaaattcacccccaatcaaattgcagcccttttacgggaagattaaactctttttcaacaagagttttaaagttaatgaatgtttgaacaaatgtaattttgcagctcagttgtgtattgatcgatttttgcttcagtttgtgacgtgaagtacattccgaaaactgactaaagcttgcctgaggtttcactattcacaactcgtgtgagaattggttcggtcattgatgaaagtaaccaagaaaatagcagttgatcttgttgttcccaatcaacgaaggcaggattcaatgttcctgaagcacgatcattttttgagagaaattgcggtggtggagtagcagtactgataatatatcgttgaagcttatgacctctaatgccggaaagaacttgaggtctccatagaaggaagttatcatgatccagtttcgtagctaacttgtgggagaatacaataggcatgaatgatgaggctgcagcacctgagggtgatgactgactgacgacaaatcaagaatgagaatcagatatgcactgataccatgtgaaagaaataaaagtttggaaagtaatgattctcattaatttggaaatgaagtattacagccttttaagtagaagattacagagaaacccaaaaagactaaactgcccttacctattaactaactaactaattaacaaacagagttagttacaataggtactaaacattattactcttaacaccatggtcctatgattgagctttctgcctttgaataatcatgttgggacatgttttgcaattaatctaatcacttgagctattggttctcactggtaaggtcacttgacttctgtcatataattttggctcggtgtttttcagactgaattgtcttatgcccaatttgattacaattgcctttttgttaatattctttctggagggttttgttgtttttttccctcctagtcaatccatcttagtaaagttatcaaacattcctttctttcttgcatatagctgatatagattacacggctggtttgaaatagcttgttaagaggctttattgatagttatgcatctctgatattgccagatataaagatagaattagttctttctctcttgcatatcttgtgacctttgttgggttgtttttggcttcacatattactatctctacaagtagcagacaaaaggaagatggtattttgttagcatgactccaaattctaggatgaaatattcaaggaagatccgatacagttatatgttatcaagttagaatacatatatcctttatcctttaatgagattttttttttttgaatttctatgattaatttatgtaaaacagggcacagggcctttatcatcaatgcttatgaatcctcagtgttgcctgaaggttttggtgttagaaaagtgtcaacttggtgttggtggaattcttcaaatacttcaagctttagcaggtgaaaaacctgaatccaactttttctttcagataattagcaaaaaaaaaactttttctttcagatgtatctaatatgtaaatagctttactcacgaatcatttgattgctgttttaatagataacaactctctcgaagatctaaatcttgctgccaatgctgacactgatcaacataatactccacaacacgccacaacaacaaaagagtgcaccacagagatcgtgcaaccaaagactaacataatcgaatcttctcccatgatgtgtacactgcaggaagttgtacctactcaacagggtttccccctcgagagcgttgatttagatcagctcgaagttgctgacagtgaagatgatcatactaaagttgaagctgcggcatctggaattgatgacagctgtgcaagttcatgtcaaagaaacttatctcaagagtgccaacttattcaagaactttccactgccatcagaacggccaagaagctgcaattactggatcttagcaaaaatggtttatcaacaaaggctgtagagttgtatgcggcatggtcaagttcgaggccttgtcctgcttataggcatattaaggaccgaacaatacatttgttcacggagggtaagaaatgttgcataagatcctgctgcagaaaggattgactcttttatctgctattgttggaaatggtccaacagttttgttacaactgacctggtgaataaaactagctagcattttctgagttgccattatattgttcttccatgatgcatgttgcactgacacatatgttgctattgtatagataaggcttagtccgattaaatcatagattaatttttttttgaattgcagttcgtctgtgtaacagacttataacagtaactagtttgtattccttccatcatgtatattgtataggccttataattattgagattttaatgacatgtttactagcttaaattattctggagtatattttatatttccctccactttcagctagtgtaatggatatctcgctgtacgctcatggctgagcttaatttcaaaattttccttgaccaaagaatgagggttttttttttttttttttacaagtttagttgagttatatgtcaaaattttccatgaccatagaatgaaggctaattagtaattttttcccttgaactttgacatgt

SEQ ID NO: 379044 - DNA, 4882 bp, Cannabis indica
caaattgttctgtccatttctgtagcaaagtcaagggaaattagacaattggacatcaacaatgccttcttgaatggaaaccttgaggaagatgttttcatggaacaaccacaaggttttatcgaccaagaaaaaccaaattttgaattgcaaattatccaagtctctatacgaccttaaataggactcgagagcttggtttgacagcttaaaggccactctacttaagtggaaattccaaaattccaaggttgattcttcactatattttcttcaaaatctctcaggttataattctagttctcatctacgtcgatgacatcattgtggcaggaaataatggaaccaagctgaaggagtttatcacaaaattgaatgataatttttccttgaaagatcttggacctctcaattcttctgtggaattgagattcatagagatgatactggaatctatctcaaccatgacaaatacgtcaaagagctcttgctcaaaactggaatggaacacctgaagccttgctccactcccatgacagctgggaaaattttgtcaaaattagatggagagccaatcaacaaccctactgcttatcgaagtataattggagttttataatatctaagacacactcggcctgatctgtcttttgccataaataaattaggtcagttccttcaaagtcctacaacaactcactggagtgccatgaaacgtgtcctaagatatctaaaaggaacggtttatcatggcttacatattaaaaactcagaaaagctcactctaacaggttactcagacgcggactgggcttgttttcatgatgatcgcagaagtatagtaggcttgtgtgtgtatttgggagataccttggtgtcatggtcttcaaagaaagtacagagtctgaatacagggatgtggcacaggtggctgctgagatttcctagattcaaggcttgctaagtgaattcgatttccctgtaatcaaaacacctatgacttggtatgataacatgagttccagcactcttgctgctaatcctgtgtatcacactaggaccaaacacattgagttggatgtacactttgtttgagacaaaatgctaaacaaaagtcttgatatcagatacatatgccatgatcaaatagctgattgtctaacaaagagcctcaaacatcatcggtttcattttctaatcgacaagcttggagtggttgaaactcccctcagcttgagaggggccgttagaaaataaaatgagtcacccctgctcctcaccactgattatcatgctctgccacctactggatcagtcaatccttgtgtggtccttctctgcaacaaattccttccctttactcttagaatattccctgacatgctgatttggtggtgcccatataattgtgtaatgattgttttattattgtattagctgtgcatttttataatattctttgtaataccttccacttataaatacaaatctagccagccctaattgtgcgtgtgcagaccttttcaatcattgagcatttgtttattttagctatgttttaaactgcattgaatggagttttttggagaagactatgattgcctttggttttggattccaatttatccaggtgatcatgaaatatgttagcttagtttcgatgtcggcttttctaaatgatggtcctcttagacaaccttttccaaagaaggggctgcgtcaaggagatcccatctcataataccttttcatcttatgtagcgaggttttgtctacgctgctccttgaaaaagaagaccaaggtctgatcacgtgttttaaggttagtcggaatagtcctagtatttctcacttgatgtatgtcgatgatacttttatcttatgtaaagctgagatagaggaagtggaagaggtcttagagtgtaccaattcctattgttcgtggtctggttagatgatgatgtgaggaaatctgctctcatttctctaaggctgtagaattggcttgggattgagaactgtcttagtttttggagaatgaatagggaggataaattcttgggcaagtaggtgttatggttaaagagtaatgtttgtgattttaagtacattaaatatcaaatttgtgctagaattgaaggctggcggtgtaaactcctttcttaggcaggtcggtctaccctcatttgggcagtggcttctagtatgctggtatactatatgtctacattctttctacccaaaactttgtgccactagatggatcaagccattataaagttttggtggacgggttgtgctgcaaaaggatcgatgcttggctcttgcaaattagaattcacttttcttaccatttgatctgggtgggctcaattttaagaagtttgaagacatcaatttggctcttgttgcaaaactgggttggaagcttgaggtcgggttgaactctttatggactagagtttttaaggcgaagtattggggaagagactctagattgttttgatctattgaggctcctaaaactctctcctatggggatagagacattattgctacaaaagatcttatttgcaagcacaacttcattcttattcctaacagtatatctgtcgatctttggaactccccttagattccaattggatggagtaggaacagttcagagctgccttcaatcctatttcagggctagttttggctcgtgtgtcttctctattgcttgataataagaattggaacctccaagtggctagtcgttggtttgtccctagtactgctagttcgttacatatgatctctcttctccctcaatcttaggatgatacgttgatctggaaggatgtgctttatgggagtttctcctaaattggtctatcaatctattgttaaacacaaaattaggggtttacggatccaatctaaaagggacgttttgaacttgaagattttgtaagagggttgaaaatgttcttatagaaattagggagggacatccatcattttggaaacagacttcagcagatctttgaaaattcagtagttgttcaatttgtggtgagttggaggactcttttgctcatatattctgctattgtctcctcacaataaatcagtgtcgtttgcttgccattgggggatagtgcgaactttaattttagaagcccactacagttagtcaattggattttagatctcgagttcctaaaggacagaggagagagtgaagtggatgcctttactcgcttcagcagttacctctatgttgaactttggattgtcggtaaccatgcttagcatgatcaggtgagtccaaattgtggcaaagagttagcgaaggctttttctgtggctgctgatcaagctgaggttcgggagtctcgaagtattgtgtttcaattcgtccgtcacaatagcagtgacactgtgttataaggaagttatgttgtgtttgttgatcccgccttcaaaggtccgagttttggtgtaggtgttgtggttacggctgatccggagggtagtgtgttggaagctttctcgatctgtgttgatgcaagatccgctatggaagtggaggctcgagcaatgttccatgcggtgaatcattgcagaattcgtggcgagtttgaacttttccttagattgtcaaggtcttgtgcttggtttcaatacttggaagccacctgattggaagattgcctccgtgttctagcaaattttggaaggtctgaagtatcttcccaattcaatagtggtttggctccctcgtaccaagaatttgttggctcataaactttctaagcttgcgtttaatttgttgatgtttggttttttaactgttgaggagtttgccttcttgtggtcatctaaactatttgtttccttgcattggttttgagcctgtttttatatagttaaagttcataaaaaaatgggtgtatctttggtggtggtgaaattcagcccttatggtgtatatctttttctgaggagtagagtacaattttttcctttcatatacaaaagaataaagattacgttaaataatatatagaataattataaaacaaattattatttaaaattagattatattattaattagaatattatattaatttagtattaaaagtcaaaagttaaatgtgtagaaaattaaagtgaaatgattagacattaaaattaaatgttgagtggttagaaagtagtagttaaatacataggggataggtaccatgtcttaacctcagtctatgctttgtgcatttaatataagggcagtttcagctttaacaagaaagttgtaactcaaattaggtataaaagtaaagaaatgctaaaaggcactagtaatgcttagtactttcctatgtgttattatcgctattagtctaattaagtatcgggttccatataatttaatgtaataatttttaaagaatatcgctagccaatcgcaaaacgacatgtctagatgttctaaatcctactcgtactcaataacaatacttgaaaaattatgtattgtatgcatttactaattaaaaaatgtattagtattactatcattgaaagtgagggaagtttcgatgatttagtacgtgttatgtagtgatgtaataatcataaatatacttaccgtccagtccatgggtttgtggctctgagaaattttgaacaatataaacctccaaggcattgaggattggttggtgtgtggatgaggacgttgcgaagaggctgtagtcaatctgatcaccactcacaggtgcaacacttgataaagtggtggtacgcaagtactcaggagtaaaggctgatcatcaccattccataactccagattttcatagatgaagaattctcttgactcatttgcttt

SEQ ID NO: 379045 - DNA, 3880 bp, Cannabis indica
accacgtaactactctctctctctctctctctctctctctctctcttaatttcttacagctctctacactcttattattttattggttgccgaaaacctcggttcaacaagtgtatttttatgttgtattcttgttattttattattgatttttctattaattatatattattttgggattcttttatttttacacttcaaaatagtttcttatagtatttttacaaaaattcacataacaaccaacagagcaatctaaatcacaatcaaaatccacatagcaacccgaacaacccaaatcgtaaatttaaaaaagaaaaaatttaaaagtagtatatgagatgattcctctattatttttatattattttgttattgttttgatgttgttttaatattattttttatttattattttgaattttttttatatttttataaaataccgtaaatttttttaaaaaaatataaacattagtattttatgtaattatttgtaaaaaaatagatatatattttttgaaaaattctccttaaaaaaaaaaaaaagcccaaagctttgtaatgtatatctaatctaagaaagctaagaaagttaagagcctaaagttagctctcctaccccaactacattccattaattttttcacttactatcttccaaaccaatttcctaccttcattatcccatttggatccccatcttcattcccatttattctctcttttggttatggatcttgcataagattggtacttaaagttaagagctttattcttgtttttctagaaatttgttcaattgggtcttttccaagatgaaggtaaacgtaatctcacgaagtggtagagaagtaatcaagggtggccttgagctcaatgactctgtaagttttttttttctgtaaatttttggaaaataaaaattgggtttatgaggaaatggaagaactacgataaagtttgaatcttttccattttttacttgttgggttttgattgaaatgataaaaaaagaaggattcggtgtgaaagattcaatttttttgttacttgaaatttgactatagactttgattttgtgtttttttttcaggccactgtggatgatctacaggaggcgattcataagagaagtaagtaattgttaatattcaatttttcaattgttttggtcaaaattaattttcacttataataacaatgaatagactttaagttcagttatatgatttcttagtgtgatttgagaagattattttacctattaagaaaggagattagtgaagttttaattaagtttcagttcattttcaccatgaatattgttaatttgttaattggtacataattaagtatttgtaataagctttttctttcactttcgattgaagaaactgttatagtgttatgaatatgtgtgtagatttggaatttagaagaataaaaatggtctgattttgtttcaaaactttgatttggcttggttttcaaatgaattgttatgtttcaacacctttaaaacaagtcttgaattggtactctgagcacaataatttgactttcattaccttaaatcaacagcaaaaaagttctacccttcaagacagagacttacactccccgtccaacagggatcgaaagagaggcccgttgtcctcagctcgaaaaagagtctcaaagaatacaccaatggaaattccaatgacttgactgtagtgttcaaagatctcggtccacaagtttcataccgaactctctttttcttcgagtacttaggtcctttgatcatttaccctctattttactacttcccggtgtataggtactttggattcaaagacgagcgagtcatctaccccgtgcagacgtttgccctttactactggtgtttccattacttcaaacgcattatggaaacgttctttgttcatcggtttagccatgctacctcaccactctcaaatgtttttagaaattgtctttactattggtcatttggatcttacatagcttactatgttaatcaccctctttacacacctgttagtgacctacaaatgaagattggtttcgggtttggaatactatgtcaaatctcaaacttctattgccatatcttgcttagtaatcttcgcggtgctgatgggagtggagggtatcaaattccacgcgggtttttgttcaacattgtcacttgtgcaaattacacaaccgagatttatcagtggttaggtttcaacatcgctacacagacaatcgccggttatatcttccttgttgttgctgcttatataatgaccaattgggcccttgcaaagcaccgtcgcttgaagaaggtgagtgaatccttcgatcgaaaattgttatcattcttttgttattgcattgtctaatttggaatctgtcaataagttaatcttaacttgtcatttgcagctattcgatggaaaagacggaaggcctaagtatcctcgcagatggataatactaccaccatttctgtagaacagtttagcgagctagctagcgatcgatcgagcaatgtctactatttactttttgccctccaaacagtatgaattgttagagctccattttcaccagagctgattttttgttgttgttgttgttgttgcatttttcagacccaatttttctagtgtttttagtttaagtttacagatgtaatggatttcaatgaataattattctagttggctaagttgttctcttgcattgaatcttctcttaaataagaatgactttaatatgtaacatatttatgtcatatatgtgcatggagttacagtttgaaagtttaatcgcttcggtttggagggtcgccataactaagaccgaacgctttgcaccatgtaccacaccagcagtgaccgcgctttttgcagatgaacgaacacacaacacgaatcttgacagcccgtgagatggatttcgcagctgctaatgtcggtgttgcttaatcatcaaaccaagtttgtgtttttttgaatggaaaaatcaatcttattaaccatcaaatcaactagtaaacaaggtagcaaatccaccagatcatcctccaggtgaaaaaagtacaatcagagtaaaatagggaagcttttgcaaaagcatgagcaaccttatttactgaccgtttaataaaaaaaacagagacattttttaactcagacaataaatcattaaaatcattgataacacaaccaaataaagacaccatactacaaaccaagtttgtgtttaattaaacatataatgaaaaaaacacaaactttcaaaataccataaaacaaaacctcagtttgtgtcacaattatgttagtgatttgattgagtatttacaaagtttgcacatccctgtagaaaaccatagacttacaacaacagtttttattaacttcaatttttatagagacatttgttgacatttaaatgggaaatcttatttattgaacttattgttaattctttactagatttctttgtagaatagagagtttatcattaatttattgatatattagtagtttattatgatatatattatattagtgtttatatatatatatatatttttttttctttttaaaaaaataataattataaaatagtggtgatcgtaggaggtaggggtgttcaataaaatttacaaaccgcccaacccgaataaaccgcccaaaccaaaccgaataaaccgataaaaaatacaacccgaaataatacaataaaaatccaaaccgcccaatgaatatattgggtggtttacaaattattctaaaccgcccaattaacccgaataaaccgaattaaaccgatttatatatttttttttataaaagtgtatatattatatcacata

SEQ ID NO: 379046 - DNA, 6152 bp, Cannabis indica
atgagacttaccaaattgacaagtatcacaaaacttaacattctcatttcttggaataggtacattttgggaggctaggacttgtttcaacactctaaaagagggatgtcctagtctcttatgccatacataactttttgaaataaaagacttaaaattacacggctgtgacacattttcttgggttaaaatagagacaccagtaaacggtatagactggtttttgacagaatgttttaatagtgacttggctgtagtgacaagctggtacaagccatctctaatcttcccttggagcagcaccttccttgttgttttgtccttcacaaagcaaaatgaagagtcaaattcaacaacaacattattattagcagttagcttagatacacttattaaattcttagcaatcttgggaacatgtagtagttcattaagcaccaaagactttttcagtattgcttggtaaattactagaaccaatgtgagaaatagccacttgatttccatcaccaacagttagcttttccttaccactgtagtcggatttttggttcagattagacatagaagaagtgatgtggttactagcaccactatcaacatacctcacatcactatcaacaacttcaggagtagcaacataagcagagtgtccaccattgttaccactcgaattttgtgttgtttgagctggaggatcctatcccatgtatgattcatcatacccgttgtagaaatatgctgcagaatgaccatacttgctacacacttggcaagttagtttgggattcttgttggatcgaccacgacctcctcctcttgcacctcccctattattttaatgagaagtgcctcctcggtgtgaattatagcttcctcgatcacgatttgagctgggattatgactggtttttgtgcctatgttggcagtggccatatttgctgtaggattcaagctagatccagctgaaggattaccagatttgttgttatttatcacctgcaatcgttcaagcttgctttcaaaacttaacagcatatcttgaagctcctgccaagagatgttaggttttgcctcaacatgcacaacaatagatagatattcgataccaagaccagaagtgacattagatacgaaatgagcttaatggtatggatctctagcaagggctagcatatcggaccgcatttttttgtctcaaataatcggtcattggagtcatacctttgcgagtggtttgaataagtgttcgatattcgtccatttttgccctagaatatgcttcaaagagattctccaatgcgcgccaaagttcagcagaggtggcacaacccatgacctccgttgcaatcgtctctgtcatggagctgtagatccagcccatgagtagttggtcactgataatccagtgttcatactccgaattgagtgtaactttagtcccttggtctccttcagcagcagtttcagtctgtacaaactcagggggacatggtctggtaccattcacgaatccgtcgagtctatggccatgtattatagttgataccattgttttccatagtgtgaagttgtttctatcaagcttgagggaaaatggttggtttagggtattgaaaggctgagtgtaattgttggtcaggttttgagaggagctggcattccctatgccaatcgacatttgagcatcagggtttcgattggtcggtggtggagtgaggggagactaagattgtccagcggacatgaaggggatttggtatttgctataataccaagatagaaaactaggacaaattggatttctcagctcaataagactgagtactgggatttcattatatagcaaaagatgaatacaaaatagccatttaggcattgccacatggcatcaaagaaaacgaggcataacaaccttttgtaacaagagaatattttggaatgtaaaaatatgacaactaatcattggtaatgattgggtactgttgcaacagtagagatatagtgtaccacctacacactattcctaacaatgagattaatatatataatgtattaagtgattaaattatataatatatagtatacacatgatctgtaacatataagagtagttataaaatttgaaaataattttataatttaaaaatcacatttgattatatatgtaattaagtgagttattaagaaattaagaaattaatgagataagcttcttgttgttagaaactgctacaatactcatttatatcatttaaatgggtgttggaacattggaaaaagatttaactcagagaggagttacaaaacttaatattgggtttttaaaaactgttgttttatggttgataacaaattattttatggttgtactcctacgtttggagcaagttttgaaataatgtttataaatattcatgaacttattaagcatgttcccaactctcttccccaacgtttttatcttaataattaccaattaatgtttaggtaataaccatgtggtgaagaaattttgattttcatatgtgattcctcaaacactataaatagaggtatttagttcatttgttaagacaactagtttctatcaagagagcacattgcaagaaatactataggcttaataaatccagaaagctatttccattcttctcttttccctaagtgcttgtggtaggggaaaataaactttttgacaaagttgtaagaccttgttgaagtttggtgtttcccctattatacacttgttgtgtatgtgattttgagattactctcacatctcttatatatatacatgctatttataaattttgttttatgagtagcttattgctttgagttgtaattcttctcttcatctctttaatctccattttatgtgtatattttgtttagcattgtaacattattaatccatgattttgtcctttgtattatttgtcgtggtgtttgtagtcttcttattttggtatttctattgtagcacaacaagttccaacaagcaaaagtcttgtgcaaaacaaaaataatcaatgacttacgatttagtttaccataccaaacaaacacacaacacaataaagaaacaatataccaagagatctcaagattcaagtaatgcattaagcagtaaaattgaaaagaataacactaggttcaacgagtttgtgccatgtgcaatgctctatatctcggtctgaacagtagcaactatatctttatggatatcagtttttacaaggttacaagaatcctcacaaactgttagagattacgagaagaagattctctctctagtataggctctttctctctcaaccttacactatcacgattttcactcaatcaattatggtcttattcacccacaagttacaaagatttataactatttatagatttacattgttgccaaaactatctcctaaattatcgtggcacatttacatcgccttaaaggatccatgtcatcaccagcaataataatccacaccatcttgaaaaatacgctttcagtacgaataatctggaagctatataaacacacgagccttctaggtacgtacatggcttccttgctggatggaccttcaagattgacagtaagctattcaggagtgtacctcgagactaataaccagctatccgagagaaacattctatatgcggtacaaacttacctagaaatacctttcggattctacaagaccttccgcatagggctttccagatccacgctaagcttctagtatcagctattcgaattaacagcttccatctcggatgaaaaaacttgtaaccataaccaacaaatgcccgccttagtttcaagttgaagtcacttgataagtcattattttcaatgttgctgtctcctcagcccctccgagctcagctgactccatttagctttaggcaatgctcaaacttactacttgtcactaccttggttatcatattagaaggattgttctcagttggaacttggaaatcttcatagcttctttctccataacctctcgtataaaaggaagtttgatatcaatgtgcttagtacattcatagtagtaaacacgtatccagtcaaagacattcgcatatcaatacaccctacataatcataatccacataacaattaataacatcacgtcttcattcctattttataaataccaaatactggttccttctcattagtacccttcaaataacgcaaaatccatttcaaggcttcccaatgctcctttctgaggtttcccataaatctactcaccatatttagtgcatatgctttgtttggtctagtacagaccatgacatgcatcaaggagcaaacaacactagcatatagaactctcaacatctccgatttctagtctcatctttcagcatctgagtagcactcaatttgaagtgttgtgcaagtagagtactcattgccttagagttactcatttcaatggtatttagaacttttttgatgtaactcgtctaatttaagtacagtagtcttttctgtatttcccttcttatatccatgccaaagatcttactaatcggatccaaatccttcattccaaaatctgtctttagctggagtttcaagtgcttgatttcttgtacactcttgttggcaatctgaatatatatcatctacgtacgacacacagatacaacaatagatacaaagtatctccatactggcagcctcctcactcggtcatgaaataaaatttatttttgaatgaaataaaattcaaattttagtagatttttatgtagaattttaatttttttcaatataaatctaataattagattaaaattatttttttattaattttaatattaacttgaattaattttagatattcagagactttaaatttgaaaaattaatttttttaaaaagttggtttttatggttattttaaaatttgagtatttattattttatttattaattttaattataatatcaaatatttacatatttcatatatttatttaataaagtatgaaataattttatttgacaataaaataataataaaatttaaaaataagttagatattttttaagtttctaaccataaattataagatttagataaatgactattaatttttcattttatcggattagatatttattttataattatatatttcgtttaaataacattaattttgatagttagttgattttttttaatagagatttagggttgtaacaaccctaaatttttgaaaattaaaagtttatttatttatttttatgtataaaatgaataaaaactcaagaacccatgcaaactcaaacttcatagaaatcacacgagtaataacagaaaatactcaattcacttacctcaaatatgttcctccaagccccaacaccaaaacccaacaaaatggttccaaactcctcctcaaagttcataatttccaatttcgtaaagagagggatagggttggtttgagagagaaagactagaatttaccttcctttgatttcaatttagccaaaaaaaaaaaattaatacaatttttttggtaatatttggtcgaatgaccaatctgcccctagggcctataaattacataaataactaccaagagtagttttttcatttcataacacacataattcagatattctcataaacattatgttataacataatcacaaaataaatatactatatagtaatacattccatttacacaataaatatcaaaattataattttactcttcacaagttaaaattacgaaaaaatacccctaactcataaatgaagtcttaaatataaataagtgttaaaaaaatttcaaataaataattatataataatataattactcaattaccactaactaattttaataaggattgataatttatttactaatctagggatatttcaggctgtaagggcaagtcgaattgcaggcaactatgcttgggccacctttttattttacatattaaaaaaatcaatttgccaattagaagtaagaaagaggaaaaagtaataaaaataaggggatttttacactatatgtcaaatttggtactttttttacatttttatttatgtttggttttttaaacttttttataaaatctgtttttcaatttta

SEQ ID NO: 379047 - DNA, 892 bp, Cannabis indica
catctagccatagtccctttcaggataatgattataatgtttgaatcactttcaattatcacaaactaattttttgatccattgctgaattcaaagcacaaacacaagtctcagcttctctaaaatagccggttgatgaactcatgaaaaagatagaaagaattggatctaatccacatcacttcctctaagtgatttctagccaaagcagccaccattgtcaatccccacagcaaaatcatgattgattttgatacaacccaatgggagagaagcctaattatcagcagagttagcgaacaatttagaacaaagagagcaagaaaactctgcaaaataagaaccaatcaagttaatataatggagaatatagtaaataaggttgttatgaactttgtcattccgaacattttaaattgtgtccaccatgattgaagcataaagaaaaatattatttaaaccaacacccctctcgttaagactttgtaagaaattgacccaatcaaagcatctaccaccattatcttgtaaaggaacaaggcctgatggaaatgatctccacaattgagaatcgaaattacaatggaggaaaagatatttcatggattctttttttcttccacacaagggcaaaatacttcatcaatgaacgggcacaaattggcaacacatttgacaaaatcgaccaccaaaattttttatacctttctataatttttgtattccacaatttattccataggaagggatattagagttggcctcacattgctaatttgtaaaaataaattgtcatatataagatgaatggactactcctctcattgccaattggttttgagatagaacactattcactttatccttaaattctaacatattatcagagtcg

SEQ ID NO: 379048 - DNA, 7442 bp, Cannabis indica
ggaatatgatatgattccacaacccaactttttcttgggctaaattgtctcattaataaattcccttcacttccaaggatttttttttttttcaaaagaactaataatagctcacagtcacctattattagaagtactattaaggtatgtgcctgttcatataatatttttagtcctcctttattaaacaaatattgaattaacaacaattaaaaaagggtaattcaatttctttttaaaattagaataaagaaatgaaaaatattgtcattagagtgaatttcggccaataactttcttacaaaaagtttatattgctattatgcaatctgtatttcaatctaattttcagtctatatttttttaaacaatttgttaactttttgcttttatttaatttggaaaaagaaataaattttgacttaatttgagtaaaatggtatctcattctaaacaaaaaataaaacagaggacatttttttatttgctttctcaaaatatttatagacatgattatagtgtaccatatgcattccaaagcctatatatattttttttatatattaatagttgcttaacacattataacccataatctataatttatgtctgttaaaaaaaatagaatttataactatgtttctgtacttttttctttccacagtaattatatatataactattataactaaattgaaagccaatttttggtaattttattcataaagtggatttttttatgtaaagtgactaacaagtatcttattagtattataagcgactaaaatattttatcagcctcctcagcagaaaatataaaaaatttgagaagcaagataattttttgttattttgtattaattgtgatgtagtatttttattaaaaaaattgtaatgcattaataaaataagttagttaaagatcttttgtaattagtttgagtttaaataggtatacgtgctatgtaaagagaataatgaatagaaggcccaatagtgaaggcccataccatttgaggtgtaattgggctgcatcttcttcttcatcttcatcttttagtctgcactaacgaaaaagtttacacaagcatcttcataaaaaagcaaaagaaaaaaaaaacaaaataatagcaatctcttgatggcttatcagaccaatcgaaccctgcgaagccagggcaatcgtgacgaagccaaccgtctcaagaacggcatcgacgccggattactgtctggtgcacagcctcaagatattgacgtcgacgacgttgattcaatttcaaacgtttcatggagttccgactcggatgaggccgacgacttttacagtaagaagaagcgtttgactggtctctcggcaagcctacgagtcttatcggattcgctcttgagaatggagaaagtcgaagctgagctcaacaagacgagggaggctcttcggttgcaagctgagaatcggcggctcgaatcggaagccgagttaactcaaatgatgttaagaactgaattgcagatagcttcgtttatttcacggccgattaacgttagtaatagtagaaaaaggaagcgaattgaagaagaaacgtcatcacaacaagtttcagtttctcaaaggtaaagaaaaactttttgactcgtgactcggtctcgttgttttggttggtgaactcactgagttggttttggtggctttttatgcagggatggagctttgctattcacattactccaatgcagtttgctattttagtatagaattataagaaccatgactcgcttctcaggctgagatgattattccatgcaaaaatgtaatgtcgtattttcttacttgtttatgatcgttttacatgtattattgtcgtttttctatgtatttcatttcagtagtagttttgctgctatgatttcatttgctgtcctaataaaaaaacttacaaaacttctagcaataaagtatcctaactagcctaacttaatcttaatcaacaacgagttgagatttccttttcccggtcttcgggttctggaatcttgcctctgcaatactcgacaaacccttttggcgattcatagcactttctacatactctttcaatggcggaagaaggccttgttcgccatctctggaagcttgtcctcgaattatctaacaaagtttgacaaataagtttgataataccacatgaaataaactaaaacgcaagagattaagatcacttaccttggatgcccatgaccgctcagcttgttgacacacttctctgatatcccttccagacattctgtatttggcaataaaacgttagtgaaaacaaaaaaagatggctagcttcggctcaatactagtctagttgatgagtcaaagtcaagcttactcttctgtaactgcagtgagttcatctaattcagattttgtgaggtgcttggcatactgagcagcaatctcctgccgtgtttgccgatccggtaatccaaatgtgatgagtgaatcaaaccgactgaggagtattcgcagagaattagaagataataaattcggtttactcttctttaacacgataaatctaagtgcgagttagaaaataatcgatctggtatatgccatatttgagccatgtacttacctaatcaatgcaggatcgagatcttgttttctgttagttgcagctattacaacaactttcttgtcctgttcaaatccatcaatctgcaaaggaaaaaaggtaacttgtgtaaacaacaacaaaatatagctatcctaccaaccaagatgttactaaaattccttgtgtgtcaacttctttgctggtacaatcccaatggcaatacaaaacttgaaaaaggcttatgatactgcagggtagaaccaagcggcacaaaatgggatcaagggttgcagtaaaagagggagtcaaaaatggatacaactcttgcatccacattctttctggcataatgcctagattctttatacaatgtgtttgtaagactatggactgcgcatgaagtatgaacaactcaattatatataggaagacaagtaaacaacaaacacttcccaatgggaaagtccaaacccgtacttagtgtgaattatttttattagttagcagggaactggaaaccgaaatggccaactctcagccaggacatttctaaaacagcccacacaactttccatcattagtgaaacagttccccacctaattctaatgtcaaagatgagagggactgtagatagcacactgggatcgtagcagcatgatactatgctggtcgagccgcccagtataaactatgctattgcatagaaaatagatcgaaatccaagaagtacctgtctaagtaacactgacaggactctacgtgtagcttcatgcatttcaccatcacgggcaatagcaaaagaatccacctgcagtggtgtaaaagaaatcaaatactaacaggaaaggctgcaaaaaataatgagagaaaaacttacctcatctaggaaaataatagcaccctcaggaagttcattggctagtgaaaacacctttgctagcaagcgttcactctctccatagtactttgacatgacaacctcaaggggcacatataataatgggacaccctgccaaataaaggtaagtgttcaattttcagtccaaaaattaagatacgggcttgtagaaatacttaggagcattaaggaagcaaggcataacacaacagagaacaataaatatagcattgaaatataaggaaaattaagataaaaactataggtataatagtgaccagtagctcaccgcctgattggcaatgacacgagcacaagatgtttttcctgtacctgaaaatggaaacatggtaagtatgttccccaaaatgaaaataactgtggattggaaatgagatgttatattaattagccagacaaaatggaaaagtgaagtgtgtgccagacaaaaagttccagtgcaacaattcacaattcaagagcatttgagcaaagaggatatatagagagaggaggaaaactgaaacattaactctaatttctggtcacgaggtaacaggtaaactctagtataaaacctggttctccaccaatcctgaaaacttgagataaagaaagtggcctagtactagtagtccataaagccactagtaagagaatatgttcaaactctttcgataaaaaaagaatatgttcaaacttctgacttgattatttcaggtaaatcaatatattaattaaattgataatattctacagcgtaaactataaaatagagtactctatcttactaaaattatctacctggcgggccttcaaaaagcacagctcgaggtctgtttgattcaaacttatgtcgtgttccccgggcgatatcatcatatacttcaggactttgtagagccaacaaaatggtatcttctatttccctatagatcagcagcattgttgaaacgtactcaattacattaaaaaatatagataaaattatcaaacttgattccagtcagaatacatatgactagactacacattatatgtgagcattaatatgataactggcgtcctaaactacataggttattgcattatgatatgtcttacttaaagcaacgagctacacattccatcccaaatgaattataggtcgtaaattgatatgtgtctatgcgccaaacagtatttcactaaccacaggacaaacttaataaaaacaaagagataattgccttagtttcatgttttcctgtgaagtttaaatcgagctcatcaacagcctatattccatagcttatcaaaaataggcaatttatctactttctctgcagagtactggtcagtacataattgagaagataacttatcccaaataaaacattaacaataagataaaagtttgaaaatgcaacataccgtttctgctgatgatacccagcaatattgtcccatgatatttcactgctcgtggaattcaaatgcggttcttcaaggccataaaccctaactcccattgactcaagagtagaaactaattttgatttatctgaaggtggtggcatttgttttttttccaatgaattgttttctcttgactttctccctgctaattgtaaaacagatacaaatgcatcaagctcttttgcactcaagcttccattttttataaattcaagttcctgcagtaagtcatgctaagcgatgtgaaaatcaactaattcataaatctagtggccgtcatctgctaaagaaaagtgaaaactagaactccatatgatagtaatgccataaaactgctgaaatataactcacaactttatctgaagtaacaagtgatccaaaaatgagtacacatagatctccctccccttcattcccttcggtttccttctgtttgtctggccgagtaagtgttagttgccaagatattgcactgaaatgattcatatagaaacagttgacacaatgacagcaatagctaatttagtaattactcaaaaatgtaataaaacaagtaacagaacataaattaaaatgaataatagaaacattaaaaatagaaataaaactaaacaaaaaacttatcaatagtttatataacctgtcccaagcacgcaatagcatatctgatccaccgccatgttgttcaacctttaacccaagctctgaaacaaggtttgcaattagctgtggaacttcacacgcaggaggaatttgcaacttgacagttacctataacaagttatcataagcttcagtgaccaaagttcaaaattaaatttaacaaaacataaaactctcacagatgcatacggattacatacatacattcatttattggtttaaatttcaatataataatacttgaataaaatatgttctcaagaaaaacattttttttaataaaagacacaactttaatctatcaagctatacaccacttaaattaataaaaccacagtaaggattttaagatttctaaaacaacattattataaaatgtagtaaaaataatttcttttcaaaatcaagaatttggttctttcggagaggatactccattactgctctgtaaccttttgtcccttgacagcaaccgtaaagcggggataagacccagggcgcattcctttgcttttaagcaacgtttcaattctgtgtcgttctctcttagcaatttcttccaggtccacataatttgctggagaatctgttggcaaaggtgaggaagcaacctgcgtagaaataaacatcattgcaaatttccaaatcatttcatgaaaatgaatgacactacaaataagtaaatatcaaatgataaagaatgaaaaatagacacacaacctcgtctgcatcagcatgtgcagtttgcagtccttcaactccaaataaactagctaagagagcaggaagtagaagatacaacccgttaccattgggtatcgaattggaccagcgaatttcagatgcattggattggtactggtggtggtactgaacagatcctgcatatattgaaagtaaagcttaaatattacaaaacaacctgtaagtacgttgattacacccaaccaccccctccaacagaaaaaataaagaaaagaaatttatagctgtgattatagaacacagaagaatcagagtgacataatcatcataaaagcactcaatgaaattggaaatttttccatagtaattataaagagaagattggggtaaaagaggagagaagtacgtacggagatggagaaggcgtggatttgaaattgaaatgtagggggaggaggaaacatgatgaggagtagggtttagggttttagatggagggaatcttcggagaagacgagacgttttcaccagtcgctctacgatgcccataccgattctgcgccttactgatttacaactctgaattctggtctccaactctcttttctatttctcttcgttgaactggcgcgcaacacaccgttagctgttatgtcaatgattttatttgtattaattattgttattattttctttccgttagattaaagtgattgatgcccttaccaaaagataataataattataattgatgcagaaaattatcaattaacatcatttgggttaaaatttattaatctgcttttttcttactgattttttattttaatcttcgttcctgaacatttaaaaattagttgtaaaatttacatttaatatgttgaatggggttgtcttcgggctataatgtatggcatgagttatcatattatgactcgtgtcttctcggtgcagtacaaaattatacattgtagccagatgacgggtctaatttgtccttctggtggtattcactaaggtgattttctatgggaaatttgattttttatgcttacatttggttaaaaaaaaatttctaaacaaataataactaatatttgtaagatat

SEQ ID NO: 379049 - DNA, 2386 bp, Cannabis indica
taccgtaaatggttcagttctaaaatatagtaggagtatatgaatcagaggaaaataatagatgatgatttctcagtttttacagtcttgaatcatcattttcgatttttatggctgaaaaaagagttaaaacgtcatcatctgaagatggggaggacagaatttcgaaactacctgatgcaaccattaaacacatattgtcgtttcttccaactaaggatgtggttcggacaagctttctttcaaagcgttggaagctcatgtggtattcagttcccactctctatttccctgatttaaatttaactgccaattatgtggacaattatttacaacaccgcaaaagaggaatatttttcatgggtgattcggttatcactaggttggagattagagagttttgttatgattatgaaacttctttgtgtggccccttggataaattgttagcttttgcagttgagaataaagttaaggagataattattagcttctttattaacttcagcttctattccttacctgatacagtagtagtcaacgcagtatgtttgactatcttggagttgtgtagtgtgaagttaaattcacgttgctcatttagttttccgtctttgaaatcattgtcattgtcttatgttctgcttgccgatagtgatgcgttagataaactgttgttgggctctccttcccttgagaatttggagttacatgattgtaatttgagtactggtgggaagctccacatacgtagtttaagcagcctaaagttcttgagaatttaccaacctaaggttatagtggggaaaattggagctgtaaatcttaaatctttgatactaacagttgttcactttgacaaagtaaatttctcagtgtacaaggcaatcacaaatctcactctaaattgtgattggcatacgaacaactcgtcctcagtagaatatgttatttcaaaccttcctcttcttgagaaattgagtttggatgattcgtgtaactcggtgggtttgaagcacattaaaatctcacatcaaagcttaaaaagtttcaagtttgttagcaaagatgacatggttgttataattgaatccgctccaaaattagcatcattttggtacaagggtaatgttaagtttagtatatcaatggtggaggagtcatccaatttgttgaatggaacattcataattcacgtgccagaaaactatgacggaaattggtttgttagtttgatgaaattttttctgaatctcaattgtccatggaacacagtaagcttgcatgttggcaaagttgaggtatgttgttacatgtcttaattgattctattgttgttattacaagttttaatattagtttatttgccacacatctaataatttaatacattttgcttaattttatacttgaaggctctcatcttcccggaagacatgaagacagtatttcgttctcctttggttaattgggagcatatcaaagtttttactcgatgcaatcctgaaagggaattacagttgagggatactctgcattggatttcaccttgtttaaagactttttctgtaaatgaaggaacataaatggattttaataaataaagatggttgtcttctctgttctccttttctacattagtccttttgagattgtatttattttataagtagttcaaggtgttcctctttatcttcttcttcaacctaaactcaaaaccctaaaactgtttctcctcaattcttctccaaacaaactcaaatctgtccactgcaccaacaacaagtaagtaacatcaaccactctctactcttttatggatcatgggaaattaacagaacttgcgaaagaaaagaaggaaattaatgcgtgtttgtttgtctggtctgcattgttcatttgggagtactttatggtgtttatagatacttcgttgttgtatgtgtgtattttgtctcattttatttatgcatgagtaatttatgggatatattatgctacggttttacagtcctcgatccattattttcgatttttaaggctgaaaaatgatttaaaacatcatcatcaccaatttcaagctattcatgtcttgaatgatctccgtgtcatttccaaccaatacatccattcttccttctttgtaacaatcataagcccaatacactaaaattgcttcttcttcatcaccaatttcaatatcaacattactcctacaacaaatgatcacaagtagtaacactccaaagctatacacatctactttaaatgtgattggcatgttgctgtaccattctggtgccaaatatccctttgtccctctaatgttagtgttagtatgactctggttcatcaacaatagctttgctaatccaaagtctgcgat

SEQ ID NO: 379050 - DNA, 5773 bp, Cannabis indica
ttcttgctgagtcatttcatttgaaatttgctagcggttctgataatgcagtgttatttgcatttggtctcaggcattggcaagtgttgaagaagctctcacaaggcttgaaaagttgcttcaagatttgcatgtttcaagttctaactctggaagagaacatttaaaagctgcttgttctgatcttgagaaaataagaaaacttaaaaagaggctgaatttctggaggcatctttcagagcaaaagcagcttctcttcagcaggtatttttgctgttacttaaaatagtttgcttgaaagttttgtctattagttggcaatttgattgtttcatgacttggacaaaagaaaggaaaagaaaaggtaggcattgctcagtgagttggtgctgctttttgctcattctcatgtcaatgcagagatgcaacaaactacattctaagtacctttactagcatattctatgtttattttatatctatttatttatttttatggctgaagtagatattgaaaacatgtggaagaaaaaaacttctagttagtgcatctgatgcttgaatttactctaatagtgtgtatctttgtttcgataataactaatctcttatgtttaactagttttgcattttagtccccaaccttatttttatttttatgacatgtaggtagacaatctttagccaaggatcccttacatttctttagatttttattttattttcttccaagtgacactgtctgaaacaactactttgaatgaaacttccaaaagactagccaatgcaaaataatttactggaaaatctaaaatataactctcatgctaaggggagaatattagccacctgtttttggagtgtgattttgttcaagtattatgtccaaattgctcactgaattggacattcagtggtgcatgcctgtgcatttagatgatagagtgtgtatgatttgagtgagggaggttggccacattatggacagtagctatctttgctgtgtttagggctgtgtgtggctagaaagaaataatagaattttcaaagataaagaggaatcagtagcagggctttgggagaaagttaagttttgggtagcaacttgagtttatcaagttaaaggttttgatggcttatcttatcttgatcttagtagagtgtgggcaacttttcagtattaagatcgactgagggctttatgtgttagctttcattgtttccttttgttgttgttatttttaccacatttttcttgtgccataagtgaggacaccaaataaatttgggaggaggtcactcatggacatgtgaccttgtttctttcagaaaaaaaaaattcataacaaacaacacattattccgtatcaaaaccataaaattaatagttataagtcttaaaaacataaagtaaattcaaagtgatcaaattgtgtagctcgaccatcatatgtgtgcagtcatgttctccttcaatttcatcttcctcatccaaagtcacttgaggattttgtgactaggctaggggaaatgggaagaggagcttttgtggtgagaaaagaagagagagagagagacagagttattagggtttcatttattttgcgtaatttatttgataaaaatctgctaaaaaaaggtccaaactaaagcctatttaagtcattcaaaagcctaaaatcagccctgaaaaacagctacaaaaaagccgaagtgagcccacaataaaaatgcctaataatacaattaaccttaggcgtgcgctcaagtctcagtgttcatcacctcagaggtgtgtgcctcatcaatgtgagccgtatgcctcaatgaaaatagcagaggtgtagcctcagattcggttttgaacctccttgaggtgtatgccttgaccaattttgaaaaccatgactaaaattaaaaatattaaacaaacatgcacttatgtaggacttgactaaaatatatatttttcattaaatcttcctttaattatggatatgtttgtttgtactcaaatggtagtaatgtaacaacaatcaagaagttttagggatccatggcacaatatataaatattatatacatagtcaattttcacagcctaatggattttggatgcaagatgtaaattagcaaagggagactaaggaaacaatattttaggtaacgaaatgccaaaacaaataggttggggaccaatatgcaaaatggataaagcataagctatgttctaggactaacaaaatgcatggtaatcactttttaattaccttcgctctaaacttttgtaccttaacattcacgctctgtgtgtacagcctttgtttattttccatgattttcttatttatttcgattccactggtttccttctctttgtctaggggattgacgacagtcattcccaactggctgttagtgagcaacaacaatttttaaaaaggaaaaaaagtaggagtggtaatgtcagggcagataggagtgacaggtgcgattagtgtagctacatttagtttctgtaataaattagattattaaatcacaactttcccattaaagtaagttaatattcttcagagttggtgataaaaatcgtggtatgtggagcatctttaggcggccttcaactaggaaacccaatcttgtgttaacttcggatgaatcagtacgtcatctatctctgacatgatctatgacaaaaatgcctctcgaacttatcatttggcatttgttgcatcattaccaaatggattatgtttgaaaaattggaatgaaagatttcataacgtatgtagctgctgcaaattggtggtattgcttaatccatttttttttcctaatgcttgtttattgtatgcaggaaaatgaattttttgagcagactgcttcaagttctgcagagtcagaactaaatgaaatccaccgttttgagctcctaagaaatgagcttatagaacttgaaaagcgggttcaaagaaccgctgatgaatcagataatgaggtatatttttatggtatagtatagtatttctaatggtgttactttaaatactgtagaaaattggatctagaaagttcacgagttaattgttactgttaagtaggtaggcataatcaaatttgtgacgaagcatcttcggcatccttacaagtacaagaaaaagataaataaggagctgctgaccagatccttccataagtttctgtttaggaatacaatgattctttttgccatatcaacttcaactatgtgcttatgtggtgatatttttgaaataaagactaacattgtaggaagatttgaatgttagacctcaacattggagttgagcaattatgaatctggctgttgtagttaacttttcaattacgtgatctttttgaagttatgtgcagtaatgtgaaaacttgtttctacttgagtttgtcatttggattctcttcgttcattgttatcctacatttctctaccaggatattgagattggaaaagaaggttataaataccgcgaagatgctggatccactcaattggtccaggttcagaagaaagaaaatattattgaaaaatcatttgacaagctgaaagaagctagcacagtatgactctctctcccctcctccctccctccctccctctttccttccttctctttttctccctggaaaacaatttttgaaaattttgtccaaatattcaaatatttgaaaatttgatctttgacaggatgtctggcaaggaacacagcttctagccattgacgtaggtgcttcaatgggattgcttagaagggccctggtaggagatgaactaacagagaaagagaagaaagcactacgaagaactgggactgacttagcatcagttgttcctattggtgttttaatgcttcttcctgtgagtcactatattccatgaatccttattgactatatattgccaaaatatattacatctctttccctcgtcccaaattagtgcaatcatcatacatataagtagttctccagtgataatcgagataggagttcccttcggaagcaatattaattaagttacggaggttcttaaccccaattttaagattactatgccttatgccttctgaatcatgtatatcctaaggtaattgatctcaactcaaggagtagtagttatgttgtttcagtgctagtaccatgtgtcaacagtgacatgtttagaaggtatccattggtgatcaggttgaggtacagtaggttcaaggattggttcagagtttcttaagtttcaaagggtcacttaatagatcattcatttcatataactccatcatcatacataaaaggatcaacaatcttttgtatttatgcattacaatttcagaataaatctgctagctgtttgacctactgaaacttactatggagaatcaatgtttccaacaggttactgcagtcgggcatgcagctatgttggctgctattcagagatatgtaccatctctggtgagtgaattttcaaaactgaggagacgtagttttgaaattttttcttggagttgagacttgtatgaaccttcactgttatgttctttgacagataccctctacatacggatcggaaaggttggatctcttgaggcaacttgagaaggtaaaggaaattgaaaccagcgaagagagctcagatgaaagtgtagaggaactggcttgagtagaatgaatccttgactatgtacagttgaagctgaatttttttcccaaactataaaggtattttcacttctacttcatttggttttgaatcctttcgatagtagatgagcgtaaagaagttcattccatgtgtctggcactccaggtaggcaccaatggctacaatcctgtggagaaaattgtggggttcgaggttcacgatacttggaagggtgaccgtcctttctgatctcagttagatatgtgatgttcaagaacttgaccttccagtttccattatccatctgtttaatcgcgttatacatgatctgattatagggtggatcagcttcgagtttcttgtaatctgtttctggttccacatggatatcacagttacccccttcattccatgtcccgttcctgcaaattttacaaagccaatacatttattctttctccttatgtaattattagtcctctgggcctcaacacagccaacaaaacatatatacatgtaaacatttacagtccatattttttgtctaccaatctaacttcatttcatttatttattctgttagatatgtggattattaaattctgtcttaaaagtttattacatgaatgccctcctaaataaaagataaaagttttggtccttcaaaattgtaacatgtttttcatcttatttgaataatatctcaattgtttttgtatattgttataattaataatcaaaattaccttatggtacttgcctgtaatgtactggggagtagctacgaaagaatatatggctcttttcaggatcaagactgttcattgcccaagatttccatgtttgtaaggatcttctaaaagcttccataacatccatcgtcatatttatttttttattttcctcgaaataacagcccctgaaacattaattagagatattactaatttattatatttgtgtgcacatggtgtttcaaagacaaaagggaataaaaataagggttaacatataagctcataagatatataagtaactcatatgtatattcaatgaatttagggctcgtttggaacgccgtattaggtcgtattg

SEQ ID NO: 379051 - DNA, 1183 bp, Cannabis indica
ataaaactagtgacataattattgggcaaattaataaccatcttcttttcttttcttttcttttctttttttcaaatggataacccatattcatcttaattattcatctttaagcttgaaatttaaagtaataatatgaatcaagatccacaaaatacatacacattcagatcactcttgtaattaaactgtactttagagatcgagaagaagaactagtatatatttatatatatatatatatatatacacaacctataacatcagtcataacctgactaattaatataattacaataataataattagaagaaaaccacacctaagaaaagagccaaagataagaagccatgaatataaattgatcaaaggttgttttccattaatggccgatgatgatgatgatgaactgcctcgattcccggttgcagctactgcaccgccgcctcggctgacacgtcctctactgccgccgccacctcctctaccaccaccgccaccacgagctctgacgtaagtcaaaagcttatgatgatgatgaggttggaatgaaataggaagatcttgtttggtttgtaatgatgatgatgatgatgataattgggttaatattaaaaatactaataagacaacaaaacaaatcgagggtttcatatctcagatggtaattaatataaatatatagtagtaaagaaaatatttttggaattattataagctgagaaaattaggtgtttgtattgtatcaattaatattgagctatatagaaactttatgatgactttttattgtatttttaatgtaagagcaaaaatagaaagatggaacgaaaaatgaaagttattattagataattattgtgtatataatgtatgtggatttgttaatcgagtggcggtggtggcgcgtggtcaattatataatttgtatcactaatcaattcaaggttttaattattttatatgctaattaattaagaatatcaatacgaaaactttatcttttgcacgttaattggtcggtatttgaatactaatgattgaattatacaaatcaagcacattcattacaccacactgttgacgctgttattatataattttagggttcatttgctgttacattattatattaattaaattatattttatataatatttgtatataaaattatatgtatg

SEQ ID NO: 379052 - DNA, 3683 bp, Cannabis indica
ttttgtgtggattatcgggctctcaatcgcaaaacggtgcccgataaattccctattcctgtgatcgacgaactcttagatgaattgcatgacgcacaaatgttttctaagattgatctacgctcggggtatcatcagatcagagtttgagcagaagatgtccataaaacggtgtttcgtactcctgaaggccattatgagtttttggtcattcgatttggtcacaccaacgctccagccacttttcaatctctggtgaatttagtattcaagcctctttagcgccattgtgtgttgatcttcttcgacgacatccttgtttaaagccctgacgagtctacacatatgcaacacctagaaaccgtcttacaattattactccagcatcaattttttgcaaacatgaagaattgttcttttggacagcgaaagatagaatacttggggcacatagtgagtggtaaaggggtggcatttgatgattctaagattattaagtttgtgaaagattatggaaccgtagcttgaccattgacgaatcacctgaagaaagatagctttgattggactccggcaaccactgctgctttcaatgcactaaagacagcctgactgcagttttggtattagcttttctagactctactaagccatcttggtggaggctgatgcttcgggatatggattaggggctgctttgatgcaaggtcgccccattgcgtatttcagccagattttgaagccacgagctcaaataaaatccatttatgtggagttaatggccattgtgttggcagtccttaagtggtgtccttatttgttgggacgttgcttcattgttcgtactgaacaacaaagcttgaagtttctcttagaccacgcatggtgactctgaaccataaaaaaatggttggttaaactttttgggtatgattttgacattcaataccgtccaagcgcaagaaaccgagcggcttatgccttgtctcgagtgcagccagttgagtgttctgtgctgacatcgactacatggctagattggtcgatagtggagcgtgaaatcaaccaagattcgttcctctctcgagtagtgactgatttggaacaaggaaggaagttttgggtttcactttggagaaaaaatgcttgttgtaccgtaagcgtcttgtcttggttgctacatcatctctgatttcgcattttttgcatgagtaccatagctctcctattgggggccattatggggagtactgcacctatcttcgcctttaagaggatgtgtattgggtgggcatgaaggcccaagtgggtgactttgttcgagcttgcgaagtttgccaaaggaataaacatttggctatgtctcccgggggctgctccaaccattggagctgcctgctcaggtgtgggaggacttgactatggactccattgaggggctgccaaaatctgagggggtggatacaatacttgtggtggtgatcgtttaaataagtacaaccccttaattcctcttaaacatccctttacaggccgcacagttgctgaagcttttctccaccatgtggtcaagcttcatggccttccgagaaccattgtttcaaatcgagatagagtatttttgagtcacttctgggctgagttgtttcgtttatagggtactgagatccatcatagtaccgcttatcacccacaaatagatggacaattcaaagtggtcaatcgttgtcttgagacttatctccgttgtttggcttcggaccgtccgaaagctggggcaaagtggttatcttgggctgaatactggtacaacaccacttttcactccttgggttgtacccccttcaaagtattgtatggccacgaccatccggctttggttcattaatttgaaggttccacctcagtattggttgttgaacaatatttggaggaacgggatgggttcttagatgatctcaagatgcacctattgcgtggtcaacacaaaatgaaagttgtcgctaactcttctcgctgccatgtggaatttgcggttggggatcgagtgttctataaactccacccttaccgtcagaagtccttagccatccgcaagaatgagaaactagaagctcgtttttatggaccttttactatggtgcagcgagtcggggttgtgacttatcgcttggatcttcctgcttcttctaatgtccaccttgtgtttcatgtatcacaactccgagctgccatggggactgctcactcttcaccgaccatcccatcgactttgactgctgacttggagttgctggtggaaccggctgagtagttgaatgttcgtcaatgtccctcaccccttggcgcttccattgaagtgttgattcgttggaaagacttgcctctctttgaagctaattgggagaattttgacaccatacgcacttagtttcctgctttcaaccttgaggactaggttcgagatttttgggagggggggtaatctatactaggaggggtagacaaactgagcttgttgctgagctgactaaaagggtgggtattttggtattgtaattgtggtgagctgccttttgttttgagtgagagtactagagttgattatgcgggttttgtagagaattctcggcatcagtagagagcttatgctctctgccattgtaagagggattgtctctattttcctactgtagggatattatctctgttttcctttttatccaataacagctccaatatttctcttcattattgtctactgttccactggtttatctcgttatattgctactgtgtatgtgtttgactactggttgaggtgaattccagcaggtactcatcatataagtagctgatttattatttagaactccaaacgcatgaaaataaaatgaaaatacaagttcagcaaggttaaaattagaccaagaaacacaagcaacgattttcaataaagagtaatgtaaacataaaaagaattgcgaacttacaccaaaaggtaactcgcgctgttaaaataaagacgaccatgaggatcaatccctaataattctgcccctcgaagtgactttcgtggtttcatccaaggcgtatgtctgtcaataacacattctgggcaataccaatcaccgtccggcaaatgatcactagcaacaccaacgcaccttgaatgatatgcagcaggacaaccatcacaacatattaagtttccatccatcttacaaagacagcactcatcatagttccagtcaacagcaccatcaacagccttgtcgtccaaacaagagccactagagatgccaagtgaaacccttctctttttcctactctcaaagtttaagttcctttcacatatcatatcgggctcagcttccaatgatcttcgattcaactctgatcttattgattccacttcaatcaaatcatcacataaacaccgtagcatctcaatctttacggaagaaggttgttggtaatagtcaactttaaataacttcaaggtactaagatcaaaactaggtttcagtccagaaccataaatcacaaagtactcaaccataaaaactggccatgtaattaagtccaaaaaatcccagttaagactcctacatcaaaaatgaaatgaataaataaataaaaagatgtcaaacatagaacagaaaagaagagagagagagaga

SEQ ID NO: 379053 - DNA, 4841 bp, Cannabis indica
tttgaaatattttattgaaagtgggcacagacgaaaacgtgcaagacaccctgcccccaaccttttgattacacaccttaaaatcccaccaccaccacaaagtaaaccacctaaaaacttcaagagagtaacaataataactgctaatcatacacttatgtacttaattataataataatatatttggagctagagttgctttacttctctattccagtacccaaacccaaagaaaaataaaattataagaataaaaaatacaaaagacccaaaaaaaaaaaacccaaaacagagaagaaaaatgaaaaaacaaaaaaaaaggatagtgctactgtccattcaagtatgcttcctttcttttccatgtctttttacatcctttgcaattccaagaactctgcatcaaccataccgaaaatcagaattatactctgtgatacgcccattcttcatccaacaataaaagagttcaaaatagttcatgaatgttttatttagaggcttataagcttggtaatgcaattagaacaatgcacttgtttttttaattttggggtactaaatagaatgacataataaggaagatgaagattgctgaccttagcctgttttcttgaatcaatcaaccggaggattttagggcaacttttagtggcatgtcgggtattgcgaatcctttccaaagactctaagcatttgacatgttacttctagcaattttcctgcaaattttcaaattgatgaattaatataaagtgatcatgtctgtaccatgcttcataaaattgtgaagcccagatgagctaattagtaaatcaaatgattcattttgccattaacaaaaataaggagcgattttatgatatttcagaacaagaataaaactatctatctgtaacttcacaacaaaaattaagatatcatgataatttttttgtttgtagaaagataaaagaaacagattaaaaaaagtcccatcctagaagtcaattccaagccactaagctatctttgctaactactcagctttactccaatataaaaaaaagctttactccaataaataaagctcaaatatatcccacttagtttctcatgatgatttagtcctatattattacaatcaaataagtcataatggcataagcttgtggaaatctaatacaacttctattggtattattcaagaaaaggcttaatgttttgaaccatttcataccatataatagaagataagtcaacacacatcaataccatcataactcttatatgtgatgtcccattagaaattacaaaattttctacaaaaactcattatcatagagagcactaataatcaccaaagtcgttccttaaaacacacaaatagtaaaaacaaaaactaatcttcaacttgaaggtaaattttatctacttatcttagaaacttgaagaagacttttatcataatctgtgtgatcaatccacataggcttggttttgtactaaacttattgtccttatggttatgtgtaaacaaagaaaaaagccttcagtctcagataccaaacacttctattcaagttaatactttttttgctatacatcaaaagaaaactcaataaatggtcaattttcccccaattttttcttctttcactttttagccgattacttagtccaagctccaagcaattattgagtaactttcactaaaaaaactaaaataaagtataattaaaaaaatgaataaaaatacctcttttgggcttggctacaattttggcgggttgaaccgtttgggaaacgggtttggactcaacctcctcaggcgggaacagaacaccatcgattccctgaaccgaaatccgaccgtcggtgtagatatctgggtcgaacaaataagccgaaccctccccatgcccgaaccgaaccgacccatcagcttcttgggccaaaaccttgtgtggtaatcgaagtgtgtcgtatttcaccttcccgaaccggcgaactgagttgtacatactctcttcagtttggtactccggtatgaggtgatagtacattatctgctccggtgctcctggctcactgagctggtctgtagtaagcttagccatggcttcatcgtttggtgccagcacagtcagtacgtaaccctccgaaaccaatcgacccatttcggtggctaacgaagttaagttaaccaaaatgtcagccatttcattgtaaccgccgtaatgaaggagggtttggataaagtccttgacttgactctccccatcgaaatggtggtgagggccaccgggtccgggtgctggggctggagctagagatggacccggagccattgcgttgtagatcggtagagccggttccgaaccgggtttggtaggtggagctggtttcttcaaccggtttgttctcgggtcaaccactggagccccttctggtttaacggctgtgatcgttcgtagactacgtcgacggttgaaatcgtcttctactgagcgaggaatcaaaaccctttcgatcccgtggatcacaccatcgggtcgggtcaccgaatcgggatgagtgagacgagcgagatccacagtccactcaccggaatcttgcttttctaggtggatgtgttcgtgggaaagagttctgtggtaagcagagtcgggtttcttgggtaaatcgttggatccgatccgggtcggtacgatgtgagacaagataagcttttgaagcgatttgagattaccaggttcgagcaagaagagcttgaactccgggtcaagtcctcgctcgagggcttcgttgcgtggagcgaaaatggtaacgttggcggcgccgacgacttcctcaagtgtctggagaagcaaagccttctcaactagctcagcgagctcagtgtaatgcgagtctaggagggcgaccaggaccgagttggagttgatctgacccgatgatgtggaagcgttggaggaagagaacaatgacctggggttgacattttccggcaatgagaagcatattccggcgaatgtgatgaagaagaatgagaaaaagacaagcttttggtcgccacggatatgagtacccatggcttcttccgtcggcagacccaagattaatgcggcgagtttcagacactgagagaagagaagagagagaaaatgagaagagagagagagagagaagttttagagagagaaagtaaagctgtgaaaggctggcttgtttctgtatggacgtgtgagaaacagagagagagaacatagattatgttatgtgtcttttaattttaatttttctcattttagtttttataaataatattattatttaattttatatatatatattttcgatatttttttaatgtatttttaatttttgtattatgtttaagatgttatgttgttgtgtagaggtgtttgaggttatgtatatgagtagtttttgtgagtatataatagagaatatggaagttgtgttggtaaagaaagtgtcggttcggtcaaaaagtcaaatacgacacgtggcaaatatgagctcagtaaaaaatagtacgaacgtagtgaataacgttaagttgagatttgagaatgagattcagatattttcagtcttcaagtcaaaacctttttacatcttttactgttttgactgcctttttttttcttcattataatttaaagttgtttttttttctttttttcttaataaaattgaagaaattacaatattttctttaacgttattaataaaaggcaataaattgtcatttagtgtaattaatttgtgaaatgtgaaatgttgtggagtcccaaagaaatgaagtgatgatatctaccaaaaaacgacagccattaatttgtgataataaagaagaaaacttttcctattgcatatttgatcattcatgggccaaaaaaatgaagttagatctgaaattaataaattgtccaagatttttgtttctctcttaagatctcatgttcatgtatacaaaccctgttaacatatagatacagttgtaatgtaacacccttgataattgatatatatattttccaataatacattattaagtactatatatatacctagtggtcatttttaaagtatattatataaatgtttctattaatttttgaacaaatatatgcttctattaattgattatgtttatatctagcggtatttatgatcacatgtgatttgttgagtaggaaaattcaataaaaaaggcttcacgttctaaacttttatttttaatacaatatggttcattaggtaaaaattatcaaaaggagaaagatatgtaatcagttaatgtcaacgtttaattattatgtaattagttatataggatggaatttatagaatatatatcaatatgagcttgcagtgaggttcgttttagaaaaaatatatatagagagagagggaggtgataataaaatttgggtgtagaaaaatacctagacagttgtaaagagaataaaggaagcaaataaagacaaattatttatataaacaaaaaaaattgtaatgattagtttgcagattaacatttgtattatggcttcgtatacttggatcttttcagtcatcattcaatctagaagtgtttgtaactaatttttgcttaatagtctatgtatattttatataattgaagagtataagtggtatatgtgttgtatgtaattaagacggttgaggcttagtcttatatgtatatttatatattatgagaatgctaattagtaattttttttctagaattttgatatgtactaaattatgtctcttgaattttttttggctgttaaaaattcctcctgaattattaagattgtta

SEQ ID NO: 379054 - DNA, 7522 bp, Cannabis indica
attagtctaattagtcaattgaacaacctaaagaaaataataacaataataaggtatggccattgcacacttgacattacaacacctagttaaccaatttcactaaattagacaaattgaggtgaatagagcatatataacctagcttcaaccaaagtagtacacagaccaccacaaacatggttcaattttattcaattcaactggttcaatttgaatgaaggttctgcttcttctttagagcaaaggagaacaagaaaaaaacttaaagcttaaaacaggcaatggattaatagaaccgtcttaggcaatccatcaaaatatcagtgtgttcaggcttcccaacagatacacgaacaaacccctttagttctttgctgttgtaatgacggatcatcactcccattttggcaaggtcctcctgaatccatatcaaagtgccataagtattgaggttagatcaaagcaaacaaaaaatagtaaagagaatagtaaagagttttagatacatttctcatgatatagatagaagagaaatacctaagtcaatacatgcaaacaatagtagaaagaattattattgatggactattatgcaactgttttagcattttttttctttctttttggctgcttcattttgcagtaggaattacattttgcaccactaacaaaaattctagccatttggcaagtagaatattttaatctcttccaaaataaaatgactagcttattatgtttatatattctcattctcacttactatttgttcttgttttgtttttttgtttttttttttttttgttctttgtttttgtttattgttttgtttttttttttttaacttaatgttgctttcgtttatttgatgttttatttgtaggttgcttctcaataactccagcagaagaatatgttgtgttgatggtggaattgaattggacacttacggtaggtctttatgtttaatgattttcaaagagtaattaacttttaaaaagattttgttaattaaaaagaaacctttgaaattgatttctataattaggtggagcttggaagagaaaacctagacctaatcaacatagcctaggacaattgacatgttcttgttaatttgtgtttaggataggagtatacctaatcatcctaggtagtcaacttagggttgggaattgggatttaatgctattgatagatttaaattcttgataggaatatgagaattaatctattggttagattcacttgtgatttggaaaaacgttgtgaataattaaggatcctaggctagtaattagaatattaatatgaagttgatgaaagttaaagacctagatattatctcattcttgatttttttttttattttatattgctttattttccttttaattttgctttaatttcttgtttcttgaatttttacttaacttggattgaaagaaaaatagtgtttggtaattaaacacttgacatgttcttgtcaatttgtgtgaaccattagtccacatgttaagaacaaatacaacacaaaaggccatgaaaggtatccgttgttaactgtttttcaaatctttttgcaaaataaattatgcaatatttgtgctactctccaaatctatatattttaattcatataatatatacactacacaagttgggtaaggaggtaaatctctataccttcaccccaccaatagtacatggggtattacaaattataccattatcctaatctaaacctaaacccccatttcaatgtatgtgttgtcttgtgagaaagatacaagtttttaacttctttcttgactctgatgatgaggacaagatatgaccatatccattttctatgatttcggttagctggaaaagaatactctgttcactggtatatagtatgttttccttctcctctctagtctcttatttttattaataaaagcctatttctataagaaaaaactacataactcagaaagaaacaaatgttacatgattctttctatttctctgttacatgtcttggattggatggcatgtttgtattataaacattcgagtgtgtgtagttatggttgcgtggatttatatagattagtaatacggtgtacctttagcttcttcgcatccatcccagatgtaaccttgcagagaataaagttagaatggcttggaaatgggtttagaaaaggcacgtctttgagaaggttgtacagcctctcacgttcttttagcaaagcatctttcacattctggagaagataagcaagtactcattagttataacctccttatctcaaacaacccatatattattgtgttcaacagatcacccacctctaaataggtaggattcttcaacgctgcacaagcagaaacttcagcggcaacagagacgttgtagggttgttttgctctccaaagatactcaataatgctcaatggaaaagcaccatatcctacacgtaatccagctaaacctgcaccatgagattgtcaaccatttgacaaagaataatgaaactgaaacaatagtgaactgaaaactgaaaagtcaaccatgcatcaaccacaatgttgacaaaaagaaagtatccatgaaatgtgaaaaaagaggtgaaaaaataataatgtcgatttgggggtggggggtttgaagctcatctcaactgaaaataaatgcaagagattgatgaatgaattatgttttcattccctacatccgttaactagcatgaagataataaaaaaaaaaagtttgatagaggggcacataattagtgcataataaaaagtctatctaatagtaataaaacaatctacctgtaacttttatcatcaaaaaaagggacaagtcaattaaataacttcaagtttcctttctaaactgtaaattatcaaaagaatccattataaggaattatctaatatatccttctaaacatcgtgaatcaacaagtcctgcctcgggtatatcatttaacaaagtaagagaaatgtgaaccttttattgtaaagtaaacaagctcccaaccattgcacctactaaggtttggaattttgaaattaggccccctaatatttggggaccaagaaactatggaaattgttgtgtaggtacctcctagactctaacctaagaccttgtggtttgagctacccctcttggtaaataaggttcggagttggtattcaatataattaacaagtaaactgtaaatagagcaacaaggaaataattactagtacttggattatagattctatattaagatatacattaattgttcaacatctctgtgcatgcaggagaaataattagtggtttatttcacagcaaaagtaagggttttaacatgcttcaaaatggaatatcactagctacaataagcaccttggcaactaatacaaaaaggcaatccccttgacaccctttgttataattgtaaccaatttacagttagcaccaaactaattgatcaaataggttaaaggaaggtctgtttaaaatcttagcttttcatcgcatattagcattatgactttatgatatatttcttgtaataactccatgttaacaagtgttgctctgatttctttttttttttctcttttcttcttttactaatagtcatgtcctatattaattcatgtggacattttgaacaatgaaatcaattgttccacaacagaataacagtgcactactgaacccttaaagcttgaaaatacaatgcataaaaaattgtgaataccagctcttttgctgaatgttcgaagaacaattaagttctcatgcttcttcacccattgcatcctagactcaattgtggaaaactcaacgtatgcttcatcaaggatcaccaacacaggaagcttgaggatcttcaagagatcatcgtcattaattatactgtcatagacaaatcatagcataaacatagcatcccaaccaaatctatagactagaaccaaaattatcaaaaatttcatagaaaaagcaatagatacctcaccttcttaagttggcatatacagcatgaaatcaacccagttactttttatataaatatttgtacataaataaaaacaataacaataaattaaaccagttactgaagacaagaataatattacatacattctatgatttaaataaaaaaaataggaaaggagaaaattaatttggcagaatgaggaattttttactaggtcactaaacaattattcaaagtctccactttgaaattgactaaaagaaaaggaaatttgacaaaatagaaaataagtcttaaacctaaagcaagatcccaaataaaacaaacagcaactatatatatatatatatatatatataaataaagtccatcctgatatattgcacaagcaaataaaaggcaacattagtaaaccacgtcattttagaatgatgctggttcattattttgcaatgaatgtagctcacaagttgtcattctgggaagcttaaagtcacaatcattatgtaagtctagaaggaacattgaattaaccgtgttagacaacagtggtatgtaaatttcataataagaaatagatgtaggaacttcatgtcaaataatacatgaaacaataggaattaccttccatctggattgttaggagatgttagaaatatgcatttgggtttctccttttcaactgcatctttaatgagttccaaatctaggctaaaatcagatttcctcggaactgtaaaaaaaaaaaaaacagctgaggtaaggttaacaaaacatataaaagcaaaaataaatcaacattgacattgctacataaaaaacagatataatatgatcttcacatcccaaactattcacctttgatgacacctgcagcattaacggcagcatcaaattcatacatggtaaaagttggaggacagtctacaatcttgtcaccaggatcaagcacacaccttcagcaaaacatttaatcgaaaacagagcaaagtttggaaattaagatcgcttgataatgcagacaacgcacattgagaacagcataattgtaactcaatgggcacatttctttatctcaccgcataatcaaatcaattaattcatctgcaccacatcccaccagtatgtatttagcttcaaggcccgaatcctcagcaagggcagcacgtagccgacgactttcagggtcaggatagatataaggaaattttaatgaacccaaagcctcaaaaacctacaaacaatctgaaattgcaatcagggaatcatggagattgaaaaataatgtgttatttattaatgcagtgcacataattgtgcaaattaaaattggaaaggaaaaaaacaaaagacaaccaaactatattcaacagtaaagaaaaatatttttgttcatagagaaagaaagtacaatagcatatatgactcgcctccgggggaggaccatatgggttttcattagcatctagtttgattatatcttcaggcttccttccaagttgggatgataaaacctacataaattagcaaagatatcatatattgtcaggacggatgagcaaattacactaacaagtggcaattgcctaattttacccaaaataatgatcaaaacaaacaagcaaacactttaatcaatggcaattctgcaaaagaaattataagaaggcaaatctaaaattttagcaaaagaaagttctttcccaagtcaatcaaaactaagcttaaatatcattcagaggcatcatagagccagctgcaatgaaaacgaacaaaatttcaagaagttgtcaaaccacttcacctttctgaataagataagatatatatgcagcctaaggaataagggccacatcctgtatgtgttataacacccatgtcaagtgctctactcaggaatacgaaaacaattttccaccaatctaagccagtggaccatctatgctgcagccaccatttccaaatgaaaaactcttacagattgtttgtaacagggataccacctgacttcagctatgatggcagcagcccaataatagctgcaaaacatttttgacatgaaatgttctctccactatccgaaaatgcatttggattatatgtacaaatgttttaacttcattccaaccccagctttgtgttacatcatttgaagtcaagtcaaaacaactttaaccagaaacgtttatcccagttcatcctatctccaaagctttctgtttccctacttacaacagcccttactttagagtccggagaacagttcacagtaaagacactgtcaatttttaacaatgtcgaatagtaagagaaccctttacaaaaaagctcgagtgtggtattcatctatgtgaaacactacccaaaagcccttcttaatcaatttcaaaataattagttttgcaattgctcggattcactaagaaagcaagcaatagctcggattaaacaataatggagtcacttaaatacacttaaaagttatcaccaaactaattcatagcatagtctgactgaaacaaggggaagtggggattatagcgaaatacctcgaaaggtaaaatgggttgataaggagacaattttctgaaatggggtcgaataaaagagtctccagtgacttgttgttggccgtcgttgacttggtgctccacaggctgtacggacgccatggaaacgaccctgttcttgttcccgagaatagcagagcctggtgttagtggtgtgtgactggaactggttctgaagaagcaattagaggaagcactgtaaatatcaagcacgcccattaggatttaggatactataaacccagaaatggcagcgattgcttctagcagcaaagatagaatcaaccctagtgaactgactgacccacgagccgtcaccgtagacaatgacactatttatttatcattattgttatttatttatttttttaatttaacaatattgttatttattttaagagcaaaccgaaagtctaaacaaattattattggaataaaaagaaatatcaaacaaaaatgcctaaacatggcatctttccatcttctctttcgttggatatggaaaacaaaaaatcctaatgaaactaaacaaatatctacaatcattaacaattagatcaagaagagagttcatcatgacatgactgcgaatggccttaatcgcccctaaacgatcaggctcaagaatcattgtcatttgtcaatcatgctttgtccttaatacaactgagagcctcccaaatacccatactttaagccaactcaagttccacgttacgaggcctcaatcatttatctctattcaaccaagctcgaaagagatcatcgttttacttttatgtccagataaaagctatagatttcatatctatgattagcgctcccactcaattatactatcatgttcccaaaatgtacataattcctacatatcacctacgccaaaaggtaggcttaactaacaaatcaaaaaacacaaataacattctgagatcgaacctaaccatg

SEQ ID NO: 379055 - DNA, 2587 bp, Cannabis indica
aactttccatccctatttctaaatcttaattaatttgagccaaattattttagaccacactaaataaatttagtgtgaatgatttagtctagccggactatttaaaattcttcgattcgatcacgtacggttttagaaatttcaatagcgattcaaatcaaatcaatgtgtataattattttatatatacttaatgggagctaatacaatatatattatatttttttacctattatataaataaaatgttgacatttgagaaaaacttgatagaattttgatattgacctaatattgttaatattgttatgataataatttttattgttatttatgtattataaatttattaaaagtaaataaagttaccaaaaaaaataaacaattattgtaaaaaaaaatttacaacaactacgaaatataaactatagttttgaactaaattaatcagttttgagtggattggtttgatcatttaattggtaaacgtaacactgtaatttgatttgaaaaattgaaattctagaccaaattaattaatctgtgaatacccttacagtaccacctcaccaatcaccaaaagataatcttagaaaactaaactaactaactgaaaccatttagtaacagtattgaaaagtaataacaaaaaataaagcaagtttaagatgactcaacttctttttccttggcagtcccccttaaagtaagtgtacttaatcataagacatgtcttgatgcgtaggaaaatgattgctcgatataagtttagtgaggcaatctgcaatttaaaagtctactagaacatgagatattttgatttctttaatgagaactttgtcatgaacaaagtatagatcaatctcgatatgttttgttctagcataaagaatcgagtttgctgctaacattacagagctgagattgtcacaccaaatagatggagtgagagaggacttcattttaagttctgaaagaagagactatattcgtgtgatttcataaacaactattgccatgcttatgaatttagtctcagtagaagaccttaaaatagtactttctttctttgactggcaaaccacaaaatttctcccaaaaacacacaatagctagttatggatattcgatcatgtaatgtcctgatattttgtcttattttacaaaatactatttttgatgcattaattgaaaagattcaaaactgtttagaaatatacaacatattttacaataaatatgcaaaaagcgaatgatcattcatatttaaaaacaaaataagtagttgagtgcatttctaaaataatttataacatcccactaagttcagattactttactatctgaaaataaaatcaaggctccaccgacattctagaccgtttgtgacccaactcttcaaacttatattcagtgttccctgtctattgtttgaagactcgctggtgctgcaaccctcgtcctttaagacacattctagagggaaacaactaaattcaccaggtgcaactgagcgaatgtgacatcctttctcgttcctaatgtcataagatcttaaacatccccaacataatggaaaaattatctaaacctagactcgatcatttatgcttcaaatgtaacagtatgattctagggcatcttggatttgcgaactttagaagccatgaatttaaattctaagtaacttggtggaaaagcaacaatgacttgtggtaaatataatggccttgctaagggtaaatttactaagttgagcgattcaggccaagctgcttcttgctgacaatgacgcctatcttctatatatgacttcattcaagaattgaataggtgtatacctcttcctgattggtcctaattaggtgcttgctaatttttctatcatttgattttacgtatagactgaggtttgagaatttgaggcttaaaactacgacctgtaattaaggatagtttgattctaaggggtttgggagttggattaaaataggacatggtattgtcaaattataataccccaaaaaatttcttgaaaaaatagagcaaagttaaactcgagacctgcaaatcacacaaccttaaatgtttctagccctaaattttcgttaactaaatttgagcctcatagtagtaatttcacacagaaaaataaagctatagaaataaagatatgaacacaaagttttttacgtggttttgcagttaaaattctgcatagtccacgagttaatcttattcagatttctgattgtttttttaggaattctcttgtatgagttttttcctcccttttttgatcttgtttgtcactatttctaattacatagtgggcaattaattacaaagttgaccggaatatgtttacaacaatcatccctaaaatcatgggatttgattacatatcacgtagtgtaaatgcggtttatgatttgaaaatcatatagctatgatttttccgcttttattaggtcaaaacaatcgtgtattaaacatgtctttagctgttttatctggagatgtctcgacagaaacttggttccagtgatctcaaattctcaatagcgagttgggaccgttcttcctt

SEQ ID NO: 379056 - DNA, 3880 bp, Cannabis indica
aaaaattacgggtgttaaatgtccgtaaataaatcatgagtttttgtttggcaaagcaaaactgttataatagtaacttatatggttattttaagaataaataaactatagggatttatttgtaaatacagggaatatacagtattcattgaaacattgtaaaggctagggattgtttaggtaaaaacttcaaacttcccaatctgccttctctgttttttttttctttctgttatttaagcttttagtggtcctaacctcctgggaccttcacaatttaaaaattacgattttagggctctaactaaaactgatagcctttcaactttcatgtgcagcatgatgattcattatcatcatcatcatttcattactgcaaaaataaaaataaaattattattatcatcattctcttatatgcttgtcaatattataagacaattggccaattgggattgtccaataatcgttgcttgtgttattggtccagaaattaataagaaagaaaataaaaaaaaggtgaagcccccacatgacatgtgtttatgatgttacatctatttttatttttagttaacatattatttcctttcacatacccaagttaagatgtagctattagatgatataacacacatcatcaaggaccccatatgaatcatataaaatatcttagttgtttgttccttaacagcatgttaattagtgtgcatcaatgggaaaaacagctaccttaaacttgtttgatgtctacataatcacatgaactattatcttaaaatattttctaaggtttgaggttcgaggttcgagtttacagtaattgttatagttttctggtctcaaaatattacaggatgacacgacacgacgagcctaatttctttttttcgaaaagaaagaaagaaatgaaggatttagctgttaaacattatgctcaaattgcttgtcacgtgcttgtagggccaatttcgtagttatcctttaaggcattgattgctagacttgtatggaggccaggtttctttcattttgtttttcttggtgtacaagtttgagggttggggaattacttacttagaccctttcattctttatccattcattcacacacacagagagatatatacagcacctgaaaacatatggggtccataaaaggaatagctggttcgattttctatgtgtagctaattctttagaagtggcaaattgacattgccaacttgctgaaatgaagattccacccccaacagaacaaaattagtgacaatgcagatggccatccttgtctatcactttattcacacaatgcccttctgttctctttcatattcaaactttttatcattttttttttctgaagtgaataatgatttttaaataatacaacttccatcatatttctaactttgatataattatgtgatttagaattatgcccacatttatttgagtgcagttttggtgaactcatggtgtccagtattattattattagtattactctgcaacagaaacttaataatgtcttcaaataattctttatgattttacacaagaatcttatgagcaatgattgatgactgtatatgattcaacatttaaaactgacatttgttttactgatattgacttgattgttgtacttggtttttcatatgtggtttaattgagtaatcttttgatatttgattgtggccatttttttttaacctgatgaatttattgcataaacgcagcctacacatagtacgatgtgaaaacatatcgattcatgatgttcaaatctatggagattttaatacaccaaataatgatggtattgacattgaggattcaaataacacaattattacaagatgtcatatcgataccggagatgatgctatctgtcccaagacatatactggccctctttataatttaactgcaacagactgttggattagaaccaaatcttcagctatcaaattgggtagtgctagttggtttgattttaaaggtctggtgtttgacaatattactattgttgattctcacagaggactgggattgcagatacgtgatgggggtaaaatatgcctaactttctattttgactggcattttcttttttgaacagaaagaatataatttctttaaggttaaagtttatgcatatccaaatacatcaccactgtgatgaccacttaactagtacttcctagtatgcattcacattaagagtactcatttgagtgatcccactagtgccacatgcttttttttagaaaacttcactctataagctgtgtagtgtttacatattgctcctaagttttcttatagttttttgtttgtgggacagattagatgaacaagcacttcaatacttcccataaggcaggcaaacatttatcattgtgttgctattatctacagaaccaatgctaattatctctagggactcaatagttttgagttcagaaatatctatgtttaattcaaatgatacttattggttgttagtttgtattggttcataatgattaatgatctgactatattgtataatatctttttatctttgtttatctacagcctaatttaacatgcagtcttctgaactttgtggttaaaatttgttatgttgtttcctcagtgtcgtttcattcatctttgacaggaaatgtaagtgatgtaaccttctcaaacattaacataaacacaaggtactatgatccatcatggtggggaagagcagagcctatttatgtgactacttgcccaagggactcaagttcaaaagagggctcaatctctaacataaactttgtcaacataactgtgatttccgaaaatggtatcttcttatcaggctcagaaggtggagaactaagtaatctgagattcataaacatgaatgtaacttataaaagatggacaaaatatgatggtggactggtagactacagaccaggatgccaaggactagttcatcacagctcagccgggttgttgatggagcacataaatggattagaggttgaaaatgttaacatgaaatggtctggtgctcgatcaaggcggtggaatatacctctggatttcaggtctgcaactgtaaataacatatctatgcttaatttccatactagtttgttaaaacagtgaagatacaaaagaagattaccatgatgccatgccacttgtgtttaaggatgtatttgtaaaatcatataaacagttcattggatgataaagattgcaatgctcttcaaaatttacatgattagagccattattctatcatggcattatagaatctatctacatgagaactgaagaaaattgtgtagcaatttatgctgaatgaaacaatacaaaagaaataaaaaatgtaaaaacattgattactaagagcatctccattccaatagagacgctattgtgaaaatttaacacgcaagtgcacgtatcgtttacaaataataactcacaagagtgaggtcgatcctacaaagattgtagttaaatactattaaattgaatactaaaacaaaaataaataaacaaagaggcaactaacaatgatcagaaatttaggacgtttaatttcaattgcatcaacttcttatggtaaaatacaatctagttatcttcaatttcatgcgatagcggattattaattatctatattcttattaggacatacagaatataaagtcaaagtcctatacttttgtggtaaattacatatataatttgcattaagtaaagaaattctaattgctacatagaccatattagtactctcgttcaatatcgaaatctatgtctttactatatgaaaaaccgtgtttttgcaaatgtcagttgtatataagaaaatataaaa

SEQ ID NO: 379057 - DNA, 2409 bp, Cannabis indica
ctttatcaaaagcttttgccatatccagctttaaggccatccagcctatatgccacacaattttgagttttatggagtgagtaatttcctgagccacaatgatattatctaagatgaggcatccatgggaaaaagcactttaattgggagatatcagcttattaagaactaatttaagcctattagcaattgttttcgatgggattttataagtgacattacaaagacttataggttggaaatccttaactaagatgggttgtttgaccttaggaatgagagtgatgagagtttaattaagctggctccattgagagcctgaagaatggtagccaccacatcctgtttgacaaaagaccaattcttacagtagaaattggtattaaaccgtcaaggctcggggcttcgtctaggggaagttggaagaaagcttttccacttcatctgcagtgtaggtttcctaaagcatttgtatgtcattctctgaaagagtggcaacaataccttccaaatcatacccaatatcttccacggtaggagttgaggaagtgaaaagagtcaaaaaatagcgctcaatttccttagtgatgtcctccaaggaagtaacaatggtcccattgtctctttcaagtttatgaatgctatttgatcttttcttagatgaggagtgacgatggaaaaacttggtgtttctattgccttgggaaagccattgggttctacctctttgcttccaatatgtctcttctttaagaaggagtctatcaagatgggaatggagggtttttattctttggaccgtgttgtcatcccaattatggccgcttttaacatgttcaagttcttttcaatagtatttattcgatgtttaaattggaagcctgacttgtggttccaatcagtgaggcggttgccgcaaacaaattggatggccacaagattggagatgtcacaggaattactaccttgattagcccaaaaagatgtcaggatcttgagccaatttgggtcagtgagccaaacattttcaaagagaaaaaattttgttttacgatgtggggattgggacgacattccatgagtgtcaaacaaaagggcacagtgatttgaaccaataaaaccttggtgatgaagacaagccttaggaaaaatattcatcaaatgtgcattaacgatacaccaatccaaacactcttgaatatttttcttattggcattgtggttattccaagtaaaattagggctaattggatcaatgggagacaaattaaagtggtcaagaaaatgtttaaaatttcttgatggtcccctgtcgaggttaccataaattttttcatccaatgtaaggatggcattgaagtccccgatgataatccatgggtcaatggggttgttgtcaccaatttgatgcaaaattttccaagtgtggattctttgggcctcaatgggggatccataaaaacaagtgagatgaaatggaacaaaattatcaatagaggacgaaacataacagtcaaaatggttcatagattgagatatcattgttccaaaataagaggagtcctcctcctctaccaaacctagggacttccaagccagaatcaaagtgcaatttaagtttgtaaaaatccaaggcaaccttagcaagtctagtttccatgagaaataaaatattaggattacaattagaaatgagacgggagaggttacggaatgcatgatcactcccaattccacgtgcattccagcttagaaccttcatggctgtaggcatgcctgcacatccgcaggacttgcctctaggaaggtgatttcagttttagtagagttcttcgattgagtatgcttgaccagttgtcgagtttcaccattaatcactttggcctaccttttgaagctttctttgcctttggaggattgttttattttaatgcttttggggcctgtgggggtggctaacccaggttggaaggtaaggggtgagagttttagatttgtgcttgtgtcgaggaggggtatgttggttggcaggggaagatggcagtattttgagcttgtggattcagaactactcgaactttgggaggtgtttgacaaacttgaggttgttgttttcacagtttgtaattcactgatgttactcatggtggcattgagtagagcagtgaaagttgatagggggttcagtggtgttgggttggtagtttcttggccttgggagattttgttagtctagagggtgttttcaaatggttggcttgagttttctaacctatagtggagcaaggcggaattaataagttgagaatttacttggtgaattctagatctacttattgaaagctcggttatataggcccatggtcccctcactagttgggataatactgcttgcagacttagttaatt

SEQ ID NO: 379058 - DNA, 3511 bp, Cannabis indica
cattttagtggaatgactattaccttttaaatagaaagaaaaatcattcaatacaaatttaaaaaatataattttgtatcaatcattctatgatttctaaattttattccatttctattccaatttccattcctattcctatattttctctcaaccaaacgcagttagtccagtccaattttactacaaaaaaggaccgtggaagctcaatatcttcgtgtaatggatccggttagatggaaacttccatttaagtttttttttttaagaaaatataaagagccggttcgaaattcagtatttcactacatagaaaaatgactccaggcaatcttgctcagagctcgccagttcatcgtgcttcttcgtcaggtttatcgtcaaattcaaaattggtcgagcaaacaaccgtttcgtgtttatggtgatattatatataatatacttttgccttattgagcccatgaaattgataccatgcagatattgatcccaaacaccagtatgcttaagacatggctacgaaatcaaccatttacaggtaagttagagtaatttcttatcttaatgagcatgttaaattccttggaaagtgaatttatttctttttgagtctctaaaagctactcttaattatcataaccttagtgacatgggtaatagctaattttgacggatctttgttggaatatatatataagtgttctgcatttgatggtattaatgaatatggagcttcactcgtttcttaattaaatgtggtttgagctaatcatggcgttgattgaactgaagtaaacatatttataattctcttgcacaccacctgtttgatgaaagtcattgtgatattctatagtttccctttgagtatgtttaataggaagtgtggacatcattttctgacatatgccttcaattattattatatatatatttatataaacacttgtagtgattcttacaattaagcatatgtgtatgtatgtatattatcagtgaaataacttaagcctgctgatatatttctttcataagtatacatatatccaaataattcatcattacttcatgatttgttacacaagagctatctaatattaagcatcaattaaacttatgatattttgttagacactataaatattgtttgggtaaatgagataagctgtacgtggaaagtttgatacagctaaaattcaacatttactttcattttgtttattattaagttcggcatcaatgaattatgaatttttactttgtttataataaattatgaaaatctagcaatatctttttgtttttcatttcattcttgatagtttatgttaatgtgtttataaatttgaatttacagttgttacaccagacgtgtcaatgttcctggcagctcgagtcaccaatgcttggcggtttcagtgcccgcttcccatcatctctcactgtttgaactccaggcttccttcattagtatacgatgccaagctttataggtttaacaaggttgctttccttgttttgtccctgagaaccctcaagaaaaataaaattcatcattcactttaaagttttattcttcttagtcatttacgactattttagtcgagttttgattgttggtgctcgatttttgatcagctttcgtatagcttggacaaagaaagtgatgattttctgttgtggttggagaggaaagctgggacccatgtgtcatctgtgctctcgattggaaaatcatcatatggcaggtttgtgattatatgtagacataaagttattgcttaaaattgttttgattgattgggataagcaattttagacgtttgagtctgagataaggatttcatgaatgtttactcttattgggaagagctggctcaattaactcaacttttgattcctttctgttaatctacaattgtacttttaccattctcttctctattattaatgattctattatgtatgcaagcatacaaaattgtctattattattgttgttgtttttaattgactaaggtaagattgaaatggtaaatgtagggcactgtatgcatcaaaagttatacgaaatggagattgtattttgagagttccttacagtgtggtaatgttccattttccaaacattttgttgaaccttacatttaaaagtattgacttggttttagcattttgcagcaactagcaccagataatctcccacatgaaatcaaaagtttgttaactgatgaaattggtcatgtttcaaagcttgctattgtagttttacttgagatgaaactaggaaaggtgacaatagttttcttgacatgaattttgtctcataaaacaatcacacattgcttaatgaatgtatttgataatttcattacagcattctgactgggtcccttacatcaactgttttccttgccttatggaaatgcatagcaccgtgagttttttttttctattagattactttaatgaaaagttattttggtattaagtaaatatttatttgaacaagtatcaagtcatattgttttttatattttgttcatcttataagaaatcattatatataatatgactctaaaattttagtgttgaggttctagtgaagaagcagaatgcttgaagaaagaactgagaacttcatagcaagtccacaacaaagctcttcatggaattagcattttgggatagcctaaagggctatgattcttgcatacagtaattgtttgtattcattttctttttctttctttttcagatgttttggagtaatgatgagttggaaatgattcgccaaagttctttgtatcatgaaacaattcgtcaaaaatctctagtcaaaaatgaatttttgacaattaaaaatgtaagaaattcatttctctaacttgttaatgattttgcctatgtttttgtccatttttcacttagattgtctatgtatgtgtttcttatcgtcttttttacaattcgctttcagttgtaactgcttttaacttcatagcattctaattgagtttattggacaatcaatttaaagccttctacaattttatgtttttaaggctcgtttggtacaccgtgttgtattatgttgtgttgtattgtattgtgttgtgttggattgtattatattgtattagtattatctaatacaatactatatttggtattaacttgtattaataggctgtgtaaaattataatatcttttcaataaattcgaccttggcctagactcggacccggaccgcatccccaaacctcgacctcagactagggtccgagttcgggtcgtagtcagaagtccaggtccaaattcgggtctgagttggggtccgggttcgggtctgggtcccgggtctgggtcgggagtttgagtcctagtctgaattcgagttggggtttagatgccaaatctgggtcctagttaggggttcggctccgggacccgagatccgaggctgaggttgactttgattcccttgtaaatagaataatacaaact

SEQ ID NO: 379059 - DNA, 6596 bp, Cannabis indica
ttcgatcaggactgcaaaatttagaattatgaatgaaaatcaagtctccctttattgcaaggaatggaacaacaattcaaatcaaaccaaaccaaacctgcaatgatcccatcgacgaatcttcaagtcagtacccccagttaacaaatcacccccaggtaagggaatcagtgaacgaataccaggaagacgtggtgggggttcttgcaattcattaactctgtacttggggttgacattacgcctcacgtccggtttagaatttccccgacttagtggtttgcccaaggcccaaagaatgtctgacatttcagcatcgctgtcgtagtttgctaccttcaagacctgcaagaaaaacaagaatatacataagaataatatatgaaccgtcaccaccttaatccttatgaataaaaaagttctctatacctggtggcaaattccatcctctgcattccaaagggaaacttcgttgcaacctgcagcaacatagacaaggggccttacagcagtagatgtagatgcatttggaggaggaacaaaaaggcacatcttctcaatagggcacacaagagggtactgccaagagttcacaggtatcaggaatctaagatcccaaagagtaagttcaccccttgaagatcctgagacaaaccaattaccacaaggacctgtgaccaaagaagatacatagccattttcaggaactgagtttaaagtccaggcatttgaacttgttcttgtatcccaaagatggatcccgcaattttgggtgctgtacataactgtctgacttgctgtgttatcagtggagtggttcaaaaggctaagtatggcaccttccttgatatccttctttttgatatcggcaataccagaatatttctcaacaacattaccaagacccctggtgatgtaatcaacagaaaatatatggatcataccatcacatgctcctactacaacttgagcagaaccacggagcattgtggcacatagggcccggcttccctctaggtgataagttaaccttgacctgaatgaaatgtccttctccaacttccttgaatcccataccttgaccgtagaatcatcagatgcactcacaaaaaaactatgatcagttgaaatagctaggtcattgacagcagagcgatgctcctgaaggtgagcaaccaataccccacgaggcctccaccctgaatctgaaattgatgatgttcgtgtaaaagatggcaatcctgttagttcagtttgggaggaggcaacttccaagggaacagaacctccttttgaagaactagataatcccatatcttgaaacttggtactgacatatgatgtttgatcattttcccggccatctggttcatgtacaactctgtagaactgtttagatccactgcttatgctgaaagaacctgacacaagcttaggtgccggaactgagctagccaagctaaatgatttatttgaaggatccatccaaggcaaggacgatgcaccaaatccaccagagttcacttgtaacagagaatcagatgctgcagaaggatttcccgctgcccgtttgtccatgctaaaggagtacaagggtattccttctgatggtttatctcccataaaactattcacaccacttccttgtggcatcataaaacctgagaattgcaacttttctgaactcaagggatcataaagttcaactgcactagaagaattgtgtattaagcttcccatagttctcaacttagcctcaccatcatcatattcactccgctcagcttgttgcatcgaattgaatgcaggcattgagctttcataattttgttgcttgtcaggccaactcttcgcaggattaaaatcagcaaccactttctgaagtaaatccaaagtttcccattgttttgattgtggtgatgaattgtaccatatctttctttgtctttcaagcatgtctgaactcctggcattttctaagacttggtaaaatatctgtcttgagactgggggctttaaacatgaaagtagagctttttcagaagctagtgatgatggttgtctccgcaggaatggccggataacaggggcaaggaagacataagaatctactgcacctaaactttcactactagcaccaatgaaagtgacagctaaccttcgtacccattgactaggataacatatcaatggaaaggcacgctctatcatttcgaggagtatcctcttccttagaaaactgcttttgcatagaatggccaaacaatccaatgcattgacaatgacagcctccgtagtatcaattaaagcctgctcaatgtaaggtaaaagatactcctctacacttctttgacccacaaagaagcagacatacacaatttgtccgtaaaatactgttcttaattgttcatcccggtcatttagaaaagcagggaggataggtaagagaaaatcattactttgtctctggccaaagaagcagcataggttgctaatgtcctgaaggagtgctctcctgatatttggagtttgctttggacccataacaagttcttgaacaacctcagctatagacttccttaattgggcaagttgtgcatcactattagccctctgtagacgaccagaagatctactagatgattgaattggcttctgttcatcaagaaccccagcctcactcaagcttattgaatgaattaagaaaccataagccgttagtgctaattgagcaatattgcttgcataacatattctcacgctttcctctggatcatcaggaagcatggaaagcatgggaagaatgtattcaggaaatattttcgcatcactaggaggaaaatctcggactaaaggcaggatgtcacacaaagtttccaaggcggcacaacgtacaattgctgctgaatcagaaagcattgcaataacatatggaagcactcgttgcaagcgatcctcatcatcaatgtacaatgcagagcacttaagaaagagtattgccctcctccttaaatgtggtaacttgacattgcgtatgcaggaacatagaagagaggtaattaaaaccatgccctcacatgtcataccatcttcaggaagaggcaaaaaaggcacatcaaaggtatctgtctggctgtcatgcttggacattaacaaattcaaatcattcaacgtaatctttttcataaaggggtgatcatttctcctgaatgcactggaaatggtttgaagtagctcaccaggagattgcatgccgtagttcctaaaattttgggaaagttcagaactatgaacatcttcaaggataggcttattaccagaatagtgattacttttttttacatctctcagcagggaattgatatcaccaagagtttcaatatgttcactatttaaacctttatctatttcatccctctttaaggacgattccttttccaaagttgggttctgctttgcaatcatctcttcagattgtataccactttcagtgttttcttttggaatcatagccagtcctgtaccattcccttcagtagacctagtgctcatcatttgcttcagaatctcatggaaaaagctttggcacagaacaacctacaaaaaccatatatacagtaccttttacacagctgaaaattacaaaataataagtctcaaaaaatgttacattattatttaccctcatatcagaattaagaggattccagaagcagaagaagttatgcagaaacggagagaaatagcttggaaacacaatggtcatataatcctgcagatagttagcagcagaaagtcgtgactctggttccaactgaatcatatgaagaatcattttgcggattccagaatcagggatctgcaatcatagggtaaacagataaaagaattaataagagaagagtgaaagagaaacataagtgactttcatatttatgtccacaccaacaggagtgaattagaataagccaaataaaagacaataagatgaatgagcgcagtgaggtagagcgcaacgtgggaaaataatattcttcaagtttttagacgaagaggagagggaagtaccttttcaagaagttgactgggatcatattgccctctgcgataagcaagaagttgagagagttcaaatagtggctgaccctcaagaaaaagctctgcaattacacacctgaaaagggtaacataacagaattatacacattgtaggcatgatttaagtcataagagaacacaaattatatagtatttaagcttaaaacactcactagaaggttctaagtcatatctagtgataaaatctaaaaatttatcctgacctaaaatctcaaaagtcaaaacacataatgagctaaagatgataactataactcaccctacagcaaagatgtccatagaaggccttaaaggtgcatcttgtgcgacctgcatctcgcctccatgctcataaaatctctgaaatttggagaactttgaaagtaattaattaacaactgatcaccttttagaatgaacaagtagtcatgcaatcaacaatatttaagattgtccactgtccacacaaataaaattgctaaaaaagtgaaggatgagaaaatgaaagtacagtctagatgcttgataatacacagaatataaaaggactttcatgcttaaaaattcagaaatcaaccacacaatcaaatccaccagcatcattgcctcaagaaatatcaagcacgatgctgtctcaaaattttatgaacatgcaactacatgacattgacttaaaaactacatgttcatgtaaataagtacatcagaacacaaataaatagaaggaagatcctccaacaaataacggcaactaacataatcacaaggttcagttctcgataatgagtcccaaaagttctttcaactagcacatataacaaaaaaggtaagtagataaaagaaaagacaagaaccaacctcgggagcaagataacaaagccttcttcctccggtatcaaagaaaaacgagaaatcagaagggtcatcatagggaatgtaagttggtttgaatgatgcaaagtccacaaggtaaagccagttccaggaagtgacaagaacattctcgcacttaatatcacctacaaattcaaaaattgaacaaacttacataaacgtgaagatggtatactaatactaccaatagaaatttcctaatcaagttagctcaccgtggcaaactcctttctcatggcattgtttcacggcaagaagtagctgcaccaccacaagtatataacatgtttcaaggaatcatacatagacatagtcacaacatacacaaaacaaataagatagtaaatagatacctgaaaggccaaccatctcttctctacgagactcagaaaaggacgcgtacttaatcgatcatgcaggttattgaagaagtattgcctcaaaagataggctgctttatcagtttcttgccagaactgccaaaaagaaacacctttagcaattcaaaaatagcaactaattgtcaccaaaaatcataatctcgttcaacttccagtataaccaaaccgaaaccgaagctggaagcatgaattgtccattcaagtacttctaagtacatcacacaagtataaatcaacgacccccgagaaagcccaactttccgttcaattcccgtacaactttctcggttgccaatcacaaaccaacaaaatattccaaaatcaaacaataagataggaattgaacctgaaatggccagacgtgagggaattcaaggccacgtaatgtctccttgatgtgaaagagacggcgttcgtactcccgaagatcgatattgtcgccacgcttgaaatataccttgacgagtaccaaaccctcgtcatgcttgcagagaatcgacttgaggaagcgaccacgccctagaacctccttgaggactaaattgtaggaagaaggaaggtcgtggaggtagtactcggaagccgagacttgggtcgtacgagcaatcttgttacccatgtttcggcggtcaatttcgcattattcgccggttagttccgttctcagatggccgcagtcgccattgttaatctttatcagggaaggagagatgagcaaagaggaagacgatggtaaagctggggtggatgagtgcctgcgtttgcttctggtttgggtcgtctaatacttttgggccaccttcggagtttcgaaacgggactccgtgcgttttattcgaagtttcttccttctggactagattcacgtttctttacacgtggcgttatgtgattggttttaacatagactgggcccacccagagaaggcttaggtggaccaccttctcttattattattatttttttcctttttttttatgcctattttttatggttatttttctgattttctgatttatatttattagattttttagaagataattggtttgtgattataaaattgtttttttttaaaatagtgatgttgaaataaaaattaaaatgtgattgattctaatggcatttattattggaataattacataaggcactattttttgtaaaatatttacatttttacgttcaaagaatattttttt

SEQ ID NO: 379060 - DNA, 3320 bp, Cannabis indica
aaaactagtataattccatacctcaggacagaataattttttcttcaactcaaaatagtaatttgcacttgaatattcgccatataattatcgtttacgatacaatgttgagagggaacacgagcttgttccgcccgtgtatactatcttcttcgtaaagtaacagtttcgagtgaaaaaaacttcattgcaggagagctctacatcacagtgggatgatattgttttcataccgcctggattcgacgtctctaccaatcctaccgaagaagacaacacgaaatgagtatttattacaagtaagttagtaggcaatgacatctctttcacaagctcatgatgatcaagtttgtacaaaaagaaaacaaacaaaacttaaaagttatgtgtttctttctatatgttgttattgttgagttagttgatatgcttacacaaaggaaaggaatatcactaagttagggaattagatttaatgtgtatctacccaatttgcactcacactatttcaagtaatatgtatgaatctcttcttcttataattattattgtcttcctcctccctcttgtttttagagcattgctattgggcaccttacggattggttagcgatattgtttaaaaactattttctttagttatataggacccaatatgtaattacattaatagtggtttgacaccgagaaatgtgctagacactagtagtactttttagcaattctccctgttttatgcacttttttttttttcctccgtcgggtgctacataacagtcggtttcgaagaatgatatcttaggaagatacgttcggtttggtttggaggaataaaaaagtaagaatagaaatagtaattatatataatatatagttaagaaaatcatattgtattgaaatagtacttttattggaatgatattttgatactttaaaatgaaactgccgaaggatgtggggtatgcctttaaaatgaaaatataggaataggattgagaatgagaataaaaataggaatggaataaaattaaatttaaaatgtataaacaaaattgataaaaaaaaaaagttaattaattttcttgatctagtattgaatggttgttccttcaatttcaaatagaatagtcattctactaaaatgatagaaaattcattaacatttcagttctttaaaatacaaaggaatataacaaaaattattttcttttcattctattcaattaccttcaactaaataccatcttagtatcttgatgccactagggcgaaaaagattaaatcaacgtaactcctgtttggttagcttaggttcacacccgacctttgaggttctcccaaggcttggggttcacgtacatccgaatggtatctcccctctctcccccttttgtaaaaaaaataatttaaaatataaccagataaagaaatggaataaaaattgattattttcatttcactttattaccctaaccaaacacacccttagttatgatttctcccttttcctctcatgttgggagttaaacaagacatttttgatccctttacaaattagtgaagtacgccatcatgtgttgccttattgttaggggtggccttacaaattttgtatttgttagtctaattatgtattacaagcaaatgtttaatttaggctccattagttaaatgtaaaataaaaccaaccacataatttgttgtgtaatctatttatatgaaaaaattaatgtgtcaaatatgttatctattaatattaatataaaaaatattattttggactttgtgattcgtaaaagttattgattaaactttctgtttagttaaatgataaaatagacattgtatttttcaaaatagtacaaataagattaaattgattttttttgtcaaaataaaatttaataataatctgatctagtaatgttatgataaaattagttatatttttgtatctgttcatgttaggaattgtttccatttggttatattaaaacatattaacgaaaatcgagctcagatttttatttttacgattttaaaaaatacaaaatttattttgtcatttaacaaaacaaaagattcaaccaataacttttacataacataatgtctaaaataatatttacccatattaatatttgtcatttaacatatttagggcatattttaaaatcgtctaatgatcatttgataaacgaatttaaaagttttaagctgtgttattatgtctcacctattttgacgcggatgagttattatcactatgtagtgcatacttctttttttctatagaataacaaacaatgataatgaatggtggctcttgtgcatgaatttaattttcttgggaaaatactcagaatattatgggttgagtcatgggttatgacttattatgacaaagaagagaagaaaagaaaagaggtaatctttgttttttttgttttggctttgttaaatggcatttgttatatgttatggggtcatttctttgccagaaagaaatatcactttctacactcataacaatatttactcatttattaattaattcatcataaaacaatctattattatttttattatttgtaagggaaatactataacccttttaaagggtaaaagtaaataaatttcttgtttttttttttaaactaatttactaatgtggtaatttataattttattaaaacttttatgttataacttgtttcagtttaaagtctgttccaattaaattgttaccttatttggtagttaaagtttgtggttaataaagttaattattccattaaaaaaaattaataaaaggttcaatttgcaatctcattttataaattaatgtctgatcaatttttttctcttatttttttgcacttttatttttatttattttttagaaaacccccaaaaatcacatatcaagcaaatagtttaaaaaaaagtgaaggggagactgagtctgattgtattaatttttctcatataaaataaaattatagatacaagaatgataactaagccaccaaattttactaataatttacgacaagtcatatttagttaagaaatgaacaacaataagttctagctattagaatatttctaattaaggaaataaaataatattattgattctgataaatgaatattttatattcattgaatctggacagaatcaattacgtaatattctatatatggtcagatttctatattcattacctgatttaatttcctgaattaattgtcaaaatattctgacaattaatgtggcacagatactgatggagtatctcacttataaatatagggtc

SEQ ID NO: 379061 - DNA, 986 bp, Cannabis indica
ttttttttttttttggttttagaatggtcaactgtttttgctttgtgagtggtaggttgtgttctgtgggggtgtttttgtttgtcgtggtctgtgctttgtatttacgacaatggaagaggttgttgggtcggctggtggaaagcagggtaggtgcctctccttaaatgaggtttccatttctcttgcccctagtgttgtgactacaaatgtacaatcaaagctgtgcttatttggcagaatactttcgtcaagaacttttattgacaaagatgtggagcaaacttgctcaaatatgtggaagactcgggttaaagtggagccaactaagggtactctggctggctccaacacttttcggtttgtatttgaaaatggctcgttcagtaaacggattttggagcatggtccgtggtgcgtcaaaggtgaaattctggtgctcctattgtggtcgtcgggctttggagtcaaggaactagcttttaactcgatccgtttctgggtccaaattcatttcctgcctcttgactacttctcgagagtgaatgcaaatgtattgggggctttggcgggtaaagttgtgttcattgagcttgatgaagccaagccggtcacttggaaacattggattcgggtgcaggtgcaaatggatgttaacaggcccctctgctgtgattgttattttaaacttgccaatggagataataagtggattcaactcaagtatgaaaagctgggaggtttttgctacatgtgtggtatgctccgtcaccaacgcatggattgtagccttgcatctcccgtcacggtgcttaatgacagaggaactccgttccctctatttggaccatggctgaatacccattcaaactatgccagttgtttttctggtaaagtgggaggctcggctggggctgtggaagagtgttggaattattttaccaggatctagatttactaacaactatgtttcattaacatcctaa

SEQ ID NO: 379062 - DNA, 3032 bp, Cannabis indica
ctttcaaccaaacgccaccttagcgggtcgaagcttcacccctaaatacttcaaaggataggaaccctcttccatttgaacaatgttcataagctgatatttgcgattcatatcaatactgtcaaaatagacatgagatttccctttgttagccgagagaccaatggaagaacaaaagcagtcaaatgccttttgaattttttttttagagagttcacattccatttacaaaaaatgacaagacatcaacaaaataaaaattaataagcttcaacgaattgcacattgggtgaaagccaaaacctttaggacccgaagctttgaatcagaagcctagttaggtactctataattaacacaaacaaaagaggggacatgggatccccttgtcaaatgtctttttcccctttgaatgagccatgcaaatggtcatttaacattatagtataggacgtacctctcaggaaaaccatgatccaattgatgatttttttcagaaagtgaagaccattaagtaagtcaagaaaaaaatctcaatccactgtatcataagctttactgagatcaatcttcaacaaacatctaacaaagacattctttcttgtattcccctttagaagaacttgaaaaatagtgatattataggcaagaaggtgattttgataaaagcacctggattgctatgcaccaaaattgggaggaccttggcaagtctagagcaaatcatctttgaaatggtattgcaataggctatgagtctgaaatcaatagcagacactgacatttcagatgtcagaatcaaggagataccagttttgtttagcaaatctagaatcttaccaacctgaaaaagcttcaggactgcagaagcaatttcatctccaatatcagtcctagaaccaaaaccatcggggcctggactcttagttgtatagatactaaacatggcagatttaacatcctctttagtaaagggtctaacaagattcacttgaagttgaatagagagtttaggacccatctgtaaacaatcaacattcatttttctagtggcagtactgtgcctccccaaaaattcttgaaatggttaaagtaatgatcaacaaccctgttataatcatcaatcacctgctcattctccataaaagtagtaatacggttctcagctctcctttttttaaactcacatgaaaaaaatgacaattttcatcaccatattgcaactaattaatcttatttatttgatgcataaagcttgtatatccttgattaacaacctaaaattcttcctgagtaatcttttctcaaccaccccaaaaagacctttacctcgagaaggcttggactaattctacaaaaccatgaccttgtaaagattgtggtccatccagaagttaaagaatttgaacggtttaatcccaatatcaccaatttgcaattgtttgaccaaaaaaaaggtatgatcagaacaaacttcgcattgaataacagcttcggtattagggaaacaatctaaccacttctcattcttgaaaactcgatcaagcttagaatatatgtggaccccatgatgatgtttatttaaccacgtaaaaaatgaaccaaaagctttcaattcatccacttgaccaagagccagccattgttgagcatcaacaatgtcactagcaatcacttgacgctccccacaatggtcctcatagtgaaacatagcattgaaatctcgaagcacaatcaaagggagattcaaataccctatttcagcaagcagagaccaaagagctttcctttgaaaaatggaattcttctcatatgttgtagccacaaacaactcagtcttcaaactagtaatcttcaatttacagtgcaccatttgaggatcttcgataaggacagtaacctgaacaaactttcgctgacaaagtaaaagaatgtgaccttctaaaatagagctcgaataaaattcccaattagggaaattattacgcatcattgtgtcaactttaagtcccttaattttagtttcaaagagggcaccgaactcgaatttatgcaagcggcaaagatcaaggatagatctttgcttattttctttattcatccttctaacattccatcctattatgttgcactactccataatcattagtagatgaagaggctgacaaatacccaaccacaggttccttaagaacatcatattcgttactaactctagctggaacttttttctcataagactttttctatccaaccctttttggagtaatccaaatatcaccatctaaggcttattcagatcattgtttctattattcatctgagctgaaatggtatcatctttcacaacttccacctcaattttgtctaaggcaaaagtaagcaaaattggttccatagtggcagcttttttagcttccactttggactttttcacccacacaagaccttgatctttagagcaagtactaacattgtgacccaacaacccacaagccgcacatttggtcaaaagccattcatattccacaaccttctccactaattggtttctttcattaataagtgaaaatgaccaaaggtggcttatttgagatctccacatcaacaatgactctagcaaacttaaccattgatctatctccagtaaccttatcaatcattattggcttaccaattgtgctaaccaaagcactaagactcttcttcccctaatactgtaaaccgagtccattcaaacagatctaaataggaaccaatttcaccatttttacagaatcaagatcaactgttcaatgttgaatcacaactgggttttttttatcaaagtggatcacacctatctctggcacaaggtcctttgttgcttctgttgggaatattttaccaagttctagatttactaacaagtatattttattaacatcctaaatatgaattttctaaaacaatgaaaataaacacataagggcttaagaaaaccttacattgattgcagcgaaatataatgactccttccgttcaagatctct

SEQ ID NO: 379063 - DNA, 3279 bp, Cannabis indica
attacaactttttagtcaatcttcacgttcaaaattacatgttgaaattttttttttttcaaatttttttatagcggtattcgttatagctacaatatcatccctataaattttttaaaaattccaaatagtttatgataccgaaaacagagttcttgatatttcagtttaccacgtgtgttcaaaaaacttaaaacatattttcggtaatgtaagctattcgaaaattttaaaaaatttacagagatgatgttgtaagcataacgaacactgtcgtgaaaaaaaaaattgaaaaaaaaaatattccgacatatgttttcgggcatggaggttgactaagagattgtaacaggaaattgacagtagcactcctcttattttttttattcgattatatctaaattatttaagagtattttcatcatatttaaaaaattgaataaattgtgtgatttattttcttttaagaaattaactactttgattttgtaaagaagataagaaaagcattattacttattaaatcattccctcattatacttggcagaattatttaccaattatcaagtataaattatagttttattacttttaaatacaagtatatcttataaaaataaaaataaaaaagaataatgtatcttttatcattatactctatactaattactcaaaatagaaagtacataaagctatttatgtttttttttttaatggagggaaagcttatagttatatatagtagatagcggttacggtaaaataaatatttataataatatacttaaccagtttattcccgttaattgatgtgtttaagctttttttttctgttgatactgtagcttcattaaatatgcaagcccaaggtgtctttcttaatacaacgagatttcttttagctaatattatgaaattctttcgatactgtgagtcttaatatacataatattgcaagatattttccataccgcgaattctctttatcgaagtccttctcgagtggaaaaatttatcccaataacaattaattttgatgaaactgcctagtacaattgttgttttatttattattcagattagattagatatgaagcaaaaggagaatgccgtctttgaggactaccttccaaaatcatagtgaataataatataaaggttttgacaaatccaaaagttaaggaaggtaaccactcacttggcttttttgtttgcttgtacgtatttaaatgggggagaagaacccattaacccaacttgtgtcgaacaaactatgtactcgaaaaaaaaaaaaaaaggaaacccgttgtattcattgggtactatcttctgaggttgaaagggacagaggtttacttgttaattgttttatctacgtgtcacaatgtgttataataacaatttttgatgccttttttggcgggatgtgataaatcgtatccactagtcaatacaaatgtgaatcataatgcatattgcagtgcttttggacctaaaagtttcatctaagtgggcaaaccatcactttgtaagaaagaaaaatgtcaggaataattcttaccaaacacccactaacatgttatttagatagacaaaacaaatttaccaaagcagaacccaattatcaaaaacattatacaaaaaatgactaaaaagttggcaatttttccattgaaaatagcatagtggaaatgtaaacaatgtaggctgcatgtggtccaactccataaccatatagaacgaaactgaagaaagtcaaaactggaaattgtgtcaaccatatgatgctgtcagacttcaacaacatgtcagatcccagtttcatattaatttttgtttgttttattcataacagctgaaaactctaatcaacatgaccaaagattcagcattgtttgattacaaatggaatccaaccagttgctcagctcttcaagtaactcaactaagtcatgcttttgttggtagcttgagggacttggtttaactagaggacatgaaaaacaagggttgaatttcagtcttttccctgatttttaactctacaatgaaagctgatctatgatcaacacagtcgcattaaagctagttacgctaaggtacacctgtcccaggtgattcgaaaaacatgacctagggaaagaaaagcaggaaaccaaccagaacagtaaagaatctataaatattcacaaaactatggtaaaatgtctataaatatttaccagaaaacagtgactttaaatagcaggagagccaaatttttaatcaagaattgatttgtttgatatatgctgattgcctgcctttaatgaattccaaaatggtttttgcatctccatgcttgacaactctcccatcttccatatagactgcaccatctgcatactcaagctcctccaagcgatgtgtcacccataatgctgtaacctcttcggaactatctaaagagttccttactgctttgattaccccaagctggtgtcataaaaaaataataaataacacacgtaaaaggatttggtcatatatgaagattaagaccatgtatgaagagagcactaaactgagctacctgttaactaagaccagaacatggacatattataacaggccatgacactacattcaacatagatttatacctgatcagtttcatccaaaaatgttgtaagctcatccaacaagagaactttacatgcttcagctaaagcaccagcaatagcaaccctttgcttctgaccaccgctaagagtttgaactgaccgctgagatttgcaatgaactaaataaataaatttcatgctacagttacttaagatttgtgaaattgcgtaatttacctgttggtagcttagcatgccaacagcatccaaagcttttgacaccctaagtttgacttcatcactggtaaggttgaactttccaaggccaaatgcaacatctgcttccactgtaggcatcacaacctgcagtaaggttatactgccatcatgaaatcaagcatttattccagttatcttaccacaatagtatccaaaaatgtcatgttttggtactttaattttactgaagcaataaataataaataaatttatcaagaaaataacttatcaaaaacacaattcaattacaataaaacattaatcatgtaatcaaacagcaaccccaatctaaatgaactaagaggcaacatatttctctgcaaaagcacgctatcaattatttataattctttcttttttttttgtgaaaaagagaaagaggcctttgtctaagac

SEQ ID NO: 379064 - DNA, 2042 bp, Cannabis indica
attaaaaaaaatattggatcttatttttaaaattataaatgtgttaataactaagattactcctttaaggaggtgtactacaattttttttaatataaatataatgtggaaaagaaatttaaatttccattcacaatagaataattttcatgaaacattgaataggaatgaatgatgagtgatgaaaaatgagaagagaagagccgacagaaggtgggacccaaaatcgtaaatatagtattggggtaggggtagaatagtaaattaattaaatcttagtgcgggggatgcactgatgcagccgtgtaggccgtagcggatgtctttttctttatttgatagtgacgtgtttggctttaaatatgttcgaaacagacaagtttcccaaatctcagtgctcttcttccttgctatttatcctctgttccctctaccatcctatactatatagactcaacaaaaaaaaaaaaagtttaaaccacattgccacttattaatctagtattaatatgaatttattcaacttttttttggttttttctttgagggtgaattcattcaacattttgaaatattcaaactaaaattgttaattaattttatatattaattatatatcatataggaaaatttggtaacgtctagaccaataagaaccaaggaaaagggaattagtttcaacgtgaaaaagattggaattggtaggccatgatagaagagagggaaaaaaagagaagaagacattggatgattaattacatctttcttattaattattatgttcccactaaagatttctttggcttttcccttaacattgaaagagaataaacagacaattcaaaaggcttctattttacttatttttatttttcaaggggaagagtagtaataataacttcattcaactcaagcttgaggtatttttttattttattttatttttgtcatgcatgcatgagataatttgagtttgagccatatgtatatacagcttaacaaaaacaaatgctaagacaactaaataaggatctatagagagcattgagagaagtatatatcttaccatcaacaacaaataatcaagaatgttaattatggtagcaaagattgagggaaatacctttttcacaaaaaaagactaggcacagactaacataaatgtggtattgaatgaagaaaataagagataaaattgaataaaaaattattaagaaaagtattctctattcaagttgtttactaagtaagttgagaagttgagaagtattctctattctctctctatatatgagaaatttgattttttatacatgatttaagggttaattggttaggaaaacttaaactataggtaattgttagaatatgcccacttgttgtaggttttgtcccaatgagctaatgccaaatcatcattctattcaactattgacattggttagttaagttagttatctagcttgacacctaagctctacctacttgattcaaccaatgcctataaaaggaagcaccaagacctcattcaaggagagtccaatccgagcctctcacctagaattctctctctctttctctctaatttctgtacaaatcttgtgagtgtttaggagggttgtaaaagtagaattgctcatccattgagatgacttctaccatgtgaggtttgatatgtaatgtgttctacacttagactcaattgagtgcatgaatcggattgtaaaggtgctatacatttgaataaagttcatttgattcaatgttaagtctcactgaatttttcattcatttctggttttagttttctgatttgttttaatcttgtttgcttgttatgttggtgttgttcttgttgttaattggcactgatttggccaagaattgagggtgtttttcaccacaccactttacctaaatctcaaaattacccctctcaaaatctcacacccattctctctcctttcctctattctctctgttcaaccgtcccaacccagccccctcccaaccccagctgaaccccaaacgacggccacaca

SEQ ID NO: 379065 - DNA, 1955 bp, Cannabis indica
aaaaaattgcttttttattttattatttgtgaatcaaggcatgacaaaatatgcatttatatcctacaattacgtgtatttctctaattgcatgagatcgatttgtcaactccaagaagtaaatataataattaatttaaagagcgattgctttcgtataacttattattgtgcgtgtaaaatcagacctcgtttcattctcaactgaactttccgtggcaataaaaaaaacttcaggaaaaaaaaataaacttcttttttattttattttttcttaagaggaaaataatttatttattgaacttttaaaattaaataaggctttattcaaaataaataaataaaaaaaaaggctgaattatattttctgggcgaataaataattcattccattaagttgttaaatatgaaccagaagtgtatttagtaaaaataaaaaataaaaaagcaataagagaaaatgtagaaaaaaacatggggaaagtgaatggaaaaagaaattgaaaaattctgtatttttttgtatgacagaaattaattagatgcaaacaaaaacttgcagacccgacccaattgcatgtttttgttgccttcttcaatcgttttgctataatgggttttcctttctgaaactccacaagtcaaaacctatacgacccagaattactcacccgccatggaaggtattgatgcttttatttttaataactatttccagatcaatttgtgggatttgggttttcagttttgagggttttaaatcacttgcatgcatgaccagattttgggtaattatgggaaaataaaatctgggtttctgtattttgggtgtttggtttctcagaaaagtaggaattgggttttgattttttgtgatattatttcgcttagcattcctacttattggttccaaattccaaaatttggtgaggtgtgattgttttaccaatctaacttattgtttttacttttgagaatcttattgggcataatatctgtaattcacttcattactagtaagcatttcaattctcttgttgcttttccgacatgcctttgggtattcatgttcctcttgatttgttggattttacccagatattgttctaaaatggtcaacggatatctctttgtaccgtttgttagtgtaatgttgttacgatcttgttgtgatttgctttttgtattatttatctgaagctgttgcgcgtagatgctgctttggatagtacgtttgccctggttttgaccttgacaaattgtgactatgaaatatgtgtaaagatgtaccattaaggatgaaaatgtttggatttatgtgactgaatacatgttcttgtgttttggcattgattacttgaagaactcagccttgtgctgatggtttctcatacaattctctgatcttttcttctgttggaggttcaagattttgttacttgcaatcatttacataggttaagccttcatttatagcatgctgattaccgctgtagttgttgattttggttttgcttttactgtggttgatattcttatatttctcttaactagagcctatactagaaacctaaagcatactttaagataggaaaggtttagaatctgccatgaataatataattggatggagatgtaaccattgaggtttacttggcaatgatttggtaatctgcttctcatttctgttactgatgtttgatgtatatgtgagggtttggtaattctacctattaactactgcatgtcatttttgtacttcattattagtaaacacagggcacatgcatctttgctggagaatcattataaataaacttgttcttttctttttcgaaactttggccttgacagtttgacctggagacctccctgtggccccaaggttttattgagcctgtggggaacggaaccttggaacaaatgcctaccagcattttccaaggctcctcctt

SEQ ID NO: 379066 - DNA, 1084 bp, Cannabis indica
ttgagtaatcaacccactctagtgagggtaatactcaagtttttgtgtaagactgtgtagaatattgatcaaatcacaagtcagattaatccaggttcatcatttggcaatattatgttatataaagggaatcgagggttagagtgattgggcggaagaagacataacattttgctacgcccaatgtgagaatctttaactttttgtgttttttaatcgtcttgtataaagcacattttaggttgttagattattttgttaataatcaaacatacgtgatagtaaattagatcttggtaaaataagatgcaacatggtttgggtactatgtgtgtaaaaatgttaagtgaatacgcctatttttttaccaaatttagattgggtcatagtcttagttttggctgggtttgcttggtcagattttgggtaggtttgagaccagaagggtattggccagttcatgggctttatgtatttttttgcaaaaatatacaaaataatgctaaaaaattactcaaattacaattacattgcacaaaatcatacttaaataccaaccaaacatattaatatatattaacaccattgatgagggaggagaggagttccccgactaagacacccaaatcgaacaaccactatagacgcatggaacaaaggagggaagaggtcagactcggaggtggactggaaaaggaggatagtgagagatggagaaagtaagagggtctagaagattagagagagatagagagaggtagcaagaagattatagagagtcgatgtcagtggtgttgcgtgtgtgtgcgtggggtggtgggagtcatgttgcgcgtgctctaccatcggcgacgactgggttgaacgagagagtgatcgggaggggagtgagatatgagagtgagtttatggtttttattttgagtgaggtctaaaagagaatgagtgtgaataagataatttttttaattgttatgtgtcagatctcgggtggctttgagtgtcacccatcctagggctgtacatcggtcggtttagtcggtttatactatatattttccaacccaacataaagatcgggtta

SEQ ID NO: 379067 - DNA, 1289 bp, Cannabis indica
gtttatgaatgtgaatgaatgatagctattaaaaatatagctgttggagactttttttttttgctaaataaccaaacttcattaagcagaaacgaaaaaattggtgagcacgtggggactcacctcccaaaatctcaacagaccgttacaaggatgggacaaaccccacctcgcaagggagtgagcagccttattaaaaacacgagaaatccaaacaacatgactatcgttcgcaacaagagcatggtaaagctcattaaaagaaagcgtaagaaaccaaacaggagaagagcccacaatcaaggcttgcaccagctgctgacagtccgaagaaaagtccacaccaccaagatggagttccttcgcaagagccaccccgaaagccagagcttccaattccccctggaaagccaagagcacgtgaactttttcgcacaaagcaactaagtcctgctcatcaaagaaaacagaagccacgactccaacctccttaaccaaagcacaatccacatatcccttcacctttcatcatcctggtaaacctcagtgatactcccccgtttcgcttctcccccccacttgcatatcaacaccagcagccagattaagactctccgaagccaactccttaatctggcgatttaacttatccaactccaaagggactccgcgatgatacatatcattacggtgattccacagtttgtagtacaacatagcaccataaacagtgaattcacaggcatcggtctgcgacaatgcattgaagaaaggcggtgatatcaaccgactcaccacctccctgccattcaactctgaaggacctccaatcgaatactccaacgggtagaaaaccagagggaacgcgttacaggacagagggagataaaatgtcttaccgtatccccatcatcatgcccacaaagcatacaaacaccaggagcattcccaaaaatattctacaatttggacccaaaaggaagaacgtcatgacataatttccacaagaacagcttaacgcgctcatggacctttaacttccaaattttagaactcaatacatccttctcctcaaacctctctttgttaagagaccaataagcaacttttagagagaatttgccgttcaaagaagagttccaacaagctgtgtcctttgccggaagcaactctctgttcacctttagaatgttagaggaaataactgttgggttttatgccctaaataaaactcctttcatataatcagatttacttattaataaagatcagaaataacattttatgtt

SEQ ID NO: 379068 - DNA, 1187 bp, Cannabis indica
acatttctcttaaattgatattgtcttctaatattttttttttatcaagaataaggacttcattaatcaaaccaaccaaatacaccctcaagaggcctttccaattcagaaaaagagcaaaacttcaccacacaactattaattacatgtcaatctctgtaataaactaatttctactttggaaccttttatattctttagcatatacaatctatatttgactttttttttattttgttaactatacaagtaatagtattaaagtaattggagaatagacaattatttctattcctccaaatgtgataaattgcggtcgccaagacaaccacactaatccgattgactatactcgggatggcagcacataaccacgagtaccagctatcaaacttcctagaccaccctttgaaacccagccagcagaacacttcgtccaacacttgcttcaacaacccgcaattaaaaaataagtgatggcgtgtctcaagaattgtcccacatacatcatagttcaaattgtccactgtaatattgaacctactgaacatatctcttgtgagcatgttcatattagcagcttgcgaaagaatgaaaccatgtttcgggatattaagaccacaccagatggccttagctgagggatcaagcgactgattcagggtagagttatagagcttacaagctctgaattttcccccaatgccagcagcctttatctaaatacacttctcaatcgacataaatttctccagtattaacttgagtccatttttagattgtatctcaacaccactttccctttaatatagattacattgacccacttcacccaaagcaagtcttttttcttcataagatatcaaataaaccgagcaagtattgccttgttctattatgagcgatctttaaacccaagaccaccataggctttaggaaaacaaaccttatcacaatttgtcatatggattctagtacgtgttgggttttgtgccctaaataaaacccatttcaatataatcagatttactaattattaaaagttcagaaatcgcttttatattgcatggttcacatgatttatgtcatgattatacttaatgtataaatattaagtgtagaacttatgcaaatatatatttgttcataattatagtgtcgtcagcacagtggaatataatcatgat

SEQ ID NO: 379069 - DNA, 1278 bp, Cannabis indica
ttaaaaattaccaagatgaacatataaattgactaatccgacaaaatcaaacttaaaagaaagattttttgccataaataagttaggtccatgtaccgcatcctcttgtgaaagaacatgctcgactggtgggtcagtgccacactcagtcattatgcctccaagagatccttgttcatcgctagaaagtttatcattattgaccatttttttaaacttgaatttagacaactgctcaatgtcttctttggatgctccctcctgctttaacaatgaaccatactacattatcaaaggattccagaaaagagcaatcctccaaaagcataaatgggtggccaaaataatggtggaaatggtcataagtttatttaaataaaaatgagtggaaattgtcgtagtaactaaaagtgaaatagattctttgagaaaatgtcaaaagaaatagaatgaagcagaatgtataggatgaaagtgccaacaaaagcatgtctccgataaacatggaaaatgagccagtttcacatcctaatattagcaccatcacaaatggatctgctactttttgttgatattggacaactcatggatttagcccacaaaaatcagaagacaaacctggtctgccacagcataaagaagagcaataatgcaaggaaggcagcagcaaacagcaatcccaataatacaagccagtgcaacgcagaaaaccacaaagaacacgtcaaatccaaggaaaataatacagagcctgtggaccaaatacaaatatcatacgaagttaagatgtattgcactagtaaatttcattgtttcagaaagaaaagagagaaagagaggagcaataaccagtaaagctgcggagaggcttgtgctaaagtttgaccacccgcagatacccagtagaacccaataatccaccagataaatgaaaacattgtatttgcagattccaggtgctttgctacattgctgagatagaaaatcaggaaacaatgagtgagtaaaatatcactttgagcaatcccacatggtctaaagtatcaactatacctaacaactttagattatcgtgcacagctcatcattatcattgtggtgatcatcatcatcatccttaacaaaacagtaattgtgatgattgatgatgatgattacaacagaactctggacatatcatttgacataaactcaaaccacgtccagctacattatattacaggtttcgcaaatgtacagagctaataatcaaaaaaaaaaaaaaaaacaaaaagagta

SEQ ID NO: 379070 - DNA, 3686 bp, Cannabis indica
gaaaaaaaaaaagaagaagagaagacacaaacgctaaaaaaagaaagttagattcaaatatgatgcgcttaagagagctctcacatttacaggccaaggaaaacgtatgtgattcagaagctgaaacctctccatatcatactctcttacaccacaatcattattggatgccatgaaattagtcccacccctgccaaaaaaataaaaataataagtttgtaaatgaaaccatcaaccatcaagaaccattcaaacaatatacttgtaacatgattaaacaccaggtcaacagttcaaaaatggcaatgataccttaagctctcatatatttcaacagcattggttatagcattttcatcgtaagtggtccgagtacaaaaactaactccctttttgtccagacgctgcaaaaataggtaaattataagacaccattctttacagggtctaaaagcaaatcatacgataataccaagacaaaatagtaaagttcttagcatgcagatttaatcatgccatttttgaagacaaatgatgaaacattcatcctcagccaaaaaaaaagtaagttctttgaagacaacagaaagccaaccaaaaactgccacttaaatattcatttgctagcacctcatgccatattgtaaatattttaggaagccaatggcatgcaaaggtagaaaatgtgcatccacacaaactacccatgttaagatacctccataaacagaaagcctatggaaaaccatttcactgatttcttcttttaaacattgtctggagaaattcatttgctaaagttggatattgttgaacacagcaagatacacagtttgtataaagtgctcgccaccaaggtcccatatcctaaaaagtgagtgcggattgtcaggagtactatcccaagaggtcatttaaagcttcggaagaatcacttgccacaccgcaacctcttcaactaccacatatgaccaccaacacctggagagtcatcctcacagcttattggtggcccaagaccaaacattaggtgggattatggtagtttcaagtcaaaggaattccttgtgtatgtgctaaccaacataatttgatctcttgttaaatagaaggtggaaatggaaaataagaccattaaaaacaatttccctttaaaaacttcgtatgaaacatttcctctaaaaggaatccattgtatcaagcaaatttacttctaagctcagcatcctctaacaccataatcaccacatttaatgatgtaagtgagattcaagtcacatcaacaatgatctatttcatcatagctctatggccctctacaccacacacacttctcctaaatatgcaacgaatttctatggtatggttgaaatcggttaaaataagcataaataatcagatatcagaatagtttcagctctccctccaatactctttgtccagctccttgcatgaacctaaactgtactgttattctaagctccctctgaattactcaacagaagtcattgatgtcaggcatcagtaaaagataactggagataagtacgtaaaatttaggctgatgctgggatttgtttaaatgacttgaattataagaaataaaaccatggtttatgtgcctatgcctgcctgcctacccaccttttgcatttaggtcccaaccccaacctcagtttttgcatttaaatcttcattctctttaaaggtagcatccttttcacttttccttccaaattctacctaaaatactaggttttgtcgaaaaaaaaaccttaacatccttctgcacttgagtctccagctatacattttcacattagatatctacatctacaagtgttataccactttgttcagtttatcatattcaattggcttatgcagtgcaacaaactgaatttccttcaattcttctgtgtgatgattgaacaagatggcacatggttaagattaacaattctgcaaaagctacatttttctttggtcaatttaagctcataatggaaaggtgacagagcaacacaagtcttttgagttctcttggtatccttctcaaacttgaaggatacttcacacagttgtattagagatgaagtttagaatttcagaaacttaattgtaaaattggcaaaaacatgcaattgaaccatattacagaacatataacatgtatgtgacctaacatatacattgggaaagaaaatatcttagagatataacaaaccttacagattagctccccttggaagccaccagcaaccagaaaattatccttgacagccagtgtgctaatctgagtctgggaaaacccttccaataaatttcctgcatgcttctacatggcaagaaataaaattaagatcagatgatgtagcacactaatatacgagttgtttccctctcggcgatgaagcttattccccaccatctaacttagataaaatcatgttggtttgaaataactaaggaaattagaagaaaacataaaacatgttgaaattggatttttttttttaatttatttattatatgctaacatgtcaacaatgaatgaaataaagaaaatggcaagcatttcttatgatgatatacacacactgagacagagctgtaatacctcagtaggtgcaacatgaccagcaaaattgagactttctgacaaatttccagttagggaagaccagtgcatgactgaataattcgagatgagatagacatcatgttttgaagaagcccaaaccagattcctgagctgcatacaaaatgcagtaggttacaaattaagctataaatctcaaattggacattccttgtgagtattttcaagctgaatttcgtatctttgtgtttgtgtttgtgtttgtacacaattcttagctaacttgaatacaggacaacacctccacaaacgtaactagagaaaaacaaacaactaaatcataaaccatttgttgaaatttgcatacctgaaagtgaagaattgttggcttaaccatccttgagttatgaaaaaaatcaaagtagttcccacccttctccatttgcttgcattcctgaaaaatggatacagctttatagcattaaaatagattaaaaacattaataataagcgaaggagtttagggtaatatacaaaccttatctacagcctccccagataaggggatattctcatagttccggtactgttcaagccgtgtcaatctgtacttttccctcgttatgtttaatctatcccaaggaatgccttgaatgtcttttccctttcttgcttgggcagatgaagtatctgtcactttagtgagctgtttatattcaatccacatcatgtgagtatcgaatcgagcacaagactaaaaatagataaatgaaatacattcaacaaaacaaaacaaaccacttcatattcatcgaggttctcatcttgtacatggttttcttcatccatgtcgtcaagaaaatggaccatttccccctcatcagccatgtaattaaagtcgtaagcttgctggtaggacatgctctatctgcttgataaataaaatgaatagacaaaagttatgcacttttcaaagcaagtaaaatgttctttacattcactatttacccacccatttcccaataaccatcagatctttatttagaattctaaatcatagaaaaaaaaaattaatattttaccc

SEQ ID NO: 379071 - DNA, 1549 bp, Cannabis indica
aaagatactcaaaatcaataaagatatctacaataattaaaaaaaaaaaaaacaaattcaattcaaattaatatttaatttaactctacttagaaaaagtagcacagcttcgacataataaacttgctcttcgagtcctttagacaaaaaaaaaaaaaaaagctagctcttccattgggaaccatttttctaccccatatcaaaaaaactgatcatgtttcgatttgtttattcgtgtcgtatgaaagcttcaattgtgatcgttgacgatgactgatcaaatgttattattataaattcatttttctttcaacatcttacaaattaatgacaagtgtttggatcaaaatggtctaatttagaaattaatgccattgtgtcaaccacacttgaaaatgacaattataaattatttacactaataattaattatgctatatatatgtgtctaataagcaatacctgctactggcctactaccagtggaaaaattatgtaatatttgagattttcattaattcttcccactacacgaagaaaaaagaggcaaaattcaactgcttgaaaatgttgaataagacaccatggctgatcacattgtttatataactcaaaaaagtaaataaaacttggcaaattaggtccctcaccactagtcactacccaatataagtatcctctcttctttcaacaaaataatcttaatacataaagctggtgaacatggtggagaaggaacaggctcgaccgctagccccggcggctgaccgaccgaacagcagcgacgaagacgatgtcgcggcgcacttgaagaaaattcgtcgcagaaaattgatcaagtgttgtggcttcatcacagcggtgcttctagtcgtagcggtggtgatcataatcctcatcttcactgtgtttcgaatcaaggaccccattatcaagatgaacaagattacggtcgcacaattgaatttagtcaacaatacgacaccaaaggccggaagtaacatgtcgttgactgctgacgtgtccgttaagaaccccaacgtggcgtcctttaagtacagtaacacgactacgtggttgtactattacggaacggtggtcggagaggccaaaggcccacctgggagggccaggcccagaagaaccatgaggatgaatatcacggtggacatcattatgggccggattatgtccagcccaaattttgtggccgatgtggcctccggccttttgtcaatgaatagctattcgcggattccgggtcgggttaaaatgttgggcataaagagacatgttgttgtgatgatgaattgcaccatgaccgttagtatctcaagccagacaattcaagaacagaaatgcaagagaaaggttaaactatagggtacatcttaattttcttgtttatatatatggttgaaagttatttagaaagatctcaattttttacatattaattagagagagagtaaattattacctttgtagactgtagactgtagactgtagtatcttgacagatattattttagtattttatttcttcttt

SEQ ID NO: 379072 - DNA, 1170 bp, Cannabis indica
ataataataataaaactttggatccttgcgcgcgttttaattaattatgattcaatttgatattttgtggacgacatttttgggacgatatgtttagaacctaataactattcactccatggatcaaattaagtaattatactttttttataagtttaattgttaattatttacaataactagctacaaatattcgaatttgattattttaaaaattgatgggagtgatgacaaccggttaccatcacatcatatatatatatatatatcacttataaaatgaaaattaattgacaaccagtaactacacatgttatcttaaagaataaaagtaaaagcaatattataaagaaaaaagaacaaacatatagtagtatatgtatggtattatttttttggtctatatttataaaaactaactttgaatttacggtttttttgtaattttttctttacacatatcatgcaaacattgttttgtaaattatatatcattatttgatcattctagaagagatatatagaatcgattattaaaattattatattgttgcatttttttttttttttgtgataaacaaaataggttttcacgtttgatctctatcacatgatctatatatacttaatttttcgtacgaagtaaaaggtgcgctctggtcttataaatttgcccaacacaaataaatgcattgggctacgaagcataaaaattaaaaagagagaactggaagagaagataagtagagaaattaagtgcaccataataaataataactttttgaagaatgttagtgcaattatttgaaggatatatataataacagctcatgacgtactgatcatctacattgccacaagtttccaatgtacttcttaattataatgaaaggtacttatgagacattaattgcataagataccttacttcgctatattacaaataggccacaaccctatactaactactatcaattaaattttttttcttttattaattattggcaatgcaatcacatatagcacgctagctaagaaaaactatgtcataacacttttgagatttttcaattcatataccataataaaaaatacatcataattaatcttaaaagaactaaagaaattatggatatagtaatttaatcacttcagggttggagtcaccaa

SEQ ID NO: 379073 - DNA, 2469 bp, Cannabis indica
aacaaacaatatttgcgaatataggtttcatgtttatgaattttgcaacaacattttcaatataagttggtgttgactatattcattggaaatcacatgagttgttggaacaagctacaaactaacttccagagatagcttgatgcagtgagaaagataaatcttgaagttagtgttctaactaacatcaaacaattgcccacacaaactttgaaatcgttcatcaaaaggcttaaggaagaggtctcctaaacaaaaaaggtagatgacgggcagcaattggctttattacaaacagggatctggacgcgtaacctcttctagaatgagcttcagtaagagggtgcaacaagttcacaagacttccagaaacaagcccaaaagtacagcaaccttgaagagcccaaattcaaaggatactacccagttgtaggcctaaactacactcgtagtgtacaatatccgggaggggtacttttggtgccatcacaataagcaggaggagttcccactcctagcatacaatttcaatcacctttggcttacttgcaaaatcccactgtggctctggcctactcagagtacgaagtaccaacggccgggaatgtagcttctggttcctttgtccaatactttactcccacaccatcttttgttgcaagtgcaacactgactcatcaaatagcgtgaagcaaaagatcagctaggggaagtacccagaccaaaagctgaaaagggaagaaagcatccgggtatgagcagcagtatactaagtacactgagatggtggacactcaagaatagttgaatctggcaaccaaccagaatgtacattactacaaacctccacctatgcttcgggatcgatctaaaaaggaacctaacaagaggtgtgagtaacacaatgatattgggcatgaaactaatgagtgtaaatccttaagggatgataatttgatacgattggaccatctctatgactgggttaggaatcgtttgctacatatgcaagagagaccaactggatttcaagtgccacctagaggggtagcacaagcacctaaagctcaagtacctcccatggtgtagaatcttgtgcaactagatggactttctagatatcctcgtagacccaatgggaggatagctatgatttttggagggccccacatcaaaggaatgacttgcaatgagctaaaatgttatgctcaagcattagatcgtgatgatagaatatgagaagtaatttaatttcatgcttagaggctccgactcatggatcaacccataacattcactgaaaaaagatgctaaaactatgcatttccccaaccatgatcctttggtcatcgagacacccatagctaacaaggtggtggccccagtcctaattgataacggagcttggtcaacattttgttcgaaaatgcttttcttgccatcggcctcacaaaccaggatttagcccaagtggcttgcaactcactagcttcaatggggattctcatccccatgggaaaaatgcagcttccaaatatggtgtcctgatactccccaaggtacttttaagcattgtacctttgttgtcgtagacttccctacaacttaaatgccatcttaggatgaccatcgttggtggattttagagccataacttcgatccagcacatatgccttaagttccttactcactccgcgggggtggagatagtccaaggagacaaaaaagaggcctaaaaaatttatagtgtagccatcaagcaaccggtcctagtagtcaaccaagatagaaatggggatcaatagtgtgaagacaacgagttagaccctcgggtaggggcagaaaaggcactagagctgatggaagaaacaaagaagaaatcataagcaccatcaaatttgtgaccaggatctagctaaaattttctacatcgggaaaggccatgatcttaaaatcagagaagaaatcataagcaccatcaaggagtcgcctgatgtctttgcatggtgccatagggatatgactgggattgatccgagagaaatttgtcacatgtcaaatgtgaacagagacatatgccagcggtgcaacaaaaaaggtgtcccttggacccagcgaaggcagaggtactaaagaaaaatgtggagaaaatgttaacaagcatcttaatccgtgatgtggattatccaaaatggttggctaatccagtcctggtcccgaagcccaaagggacctggggagtttgctagactttaccgatttaaataaggcatatcccaagaattgctttcccttgccaaggattgactagattgctgatgccacctccgaacacgacttattatccttcatggaatcctactcccaggtataacctaaattaaaatacacatggaagatcaagaatacacaagttctgaaatgataaggtaatgtattgttacctggtcatgccatccacgattaaa

SEQ ID NO: 379074 - DNA, 1213 bp, Cannabis indica
aaaaattttactttcacttttagtaatttaaaaaatataaaagtattatcaagcgctcccttaatatccaaaactcatattttatggttttgtttttagcccaacttttaaaggtaagctagtaattttaatacaagttcaaatcgattttctaatgtttttctttattttttatatattttttttaaataaaaaaaaatagttatttttttctccaattctacatgtaatgagtactcttatttctcctacttataaggagctaggcccgcgcttagggcccactcattttagggacccaaataaaaaaaaacttttaaaaaatatacttatttttttttaataattttcacaaaaatactatttatctttctagtaagggcccaaaattttatttttgcccataactcatttcaactcaagaccggccctgcttatatgttataagaacaatcatttatttattctttgtctactttgtatttgctttttagagtttctatctttctatattttctttccactatattatttttggatcattcttctttttgttcttttttttatggaattttcaatttatatacttatatatttaatttgtttggttaacaatatcatatttgatagcataaagtttaatgtctgtaaaatttttatttttagccttttatgaaaagaagtaaaggtagcgtttagttgagaggaataaaaatataggaataggaatgagaattgaataaaatttaaaatgcataaaaaaattgataagaaaatcattaaaaaaaattttcttcttacattggaatgatcttttatttcttttttaaaatagaatagtcattccaccaaaatagtagaaagaacattccattgaaatgcctttccaatattttattatgcaaccaaataaaagaatgaaatgaaaattgttttcattccattccatttcattacctctaaccaaaagccacctaagtatgaggagtacttacttgttatcaatggatatctttttttgtcagaaggtgtaactctttaaaatatttttagcaatataaaatgggttaaatttaacttttgaaggagtatatattatagggtgaatagatcacttaaaaagaatataatgatccactctctacttatttcagcatctagaagaattttttagtcttttttttttatattcgtgtacgttataattatttaa

SEQ ID NO: 379075 - DNA, 744 bp, Cannabis indica
aaaaaaaaataaaaaccctaaataatattgcaatcaaaaattaaagtaacaaacatttctaaatacattatactaaatttttttatagccaaaatattttgtgtctcttatatatcaccaaagtcatctataaatgaatttgtacattaaatttttcagtgatttcccaatgcaccctaacaaataattatttaaatattcattttctataatttatcgacatgtcatatttttaattagtaaatgaatttattaaaaaagaagattagtggacttacgaaaatagtgtgtttaattattactgttattttttcaagttggagaattatcgacatcaaatttaaatttttggaaacttataatgtaacttttcctattaattaataatagctctctatattatatatgcctacacattccatacatgggctttgtttctatctatactcatgtccaattccatgtcctcattcaatattttgagctcctctaaggatttggttcgaacaaattcacttctcccaagaattttaaatgacatgtcatttcttcaatctcctagcaagcacatctgaagccaattgggggcattggaccaaaaaatctagttgatcttttattatatgaaaaaaaattatagttttttttcttttgtatatatagtggtaaaaatttaaatgtagtattttgaaaatataattagagattttttttaataaaatatcaaatggagtatttaaaaaa

SEQ ID NO: 379076 - DNA, 2545 bp, Cannabis indica
atatgcactttctttaattgtcacatatccactcatgcattttccactatccaattccaactcaactaagttaatgatctaaaaaactttttgatcttgtatttattagatactacatacatggtatgttgtattatttatcaaaatattgacttgatattatatattttttaataatagttggatttcaactttttacctttagtggaattattcaagtttttttttttaaaaaaaatgcatatttaaacaatcatttttattaatataatcaaattgccctcaattatattgattatgctagttttaaattcagtttaattacatatagttcatttttttttggtaaaaaaaaaatacatccaatggtttaaaaaaacatacccgtaaaaaaaaaaaaaaaatacaagtgaaaatagatttgcacaaatctcacaaagaaatgactaaataacggcgtcaaatataaaaatagcctaaagtcaacaccataaaaaacatatagtctatgtttaaagtactaaaagtatgtataattttgaatcatagaatatcatataaacatatttgaaaatataaataactaaacataagatactaaatagatattatatttctttatataaacatatgttcaattataatatgattatagcaatatttgttgttgtgcttaaagtgagtgtaaggatgattggaaaataaattaattgaacacttggattttttattttattttgggtagatgttaacgtcctatgactcgaaattgacagattttggtttttgatatctctatttgagtcattttggtatatgagtcatgacttttaaataaataattagctaaaaaaatatgtattagggagaaaatgctatgtcattcttctaacttttaagaggaaaaaataaaaagaaaagtgttggtgtctaaattttaaattatttattttttaataaaaattataatttgaaaaaaaaaaaattgttgacataattttatatcattattattttatcggtaatttgtgtgagaaaatttgattttttttatgcattaattgaactaaaattggtccactagttcaaaaatatacaaaatttgtaaaatggattaatttttactaaacttcattttacccctctcattccaaaccgactctctctctctcttcctcccctttctctctgtctctccaacccaccatcaccttctcaaccgacaaacccaccaccacccactgaacaccatcgtaccgactgagcacaatgacggccaaggtaagatttcccccttcttttaatttttgaattttttttcttattgtttagggttaaaaattatttattgatagatttaaggtctgatatgtgcattttgaattaaatctagggttagatattgtattggattagatctagtgtctgtgatttttttggcgagaaaatacatttttagggttggctcaatgcattgtgatgccatgttggttttggggttgaagacaaaggcttgatataggggcccgatgatcggtccgattgtctgaccaactcccaaaagttttgactaggcccgatgagcccgatataaggtacgatggtgcccgatgcctatttggaattttgtaaatttttgttatggcccgatgtgggcatgatagggtacgatatttaggctcgatatgttttctctttcataatttttaggtttgagtctgataggcccgatataaggcccgattatttgcccgatggtagtttttaatttgtatattttgttgtggccggatattggcccgatgtatccttcataattttttgttagggtccgataggcccgacatagggcctgatagtgggcccgatgttcacattgaatatttttttgctagggcccgataggttcgatacatggaccgcttatagtctgatgcttatgcttattcttatttatcaattcatttttttttctcttgttcttgatcttcattccacttttgtaaaagagggttccaaggataatccattgtggagaaagttttagaaaaagaaatcatcaaataagttttgagttagaaagataagctgagaaaattatacaaagggtatttttgtttttagtataaacaataacaaaattttgtactaaatgtgatagtaaaattgtaaaatttgaaccgcatgtagttgaagcactgagaatcaaagagacaataaactgggtcaagactcatgagtggacgaatgttgtgcttgaatctaatagtcttattgtgataaatgatttgattaaaaataaaaacatgaattctccttatggctggataaggctattgttactagtttatgttatatttattttttacctattattttttcatgggtaaataccattttggaacttgtgttttgcaaaagttattaattggaccctgtgttttattaaatgacaaaatggaccctgtattttctaaaatagtacaaataggaccatgaattgatttttaaagtttaattacaatccgatctaaaagtgctatga

SEQ ID NO: 379077 - DNA, 7572 bp, Cannabis indica
cttgtgctgaatcatcaactatgcacaaggaatgctctctaggggcttacttctcggaagttaatagagacttgctctaagctacatttcacctgtattttttcacagtcatcataatggactcctctggaatcagcaacctattcgaagacgctatacaaatatcccctgatgacattactttcacccttaatccgggtgaggtagatgaacctcaagaaacaaaccaagtgctgctaggaaaaataatacatagatacaagtttgaaaaagctgcaatacaaggatcattaaacctctcatggaaggcagttaaagggtggagatggaaggagattgaggatggtcttctccaattcactttcgccaaaagagaagacgctatgaatgttctagcccgcagaccgtggttcgtgtgtggagcgctcatggtactcatgccctgggccgcctggctcaccccagctgaggtccgctttgacaaaaccccaatgtgggtcaatgtggagagtatcccacccttttattggaacctctctaatcttaaggagatggcagccaaggcctccccggttcatgaattaccttcaggcattgaagatgctgttggattaagcactttgagattcagagctacaatcgacattaacaaacctatcttctgtagctttttcctcaggcggcaaaaactgaaggatctctggatccaatataagtacgagaaactcccaaaaatctgcttcaaatgttgtgtactctcacatgaacagggttcttgcttcaaagcccccactgtcgtcaaagacagcctaggcaattactacccactatacggtacatggctacggaatgatgtaaaggagaaatccacgttcactacccctcttgctaagtggtttaaagattgggtcctgcaaaagagattaggcaaagaccctattctttgtaaccaaatcaaggtgcagaaagccatccgaaatggcgaggaagcggatatgcgagaatgtcgaatgcagctaccgtcaaagcgaagaatcttctccgactccgatgaagaaaatgaagagaatacgccggcgatggtcaatacccaattgcctatggtttacctcccgggtataggcaaaatatctccctttggacaaaactcaaaacaggtcaatgtccaggagcttattgatgctgcaactccttctgaaaacaagaggacaaaaatgtttgccattaagggttccaactcaaacggcaacacccaatctgataatgatagtgcaatgattcaagaggatcttaccatttctgtggtgaacaacaagccaactacggaaagctgtatgtagagtacccatttagaggagaagcgtgctcctacctcctcttccccttctgatgctattctaaataatcagcgaattcgtacacccaatgaaaaaaagaagggctgcctgtcaccttataaggcctcaattttaggcacccaagcccaaattgtccaatggccctctaaagagggttgggctcaagacaaggcccgataacttctttttggttctctaactgtggacaaataccaccgtgagccttcacttttcaaccccatcctcaacattgaggactttagagtccaagaacatttggaaggcccaaggaaaagaaaggcatcagacggtattgtgcttagcccactaccagtatcaattaatgagacaacgaccccctctctcatcgaagaagaagacaaaaccaaagaaggcaccttcaatgactcccacacagtaccaacctcgtacaaggactcttcgaacaattcccagcctactggtgaatttgttctaggccaacacccagctattgccactcccaggcgtcgaggatgacccagaaaacaaaccacccctacccctgagtccgaaacaagtctcactaagaaacgacgaggaaaaacaattcctactacatctaatcattcctccactccaaagaaattcaaggccagagcgacaaaggcgaaaggaggtttcttttctgcaatcaagaaccaatggcacaggaaagactttgacctgaaaatcgatctaaataaccactttgtggtgattgagaaagcatcaagctcaaactctaccttccgattacaagaactgccagaaaacactagcaccagcgatgtggattttcgttttggggcttcggagacttgcccacaaaagtcttcgcaatcgccatgaaaatccttgcttggaacaatcgtggacacgggagttccacgacagttcgtcaattgacggctctcgtccgtcaacatcaacccgaaatgctcctcatctctgaagctcgaataacacaaagtaagttctatgcaatttgtagtaaactgaattttactgggattcactatatcccaccagttggtttatctaggggtttaggattatgttggttaaaaggggtccagtgtaaaattctctcagcaaacaagtttgtcatttttggagaaattagctctgaccccccaggagaaaaatggttggtcttaggaacctatggccctccacatgccacggacaaagaggaattctggcgctcgctaggagacttggttctacttgcaacaatcccaatccttattattggcgatttaaatggcactttgcaagattcggtatgcataaactatgctaacaatggtaactcttcctgctatgcctttgactttagaaggatggtgaatcgcactggtctaattgacttgggttttgatggacctggttacacttggtctagaggcaatgtacgttccccaggtgcggggtctttaaaaagggccagacttgataggggccttgcttccacggattggcgtatccttttccttgctgccatagttaaccatctatcctcctctgtctcagaccacagacctatcatcctcgataccaacggtggggtcatgtgcaaaggtcgattattcaagtatgaaaacatgtgggctcgagaccgtagatgcttctgggttgtcaaggaagcctggatgaaaagattacactccaaccccatgatcaatttccatcgcaagaccaagaatactggccgaaggctgaaacattggaacaaaacccaatttaaggacttaaaacagcaaatcgacaaagaaacatgcgaactcagctatttggagacaaagtctcctgataatatatctctcattgactctgcaaagaagaacctaactgaagcgcttctcagagacgaaatccattggcgccaaaaatctcgagttcaatggctctccgagggagatatgtgctcgaagttcttcatggcatctaccattgtcagaagaaggagaaactacatccaatgcctcaagaacccgaatgatggtggttggataagggaccaatctgaaattgatacttgcttcataaactattataaagacctcttctcgaagcaagccccttatcggatgccttgactaaatgcagccttccctacacaagatctcactgatgtggataacctgttcttaaactccatacccaaccctgaggaaatcaccgcagcgatctcagaaatggggaaggataaggctccgaggccggacgggcttcccccgagtttttattcgcatcattggaatactgttagggaggatgttttcgagatggtgatccattttttcacacatttggaactgtcaggatacattaatgatacctcccttgtcctaatcccgaagaatgaagctccaacttccaccaaggattatcgacccatcacactttgtaatgtctcttataagatcatatcgaaaatccttgcctcgagcttacgtcacataattccaagaattgtatcccccaaccaagcggctttcatcagaggtagaagcattgcagaaaactccatgattgcaagagagatagtccattcaatgaagaagagaaaaggtaatcgaggctttatgatgatcaagttagacttagagaaagcttacgacgaaatggactgggacttcattatgctcgttctttcaaatatggggttcactaatccattcctgggatggatgcgatcctgcatttctgtgcatgaaattaagctccttcttaattgttccatagctggcaaagtcaagccagagcgaggtctccggcaaggagatccactctccccgtctctgttcatcctagcagccgaaacactttcccgccttcttttggacatagaaaagaaaggcttaattaaaggaatcaaggtgggtagacatggcccggctattcatcatcttgttcgccgatgacataatgctatttgggcaagcttcaactaaggaagctaaagccttcaaggatttcttggccacttattgtgaatggtctggactgtcgatcaaccaacataagtcttctgttcacttctcttgcggagtgcctcgggggcgcatccaagctatcacggaaatcctgagaatgaagaaaatgacttacaagacgacctacttaggattgcctctattcagtacttcaagaagaacgagtaattataaccacttggtggatcaggttctgctgcgaattaagggttggaaagccaagcttctgtctagtgcaggtagagcatgcctcatcaaatcagtaggctcgacactatccaattatgttgcatcctcagatgttatcccatccaccacggcgaacaaaattgataaagcccttcgtgatttctggtggggtgatacagaagaaaagcgagtccttcattgtgttgcttgggagaccctttgcaaaccaaaaacctacgggggtcttggttttagaactatggaggctactaaccaagcttttcttatgaaatgggcttgaaaggtattgtcggatgactcaagcctttggaagctcgtcatgggtgctacatacatcaagaatcacagcttccttgaccttgagccccaatcctctgattccgtgctctggaaggcaatccttaatgcccgaactcaacttatcaaaggtatgtgtcgaaaaattggaaacggtgaatcaacatccatttggtttcacccttgggtccccttgggcacgctccaacctcaaccgagacttgatgcaacccatggcatcagcttagtgagcaattttatccaaaacttcacttggagggaggaccttgtcaaccaatggtttcagccagatgatgctagaaggattatgaatattactcttccaaaccaccctaccgaacattattcccgaaaacaatggaaaattcactatctgttcagcctaccgaatcataaagaacctagaccaaggaggtaccagtaatgaaaaatggcagattgtttgggggactaagatgcacccgaggctgaaaatgctatggtggaaaattctctcaaactgtctgctcactcgaggtaaattacaactcttcgatggtattaatgatcctaattgtcctatgtattccttggtagtggaagactcgttacacatcttttggaaatggcatttggctcgatccttgtggtttggctgctgttgggggattaggacatgctcttttaatttctccagttcggaggagtggataaactggtttaagattagcgataacagaccaaaggataccagcctccatgatttccttgaaggggctgcaataatctttgagaagatttggttcgaaagaaataaggtggtccaccatggacatcgcactcccacaaggatcatccttcaactaatcgacaaccgtcaccaagaggctcttcaaacccctatctgtggctctggttcgatgatgcattggatgcctcctcctgagggctggtgcatctacaacaccgacgtagcgataggcaattcccagttggttggtgcagcaatcttcagaaatcacaaaggggagatcacaagtatccactcaacccaaattcaacacaatgagccactagccggggaaattgctaccctttgctgtggggctgacaaagccatcaacttaggccacaagaacattattttccggtgtgattcggctggagcagtcactgcaatttcaaaagaaagcaaggatttggataagcttcactacaacatcagacattgcctctaagttcattgaattatctacaaagtttgacctttgggaggtcagctggatccccaggatccacaacagtgtggcccataatgcggctcaaagggctctgcactctcagcccctagggagttttgaggcgcccagttttttcggtttcccaccaagttcaacggtggatggctgagttagttattctgctattttagttttttactttcctttagttttccttttctctgtctgctgcctgtttatgcagccttgtttctttagttttcctgtttgctgtttgtttgcatcttcttaggtgctctgttcgtgtgttggttgtttgtttcggctgtttttaggccttcttaatcaaagaaaaaaaaaaaacttgtgctgattttgatacatgttaaaagttggatcaaattcgacacaagatataacattgtgctaaatttgacacataattaatatacatttttttatttatattattatcatttaagattaatgacttattttttcattaaaaaaacattaatgacttattttaatacactattttttttaattataatattggtattatttttttaaaaaagtatatttagtatgttgatcctcattaatgacaatcacttttatgttaatttgtattattatgcattgaagtataattataaaatgtgtgctaaatataacatttattaattttttgttattaaatttagtaatttcttatttttatcccatgtattagagatggtcttatgtttggtgtgattaaattatcaaaaataagttttttttttttttttaaggaatatgtttgtgttagtagctttcaagtattaatcccataaaaagttttaataagtggatttggcgtgatttttgtttttgggcaaagtatatttagtgtgattaaatcaaagaacatgcattttccagtttgtgtcatatcagtaatatacacattatacgctttagattagatctccttttattttttattttttaatggttttttatatggtgtaggtgattgagttattatacctcattaataatcttcacctataaaaagtgaacaaccaaagctacaattggttacaaaaatgatataaaatataagtcttgcctattggcatgtgttttggtttttctctctaaagtctttctttgtcttttactgggttatttctttttgggttattattcttctgggttaatattggatacaatagtgtaacaagttatacgtttggactgagtatggcttccagcagccgatccatggaggagatggaggagagatacgcctgtatcgatattgaaggagaagaggagggtgtggagattgacgttctcgactcggaggaggaggtagtttttgatgatcggttttgtttggtgggaaggtttttgaacgctagacggtggatttgaagccatgagacacactttggc

SEQ ID NO: 379078 - DNA, 1308 bp, Cannabis indica
tttgatgctcattatttttaacagtggccactagcgtcgaggcagttttctttgttcactagtgcagttgtgatgccagggtctgattttgtggggttaggagggggtgattcgtgatagcagtggtctggtgcggcgttataggcttttagtgcctctagcaggttgcagagttgttgacggtgaaagtgggattgtcgccattttgcgtttggaatgtgactcaaatgtggtggtttcatacaccaaattttgatttattatatatatatatataataatcttgttgttttacaaaaatttattgatttccaaaaatttattagtagtaagattatgagttatggtactattagtagtatgattacaatacttaaagcctaaaattcagaacaaacttaaccaatatgcctaactagcttaatacatgtcaccatgtcctcggtacccatcggagttaagaaaaatcatgaagtcgtctgtcagtgatgcctttgatttgtttaattcgtctgcctcagttgaggtaccagtggtggtgaagaagaagatgaaagaaaagagtcttggtgtatagcctctatacattcaacggctgaacaatcgctcctgtcactatggatgaatatcagcaaatgttcttatagattcggcgtctgtatgaatgccatgaatcaaatcataatcatccatcagttttcactatattttttactttttatttttattttattgttttttttttcttatattgggttagatttttgtttattacatttttacaaatgttcctttaagttattactgtttaagtaatattgattttaggaattgttcaaccatgtcttgagagattacttttcatcaggctatgatacttaatatttcaggctacaacgaattcgaagcttcaaacatgagacatctaatatccaaattttaaagccattattttaccaattcccagttttcccgtgggattctacgtcggcgaagatatttccattgggcttttggagtggtgatggtcagacctaagaaaatggagtctcgtttgttcaagaacaaactaaagccattgatcagagcgccaccctgtcggatgtgtgaggaagccgaaatagtggcgaggatagtcgcatgtcacgccatgaattttctaagttaattacgtaacagttaattattattagggataattgcggcaaaagtccccaaaaacttagagttgatgcagattagtgctcaacctcaataattggcagtaataatcctcaaggtcacatttttttgtgagtccgttggtcc

SEQ ID NO: 379079 - DNA, 3042 bp, Cannabis indica
aaaaaaaaaaagaaataaataagatatatttcaaattatatttgtaaaattatgagatgaaaatgaaaaaaataaaaaaaaagaggaataatcttggctgacacgtgttcattgggtagacttcgtctttacttaattcactttctcacttatgatttctctcgttaacgaaactcatccccgatactacaaggaagaagagaaccctaaccctagatttcgtctatcaagaagatcatggccagcgaagcccagggctcgcacaagcaccgtcggtcgtcctcttcctccgacgaggagaagtctttgaagcgtcacaagcatcgccaccatcaccgcagccaccaccgccatcgccacagcagccgaaagcgcggagaggagacaaaatctgccgtcgatgatgatagaattcctcttactcctcccgttgtgattgagaattcccggtccgatgacgatgtggaagaaggggaaattcttgatgaagagggaggtcgcactggcgctgttgatggagttgcggagaagacagcggagtctgatgttgagtctggtgaaattgaagccgtcggatatcaatcggataaacgaaatctggtctgttctgaaccatcctatgtgcttaatttctttaaagctttatattttctttcttttggccgttgagaaaattttgcaaattagtatgattactgtgggtgctttggttcgaattacattcgacgttttgaaagagtttttcgtggatagttttctcagtggccaaaagggagtttatctgattctttctgtggcttttatcgaatttatttatgatcaattttgtttggtgagagcttgttagattatctgagtcagagtcattgtgtcaattcatatctaacaacctgcttgcactagacgaacttgagtgaattgcaaaagaagttactttaggcgtttcaaacaatgaagactgatggcttacagttaatttgtaagagctggttacatgttttatctcttgcatattaactaacttgtttatttgtcttgttttggtctctgtgctgtgaatttgtggacttaattacccttttgtattactaagcagggatatgacaatgacaatggctctccttattctgaagcaagtatgctagtaaaagaggctaaagggagcattgctagaaattctagatcgtcgaaggatcaggctgctgacaagttgggtcctatgttacggggaaaagtagatgaaactcatcgaagtaaggctagtttgcatagagatttgactagtgatcctcgagatgatcctagagatgaattagttgccacacgtaagtcgggcaatggtgttaatggagcattgaagtcccggtctcataaagaggaaagtagacgaggtagagaatctgggtcccctttgaaaaggagtgatgagaaaaaagtattctatgatggtgtgaatatggatgttgaccgaaatagcaagaccatgaagaattcaccttcacatgatagctgccgtgatgaaatatatcgtagaggaagatcaaggtcatatgatcgtggaagagagaggtctcgttctcgtagtgtaatggaagaggatgccctctccaaatggagacacactgataaaagagatactgcgtacacttataatggtgagaggactggtcgaggtcaagatgttaaagaacttgagagagatgatgacagggaacaaagtacaggttatagtagcagatatgttggagtggatgacaggcgtcacagccgagagaggaagactagagaggggagtagggagagggaggttgaaagagatcgaaaaagggagaaagaaagggcaaggagcagagacagagagatagatagggatcgaagaagagagaaagaacgagaaagaaatagagatggggacttggaaagggataggagaagggataggggaagagatagaagtagagacagagacatggagagggaaaagcgaagagaaagagataggagcggaattgttgatagaggtagagatagtgagagggaaagagacaggtacactgataggattatggagcggaatcaggagaagcgcgatgatgggaatagagataagggcagggacaaatatgaaagttttgaagaaaattatggtgaacgggatagatacagacattccaggagctctagacatgatgaaaaggattatataaaagacaaagttgagaaagttgattcagaaatggccaacagtttaaaaatggaggtaacaactcatttaagaggtatgtgttagtgttataaagtatgtttgggcatgcaaaataacactttttttttttattatttttaaaatgccttggatgtttatcttatggctgcagagatgaagatggacaagacgactatgaagatgagaccacactgcaacttgctgaagaagaggaagatctcaacagaattaaggaggagagtcggagacgaaggcaagcaatcttagaaaagtacaagattcagccattacagcagcaaactgagttgaaggctgaaacagatgtggagaaaggtacttacctttaccggttatgcttcaaggtcataaagacatataggatctctgagtgtgacttatgcatgatttttctactaattaagccagtacaatttgcaacatgattatcctgtggataagtcatctcttcctcctagaacctttagatattgcattcttttcatcgtcttattaacatttttcatttttgggcctaagtatgatttttgagtacgaccagttacagtagggcttttgttttggtattttgtatggaagtccttctgtttacgattattacttttttaaagaaaaagaaaattgttttgtttttaaaacagtagcactgacatatatgagctagagctgcctacagttgcatccatttaacttctccttataacatatctgctcactgctgactttttattttcttaatacttattggcatttaattgtggatgactgttatctcattgcacgttcaccagataaag

SEQ ID NO: 379080 - DNA, 5492 bp, Cannabis indica
ttgcaagaaagttcttgactttgtaattaagaacattgtttgcaggtttaggtttcccacaaaaatagtgtctgacaaaggtattcagtttgatggaggttcatttactaagttctgcaaaaataataaaattattaagattttctcgtcactatctaggccacaggccaatggacaagtcgtggctgttaataaaaccttaatagacactataaaaaagaagcttaatgcggcaaaggaagattggttgatgagcaacaacatcagctctgggcccataggacaacagagaaaactgctaccggacatactccattttcactggcatttggctcggaagcaatgttactagtggaagtgaatattgtgacgcgtaggcatgaattctatgactaggaacaaaaccaagaacaactcaaaatgttcttggatctgctcgatgaaaagtgcactaagtcgcaagtcaaaaatgatgcttatcaacatcaaatcacaacttcaacaaaagagttcaaaagagactcttcaatgcaggcaatttggtattaagatgtgtgtttgctaaaacgcgagatcaagcagcagtagtatttaacccaaactgggaaggtccttacattttgaagttgtcgtgggaacaggagcttataaattggtttggctcaatggctccctaataaaaaacacttggaatagcgaacatttaagaccttattaccagtaacatattctgttatatttcatttctttgtacagtaaagaagttctttattttaataaaaatatatatttcaagtaatcataaagtcttaatttgtttaaaattacttggaagcatatgaatatatcatatcgtgggtttgcctagaagtatattttcaattattactaaactcattaatgcttagaaataactaggttcgttaatgcctagaaataactaggtcgttgatgcctagaaataactaggtcgttgatgcttagaaataggtccaataatgcctagaaattaaaaaaaaatgcaaaagaaaggtgtttgattaaagcttgtctggaacaacataaagtcaaataactcaaacctttcttcaattccaaatgaagaacttatatttactatccttaaattgtactaaagatgtacgtttggccctaaggattgtaggagacaatccataaacacaagaattattaccttgggaagcctattttcaacctcgctggcttcccgagtggttacatttttgagatagtggatgtgagcgatgtagtcgcaatcttcctcatcctcggtcattggaagctgctaccaagtagggtgcttagggtccttataatccatttttcattgatccttgcaaagaagagcacatgactttaaattattgtcatgtaatatagagtcagcagctcgtaatccataaggaaggtttgccaggatcttgggcctccttttggacttttggtgtagggattggtctctttgtagtagttgaaaatgtgaaagatcagagtcagtataagtataaaatcataagaaacttaaactcaaaaccaagattttgggaatggttaatagttacgtaaaattctaaatttggtagtgttaattggatggaaacctgtcatccaaagaattcttccttgaactccttcttgttgggaagccttactatgatcttgcgatcattggtatgggtccccaagtcgtaaaagcctcttgcaccatgctttcttgtagaacaagctttgatgagtaaaagtaaaggatcttgaggggcgttgggcactcccattttaagatatgatagagcgacttatatatggcaagaatcttaaagagtttggggcgaggtgaaatggtgcaactgcaagatagttgtagaagtctttaaaatagtccctaagggggagtacagctcctgctctaatatgttccatgctccaagcccctattttggaagaatcgctagtgttgcaactgttgtgttttaagacccgttctaaagggaaataactaaattccccaggcgcaattgagttgatgcgtcatcctttctcgtttctaatgccacaagatcttagaacttcccctacataaggggtaattgatctaactctagattcgatcgattcttcctcgaatgcatcggtaggattttgggcatcttagatttacgagctttaggtcgcatgagtttaaattccaagtcacctggtgcaaaagcaacaattacttgtggaaaaaacaatggccttgctaagggtatatttactaatttaggctactcaggccaagctgcttcttgtatacaacgacatttatcctctatgacttcattcaaaaattgcatatagtaggtggatacctcttcctgattggtcctaatgaggtgcttctaaatttttttcatcattgatttcaagtatggatgggttatcaatttaaggctttaaaactatggcctgaaattgaggacagtttgattctaaaggttctaggaatgcaaattttggattgaattgggacgtggtattgtcacaaagtataatgccctaaaaaatttcttaaaaaagtatagcatagttaaaacccaagacctgcgaatcacataaccttagccctctattacttaaaaattcatagaaaacccactccaacaacaaatggtgcaaaataaaaggagcgtatgtaaataaatccaaatttaaaaataaagagattaatgaaagaaaaatcacatactggtttgacaaaaaaatctgggtctcgaagaacttcttgatgaaaactccttctgcaggggggctagacctcgacaattatggtattgagagatgaagtcgatcaaaatttgaaggaagtaagtgaaagatagtgagggcatgcaatttcgaaaaggaaaatggctgagattttttcaagttcgaaagagcttcatggatgataatggcagaatagaatggattttgggttttatacctaagaaatgaaaattgtttggtcgcaataatggttgatcaaacgggtgagaactattggaaaaatataggtaagagtaataaattctgaaatgatgtacctcaaagtcttaaattgccaaaataaagtataaagtttttaaatgggaaaaatacaattgtaccctcaatgccattaaaaagtcctttttatttttttaaaaaattacttttcaggagataattgttatactcatatttcaagaagcaatatggtgttgacacatgtaatatagctagaatatgaaccagcctgaattatgcaataataaatgcattcagacaactcgccttgagaaatataggttgtagaaatatttaagctcaccctattaaagacaatgaccaggcatgaataataactactgattgatgagactaacgagacaaacaaagaaagtccatcttgggatacatagaatacacaacataattgtttggaaatggtagatagtgaattatttaaagagcttgcagctcattgacccacatacacgtgagtatgttgtatgactaaatacaataccttcagtgttttattacctcacagttatcattatgtgataagcgtctcgtgtatccctcactcaacattaataaaaaatgtgaggaatactacaacatagacactggcttacattagtgtctagaaaagtattattgtattgcgagaaagataaagcatagttagcataatagcgtatagataagattaaaagtgcagttatgggagttattttgaattatctcatgtgcataaatatgaaatgtcgggattgttcacattttatgaacgattacaagtgataaggtcccaatggaataactatcattctagactcctataaatagggataaaacttagagaacaagggacgaccaattggagaaaaagagagaattatatctattattcatcttgtaaaataatttattgtattctatatgtcattgatcaatctagaacaagatggactcgtggactatgaagaattaactctaaaagtacattaaaaattctcttcccagtgtaaataataagtatttgagagggataattaatttgtttaaaattagaatttttgggtttccccccaaaaggaacgttagcactcattacagtagtgcaaaatatcacgcatgatgtaccatataaccgtcagtgcatgatttcaggaaaaactttcaagagaagcattaagtatctcaaacatcaaagagacattcgatcaactcgcattggaccaaagctgataaccaaacacgcatcacccatccaatcagcttcatggtcggataagttcacgtgcgactaagaaaatcctgcgtggacttgtggggcaaatattatccaaatttttgcactatgacatggcatccatctaggtgacacatgtaacatatttcataacctatgcgaattattctactcctagtaggttgtacaggctgttatgatgcttgaagtcgtaaatagatgataggaagtttagacagatcatgtacaaacatccgaccagcccccatcaagcaggtagctcacatacaccgacatgggatgtgagttcgaaacttctaagagatatcacgtacatttctaaacgtgcaagtcacagcacagtccatacattcatgggatggattggtgtgttcagaaatcagcctatgtttctcattttcttcattgtaattatggaaataaactagtttcccattttatttcttattgatttagggaaaccaaattcatgtaattaatccatataaatagtggactcatctcactattcagggatacaaattgtttagagagaacactcaagggagattccccaatctaagagtaaaatacgcagagaatattgtaagagcttttgagagtgaataagttattcttgtccatcttctcacaagtgaatacacaagaaagagagtatgctattaccaactataaggggtcgaacctctacaaaatttagtattttctctactttatattatttactttctgctatttaatcatatcaatcgctttaatttgacttactgtagttgactaaaagtgaggtcaataattatatatagtatatgcatatatatacctaaaaatacataaatatatttatactggcgtttttagtttaaggggatcggccaccatggcccactgtagtcagcgactacagtagcaaccatggcacggtggtcatggttggccacgaggaggagtagccacacacagatgcgggtcacgaaggacctgtattgacccagtcgggtctatcgtgcatggaggacatctcacgtccatgcatgtaatgcatgctatgtcttgagcggtgaaccagagatcttgaggtccactgtccgtagactgatggttctgttgggttttgtgccctaaataaaactcatttcaatataatcatatttactaattaataaagatcagaaatcattttatgttgcat

SEQ ID NO: 379081 - DNA, 904 bp, Cannabis indica
gtattttttaacgttaaaccgtcgtttacataaagtgatatagaaaatgcatatagtggattatatgtgtggtgtagtttgttggttttttttttttttgccatcttttggagttttgacctacttatagagagtgactaagtgtgtgagggcttttccctttcatctttttttagatgtgtcattaagcacccaataatagccagtcggcaactcctggctgggccaacctgtactgtggtctctctctggatttttctgtgaaaaaaaaggctattaggttgggtcagttttaattaattagctttaaatagtgggttttataaatttacaccaaataatgaatattatatatataatcaatcatattaattgtgatcatgttttaggtcctgatctcatgcaaattaataatattggacacaaatatttatgggttttttttttcttctttataatcattctcttctctctctctctctccaatgaattgttgttcttgtattttccgcaaaagaataatgccccaataaagtttgatggctaattatataactccaaaaatatgagtccccttaattgataatatatattatgtacatgaatatatacatataaattaataatgcccgggatcccaattacagtactgtaccattataattttaatactataactcaattatataataatatggatgtcattatcatgtcaagaatattaaaaattactaattccacccataaaaaattactaattccactatgacattgatataattcaagatatctataattataagttaggacaattattttatatattactttattattattattattattattattattattattattattattattacagtttaggtttaggttgttgcgtgag

SEQ ID NO: 379082 - DNA, 1732 bp, Cannabis indica
aagcaaaggaatggaaaatttattcaaacaaaaccaacaatagctagagcaacagtttacacaagataattacaatatcgaatgaggtgatccaattttttaagtctagatttagccttaaccacctatttaatggaactcactaaaaacatgaacattattacatctatcatcaaaataacaagtattctgattacaccacaacatatagacagtggcaaccattgttgttctaaccatctctagggtcatactcaacttatcttcgctaaaccaacgaacccatttactcaaacaccaaattcaagcgaccaatgcaaaatccccaactagagattaacaacctgaaccactttctgagaaaactagaaagtaaaaaatagatgttgatgactctcttactcaacactacaaacgggagacaaaatcgaatcaagatgcataacccaaataagtttatctcttctaagcaagtgttcattcatcaattgccaaactatgaaatgatgctttacacatagcggggaattggcgagtgcttcccccgcccccatgccttattacgatacttcctctgttctaggtcccctgtttcacgactgttacattgaaccttcttggttctgtttcgattctattaagagctaagttagttataaccaactcaactcattactacatatatatatgtactctatcttctctgtaagaatgtacattcatatcaataaagatcacaaagttgtaataactttcttccttatactctgttttttctcatatggtatcagtagaaactattgccactgcatcaatggtgtgacccaccactcgtcctcaagatggtgttcccctatccacaactaagcacaatccatcagagtctaatcttgatgcaacttttgcacaacctgtcattgacacctctgttgcacctcgacgaaaccccaattcaagatctcgaagccagaataatcatgataatcttgaaccagctcactcttcctcaaatcccgttgctaatctttttcaacctcctgttcaagttcgtagaacttcatctcttgatcgattggctcatgaagacgtctcgagtcctttctttctcagcaccgcggatcatcctgggttagtcttggtttctaccatccttaatggcgccaactacctgtcttagaaatgaggcattacaatggccgtcactgcaaaaaaaaaattctccgttcatcgatggctctcttcctcgacgtgctactagtaatcccctccttcattcttggattcgttgcaataatatggtcatgtcttggcttgtgaattctgtttcttctgagatagcacagagtatcatgtacttcgatcttgccacaaatatgtgacatgatctgcaagaaagatttaatgagggcaatggacctcattgttggattttgtgccctaaataaaactcatttcaatataatcagatttactaattaataaagatcataaactgtattttatgttgcatggttcacatgatttatttaatgattgtttaatgtataaattctatcaagtccagaacatatataaatatgtatatatttgttcattattatagtgtcgtcagcacagtagaatataatcatgattatatattcaaaagtttaattcccatgatttgtcagtttactgaatttaaactggcatgataatcatcgataaggtatacttgttgggttttatgccc

SEQ ID NO: 379083 - DNA, 5522 bp, Cannabis indica
ttgagtgaaggctccttgtatagatataaatgaaaaggaaatcctatataatagtcactgaaacaacaaaacaaaacataaactcaaaaaaggaaaagcttatctaaattgaacatatcaaaagaaaagggacaaaagaaaaaaaaaacttacaaaaaggtgtataagagaataatgactcaaaatctatacgagtggttcgttcatagtacaaacaatagtactgagcttctttatatgcttaaacctttagaatcaattctatctggtttataaactttaaaactgatccttcactttaaaagttgatttcctagaaaattatcaaaactataagaccactaaagctgtaaaccacaacttatacaatactaacaaaatgcataggcaaacaaactctagaataaacagtgtgagaatcagtaacaaatgctaatatcagatttatgaacatttatttggatgatagagttagagcagtgagtattgtagtctcataaaaatatagaggaattcagaaaacaccattttcactcattatcatgtaaaagttagaagcatattgataatgcaccacagtataagctcaatcccctcagcacaaaacacaatgtgtaagtaaagacacaaacggattccataaataatttaaggcttcatcaaaacacaacacatggaaaagcaaaagctaggtttcatccgtaaatttatgagcattttattttatgatcaagcaaaactaatttacttttaacaactaaatgtagtatcaatattagcatatcatcattcagtagtagtcttcaaattacgtcacattaaattcttgttcattttattgatgaaatgggtacctattttttaagtcttcatcttgttcatttgatccagaggcaaaattaccatagctttgcttaacactctttcacttgcatatttggtacagtcttctccactatatttcccatcattataaaaaaacaagccacgccactgcagagaatgaaatacttaattctgtcagccaaaatacagttcacacatagatatatataaatacttttttcatccaacaaaccttctctccaattttatctcaaaaccacctaagagtatcaaaatattctgacttcattacttgggactactctgaataagttctatatgaaaatgagaagaaaaaaaaaactaacaggacctacttagcaatggtaataagagtatatacaaaaagaaaatccaataaccaaatagtaatataataatctcaagaaatatgagagcatttagcacatttgacatcatatcagcctcaattccactaactcgttgtttaggatatacctctaccattcaaaatgttgtatcagttttttaaagcctgtaaaagacctgccacgagtactaagcatcaacagatcaaatgcatacattttccattttaaaatgttcaattaatgcataaattctagaaaagtttaccttatctttacacttccttctctcatatcttgaatcaatttccccatagctctagataagtattaagtatccacacctaatggaaactctgaaagaaagatatattggttagtgtccacaagataaatgagagatgtaaagtttttaaataccaatgtgaaactatatatcatagtataaatacacgtatcgcattaatgtaatttgataaagataaccaagaaattgttacatactttacatctccaagaccatccttttagatttttgaaagaaacattagctttctctctgaaagggccctaaccaatagatcaacaccaatagaaccaatattaggaaacaaaaatggaaattaaaagtgaaaaagatctatagatgcaaaattgaggatcaatttaccttgagaaagccattaatgtttgaaggttagatcaaaaggcaaataatagaaatttaacatacccatttcgattttgagtcaaatacttcatgagaggccgatgttgtttcctgtattcttggcaaactcttcaaaaagttttaataagtaatttagtactattggaagggcttccagagacatgttgacatacagaagtttgacccataaagcatcatttgcaagaacaaaaaccctagagaagaatagttttgagatttgcgactggaatctcttgaattgcaataaaataattagatttgtaggtgtatatatatttaacagaactgtaaagtttaacgaaagggaaaaaaaaacaccgctaaaccaatttttttcattagatagccacttttaatatacaaagatttgttgttagatagtgcaaatggatgcaccaatgcagttgttgaaaactctcagccttcaaatcataggtaacagaatagtcgataaagaacaaataaaagaaagaaaacaaaaaagcttcaatgactcaagttgcagcctagttactggactattaactcccacaattgctctgagaattgaaacactcttctatattgcatcttagacttctccaaatcccatctctccattatatactaacaaaacatcttcacctctatgatgctgtacatttttcctgctaattacaaacacatattcagccaaatagaagcatagccccattatgcatactctatcttgatatttgtggcatgagatatgtcaaaactaatttaattcagaaataacttgatcatcaaaacagccttttaaaaagcatccgcatttgatatcaaacacaaaacagtgaggcaactccataatttttttttattttctaccaaaggtatataagagaatgtttcaaataaactgaacttactgttatgttctgagaatatgtgcatttttgtactcagaaccagcacacactgaagagaagattttcaaagttgtcccttgcatgctcttcagtaagtgcccttggtttaatttctcctcaacctaagacaaagaattctcataaacaaatgacaaacttcattttcttgcttaagaaagccccaatagctccacatatatttctcatcaagcataatgaaaatgtatccaatcacgttacttgaaaacatgaaaatatttttaccaagaaaaaagttcaagctgaagaatgaattgtccttaaccatgaaagtgcagctgtctcatgtctatcattatcagtgagagtacaactttaatatgttctatctccagatgagattgatctcctgcaagaaacaaatgaaccttatccttcaccatgatccagctacaacctggactcttccttatcctctttaatctcttgctcatccttagctgctcaccatcttttttcccagaaacaaaacacaagttagacatgaccacataaggagttgcattatcaggttccaattcaataagttgttgagctgccacttctgcaagatcaagtcgtaaatgtgtcatgcttgctccaagaagggcaccccaaactccaggatgaggctcaaagggcattgagtggatcaactccatagcttcatctagtaaccctgctcgaccaaggagatcgaccatgcaagcataatggtcagcccctgcttcaatattgtacaaagatttcatcaatttaaagtatttccacccatcttctactaatcccacatgaacgcaagctgaaagaacaccaagaaaggtaacttggtttggcttgcatcctttattctgcattttgctaaataaatttagtgcttctttggcaagaccattttgtgcaagtccactaatcatcgagttaaaagaaacagtatttggtgaatcaatattcatgaaaacctgccaagcatcaggaaagcttccacatttcatatacattgagactagagaattttggatccgcaaatcaaaatccatattcatctttattactagagcatggatctgtaatccttggtttagagttgctaaaccagctgaagcactgagcatgcagctcaaagtaattggagtaagcttgatagcattgcctagcatctcagtaaaccaacgaaaagcttcttcatatccctcattattaacaaagccagaaattatagcagtccaagaaacagtatcttttatgggcatcattttaaacaattggacggctttctcagtcaacccttcactaaaaaatcctgaaatcatagtcgtccaagaaactacatccttcttaggcatcctctcaaaaacttcaaaagctttttccatttcagaacattgaacataaccaccaatcaaggaattccatgataccacatctctcttggtcatcatatggaacatcttactagctgcatctatacagccaaatctgcaatacatggtaatgatagaatttcctaagaagatttcaaactctaatcccattcgtgaaactaacccatgcatctgaataccttcttcatattttgacaaactgccacaggcctcaaacattacagtcaaagtaatgggattaacttccactctactttctcttttcatatttagaaacattttaaacccttcttcaaaattctcactcttcatatacccatcaatgatcgttgtccaggtaaccacatttctatcaggcatcttatcaaataaatatctagcatcatcaacccttcctgctttgcaatacccatcaaccatggagctccacgaaaccacatccttaaccaacattccatcaaaaatacatagcgcctcttctaaccttcccagcttcaaatagccactgatcaacgcattggaacaaaccggatctcgcaattcagttggcgtctcaaagtacaacttcttcgccttgtcaaacatcctcgcttgcacaaaacccgtaaccatagcagcataagagattgcattccgctcaaacatcccagaaaacaactcaaaagcttcatttatcatacaattcttcctaatataagctgttatcatcgcattatacgaagcaatacttcgttcaggcattttatcaaacatcttccgtgcattgtcaatgtctccattttgtgcataagcagaaagcatggctgtccaagatatgatatttttgttcggcataccaaagaaaactgactcagcttctctgatatcaccatttcttccatgtttcgtgatccgggcgttgaatgaaacaagagatttactggttctgtggctttttccagagtccaaatgggctttcggtggagtcccagatgaaacgggggaatgaaattttctatactttatgggttggtagaaaactctagttgtgggtttcaatggcgtaatgttcaaaattcgtaactgatatccaaatgttgaaacatgaaatctcattgtccaacaatagaacactcatgcagaggttaatggagcaacaatactcattttttctggagtctccgacaaaatcgaaacggtattacctgtcactaacagacactattacaatacaactgttcttgtagctctcttttttatttataataacggtaattgcattagatttagagatgggggaatttttacaactagtaaacat

SEQ ID NO: 379084 - DNA, 2832 bp, Cannabis indica
agagcaaaaaagccagtcctaggctcttgaaaccccaaaatgagaaagtttgtttagtttcagtatatccaagtacattggtaaacagcctcatccattagtactcagattttgataggaatcatctactcaccccaagaaaaagatattaactattcaatggctaaagataaagtcataaaagtctgccagaaaaaaatccatttatatcttatgatccatttcatcagttgctcttttcttaacaaggaaaaaacaaaaacccaatcaagactagttgttaagacatttttgttaaaagcttttcctgtgtgtgaccaacattgaagtgtaaatattctttaaaacaaatagacaaaaacaattttccaacctccatataatcttccacattacggattggtcatgttgtcaccgcagtgcctaacgcggcgccatgcttctttataatttgcactgactgaagaagaatgtcttgttgtgtagcgtaaaactcatcctttttctgagtcaataaacgaaaattagcagaaaaatagagataatttgagagggtaggtgcaataatggggtaggatatgagaatatatctcacagatgaacagtatttaaacaatgcatttttattaatatattatatagacttgaatacagaacaaaacattgcaaacctgagagcataattatgattctgcttatataaaagaatcagtctccagaagcaatcaaccaattatttaaaaattaattttttaaggggagacgactacaggttcttcactctacccttccatccctacaaaataataatatgatagaattctaaagatacgttcataactggatctatcaattagaaatgactgacatcaaacatttcttatcgtcagctctattgttaattttcctaaaatgaatctaattatccatttcaaggtcttcaatcttcattcaatcattatgtataaaagaacatattgctgatatataagctataaacaaacgatgtagcatcgcaggtgtaggtttgcaaatattaaaaggccaggagcttaccatctgtttgaggttgcatccaacagtcaattctgcaaatgaactctctactcgagacaagaaacagtaaggagcttcctttcccaagaatacctgagagtgcaatcttagcatactgtttatatcattagcaatctgaggaatcttatccaaatcatttatctgcaggggaattttagagacaatggcacgccatccagcacgtgacttgttcacaattacctaaaaatcagatgaaagatgtttggattatactgtcataaatacttatttaacttgctacagaaaattatccacacaaccatacgcaggtgaacagcactacttaattatctgacatcaaaactatacagaaaacataaatccgtctggcacttaaccaagacatcaaattaatgatcatttagtcaaaaaaaaaaaaatgatgtgagatattttagcctcagtttgattcttcaatacgctttacgtatgacacgcagtgtaacattttgtagtatttcaaaatctcagagatctgatcccattaaaattgcttacatcaacaagcttggacttgaggcacattattttaacttgcgcatgaataagacaagatgacactaagcaacatgaccaaatagattgcaatttacaataaataaattagggctgcaaccttttttgagcacacaaatcaagggacccaactactagatttggaatttcatacttgaaattgacatcactaactgttaaatgtcaattacattagctcggtaaagccatcctatttgtatgattcacaaaaatgtaatttcaacagaaattcaatatataaaactttttttctttttgaaaaagacccaaaatatgacttgacttgagtcacagatatcactggatgatacgaattctactacaaatccttttgattattatatacctgcagctactattaacttcagaaaggaagtaactaacagaggacaaaaaattccaaattttggttcatcctactgataaaataacaagttgcagaagccatgaaatgatttaagagccaattactcacttgactagaaaacagagaatttggaactatgacaggaaacttctcagcattcagtaatgaggtggtagtaagccccatttccactacctgaccttctattgatccggcctgtaataagtaaaaaacacgcggaaaataagtattgaaggagcaattatagtattagagagtaggatagttatagatttccggtaacattgagcctgcaaaatgactaatgtatgattgccattttatgataaatccggatagttatataaattttttagttattaaaattcagatgttgttgtgaatatatataaagtgcaattcacaggtgacttaaagtatttccttgtgccatttgtggtccaaaggaggaactctaaatttatggcctttacactaacaagaatccaagtaaagtttgttcacaatttccttttcttaagggtgagcttgacatacttttattgtatctccgagtgaaaagggccttgagaattgcatagacaaaccactaagcacatttccaaggacgtctcgagcagcaaaagcagtagcaactcctgagtttcagagataaaaggtcagtttttgaacaatttgggcttagttattagttaaaagaactaatcaagaaaaaaatcatgcctcgcttctagattaatttaacaaagaatttcaatgtatgtggcagctgaatccataaataaattaaatatatatatattatatat

SEQ ID NO: 379085 - DNA, 1696 bp, Cannabis indica
ttctaattacattaaaagaaacgtttctttgagtttttttttagaaacttgagtcgacttacaataatgggtgacgaatctccgatacccaagagccccaatgcctttgtcggacgcctcggtatctctgttgaggtctggccattgttgttatttttagttttgttttgagagagagagattgaagaagaaaaggaaaggtaagagaaagagaaagagagtggtgttagtgaaagtttgtgggggtgaagatgggtttatgtagttgggtttgcaaacctgtcaaccaatttatgtaattgtgggacccactaagatttttaagtctctaatcttcttctttctgttttctgttttcttttaaattgtcaaggaaactcttaaccaatacaatagctaacatattgttattgcatttaaccttatttaaaaatatagtatttaagtgtttttatattaaaaaatgtataatttaagactcgaacgctacatttttaacacacaaatactttcttatgatcatttaaactagtctcaagtcgtaaatataaaaaatgtcagacattcttttttgtatttttttactcaaatagtaagcatttattaaaaaaataccataaatattttcatgttattaagtattctttattggtattttttaatattagtttcacatattttgatttaataaataaagtatttttatacgacactaaagtactaagtatcactatgagatatcgtattataattagttagttttctataatttttattaaattaaaataagtgagacttgagattaaattgtactaatagtaattttatactatgccgttcaataattttttaataaataatataacaaaccgctaattgattataaaatttcactcatccatatagtattaggtacgtaagatgcaatgccttttttttttcctcttttgttttgtctattaataaccagttggctagctatgctaatatatagctatattacaaaatacaaagaaagaaaccattgaaaattaaaatatgtcaaatgaaaatttcaaaatggaccaaattcagttcacatgaatatataaatatatatatatatatatttatatgtaaatactagactagactagaaaatacaatttagcttattaaggacaaaacaaacaatataaattaggttaacatgttgatttatgcataaaccatttattcttcagcaaaatctaaggtcattgtccaaaatagattcttcatgtgagttttggtctaaaggttgcagataacgacaatcaaacttaatgtagtttcatatttttaaaaatgaaacaaaagaagttagtgtataatttatcttatttttttatttatttttctttttgcagttttttgaaattaagttgattattgtaagcataatttgtttaaggaatctttgaatttcagttccacgttccaaaacatattttatggtccgtggattataaagaattaataattatggtacattggtatatatatttatcaatatttcatattatccatatggtaaaaaaaaacttattaaactggattctattagtatcaatgaatcaatatgattgagttttgagtcaatacttattacactatacttggtaccacaataatacccctacaatccaaatcattatttttctttatttttcttatt

SEQ ID NO: 379086 - DNA, 3929 bp, Cannabis indica
atatacatatataggagcattttctctttctgtacgggtagtggtgtgcgcgttttctgacagtactggtttccagggtcatccccgatggtggggagtggtggtgcggacccgtcgtggtgtcttaggtccttgtaccttacctcctctcggtagggtttgcattttcaaatgtgcaagagtctcaattttctcattttatcctcaaaggataaccctaattttgcctggtatttgtgttggctgaatagagtgttttgtgttgtgcgattctcaggggtgggtttgtttgcttttatggatactcagtttgttcacctagagaggacctctttgatagatgagactatggaggagaatgagaatttcttgcttgaagattttactctacaaatcgaaccagatatccctgttgcgaaggatactattgctaggtctattgtggggcgattttttactaaacgggggatgttcaatggcacgttgaggggtgcactttcttggatgtggaagttgtctaaaggttggcgatttcaggaagtggataaaacagaggagaatcttcgtgtttagactcgaaaaagcttcagaagctcaagttatcctttgaatggccctgtggtctccctgtggtggttttatgcttgtgtgcccaatgcatgatgatggtagatggcaatctactgatttgaagagtatggagatttgggttcgtgctctgggtgtcccaactcggttcatggctgatgctggggctgtcaccatggcaagctggcttggtacttgtattcatgcgtgtccggttagaaaagggggtttaatagttaatgagtatcttcggttcagagtttgtattaatctggaggttcccttaatggctggtgcgtccctactggatgaagggcataataaaatttgggcgtatttcaaatatgagagactcctgctattttgcttcaaatgtggttggataggtcatgaagaggctttgtgttctggtaagaaaagaatgttatgcttggatgatggtcgctcaatgtccttttatggaccttggcacagattggggtctcgcattgagaatagtttctctcttttggaagcggaggatatcgataatcgggacaggatgaaaagggatttgaggccaaaagttatttcacacttatggtctatagtggaacatgcattagttgggactcctctcatagcagaggcgctggctgaggatggttctaatcgtcagagaatgacgctggcaaaagagaatgttcaacagtctgctaaccagattgttggtggtcatcgtactgataatggcatggggatgccttcttgccaaaaagaatgaatgattgttatggtgggggaccatactttctctgtgcgtgggccgtcgggggtccccatggggctgccagttgccgacagagaagtctctgagccgttgttacctaatcctctggtgttttgagcctcgtcttcaaaggataggtctagaaagcgtggtaggccaaaaaccaaagtctcgaatttaattgggcctaaaggagttgccaaaaaaactgcatttgggctcaaaaattcccttgatgggccactctttgggtcaaaaagaaagaaaagcacggggatcgacttcacaggggatacttcaaaagatttggcctagaaggccctacttcagtcagactacatccaaccagttgatgcttttggagaacttagctataactccccaggagtggattggtgcagcgcgggcctgaaggaaatagacgcatgagtattactcctaatggtctggggaataaacaatatgaaaagcccaacgagcagggaagctctgatatattcagggaggtcaacaagtgtaggaaaacctctaatcatttgaacaagcctgatagcctcatttccctggagcaggacgataggctatattcagaaattcgtgttgatgaaggaaatggctcttcccttatgttgcaaatggcaagtgagacaagtaaattggtggtaactttctccgatgctacgtctcttctgtttgatgctaatgtgatccatactcagaaactcgatggatcaagctatttggaaatccataattttactgtggtcgaggaggcaggtcgtatcatgcccccccactgccccatgattttcttatcctagaattgtcggggtttgggtcaaacccgggcaaggaagaccctttggggtctggtggtcgatgagaatcctgatgtgatgtttttaatggaaactaagagttcgagtaatcgtatgaataatatttggaggcatctggggttttttgatgttgttgaggtggatgcccgtggttcggcagggggcatgtgcctctgttggaaagaaggtgttgatattaaaatcataagtgtggatgagtttgtgatttgtgctagatttctaatgtccttaacaagcctccttgggtggctttttttgtttatggccccccatctaggactgatcgtagcgggttttgggaaaattttgggctccatgtaggttccctacgtgacctgtcgaaggtgatgggagacctaaacctggttttggatcaagtagacaaagttggcggtagtttagtctctgatcgtgaggctgcccttctcaatgattttttattgaccacagggggcattgatcttaggagtgtcggtaattactttatctggtcaaacaaatgttagttccatgatcttattaaagagcatattgatcgggttattggggctcttgagtggttaatctagtttcaaagagcggtcgtcaattcccttactactatcaaatcttctgagcatgctcccatccttttggatctcttattggactaggagaccatcaagaagcctttttcgtttcatcgacgacccgtgatccctcctattttgacgtggtcaaggaggcgttgagtattactgtgcggggtgtcaaagttttcaactcgttacaaaattggcttctaccggacgactactgagtaagtggaacaaagaatattttggctattgccatgagaaacttaaactgatggataaactgttgttgggtgttcaacagagaacaaaattcatcttcagcagtggattcttcttctcaagaaggagtaaatgatactaccttggcaatagttcctctccagtagagaccggttgtcgtggacgatgaagaggaggatgatggtggaggacctaagttccctcaaaggaaaaggtctgactccgagctaggtggaaatagcaagagaacaagagttgaggctaaggaaaagcttcattaattggctgctatcaggaagcgaggctcagagtcaattggatgaagatgagtggacatttagggaagtgagaggtcaaacaggtggagcacttgttctaacaaagtgccaagggatagaataaacctttcacctcttcctccacttaacatcactttacccatctgtccttcttcattgtcaaaagaagaccatgcccagataaaggcgactgacaaactctttatgaagatttataacaccgagtatgacgaaatgaagaaaaaggatttattactgtcaaccaaacgaaatgccaaatttgatgatgctactaagtggaatgaaccacttcctcccatttttaatcatcaagaggttgttgaaaggctttggtccagaaagggttcgaatcttgctcattttatggtaaatttattggaccaaaatgccgcaacttaaacaaattatgttatgataaatttgctacaatggcgagtggacttatctttttataacagaatacaaatacaattggaaaatttacatgatatactgacttttgccattttttttataaaaatactgctaggtggtatttttacttcgttaccgtgtatttttataagttttatac

SEQ ID NO: 379087 - DNA, 2655 bp, Cannabis indica
attatctcttgatgaggttggacgagtactccacgagctttttcaacttcttctttatgatgctcacatttggaagtaagtatggagaggtagcacagtgccctactcgacatggggcccaaactatgcacaaagccccgtgccaggggtatgagccaactagtcctctctctacagaaatgatgtaacatcttcgactaggcctttggtgtagaggttgttcagcctcttaatggtaagcttagacgacagtaattcccaacgcgactatggcttagatttgggcggcatctgtaatgcctccaccaattccatgttagtataatcctcgccaaggataagtaaatggccggatgaagaaaccggttgaccgcctcattgaatctcccatagggaagttcttcttcggcatcaagttccacctcctcactaggggcctcagagttctcatgctcctcctgctccttgtgctccacaggcaccgcgactttcctggaagcatccatgaacctgacaatgtggggatcgttggtcgatatagcacaaacagtttactttattcgggccagttttgatttgacctcaaaagttgacaagcaactatgactgccacttcagcctgcacggaatttctcttcaaagatccgagccgaccaataggcaacgtatcccaaacatcctcttggacattgtacgtccacgaggctggaagaaatttcctccattctctgttcagctcccacacgaagcatacattcacttctccactgatctagccaaagtagtgatggtgttgtatttctagtgtcggggaaccaccgctgatttcccactcagagaaacttgaagtagaagaagactcgtttgaagatgaagatgatttttttgctctgagtctgggttgattctcgtgaaggagttaagtaggtcatcgtctattcagaaatcacctccacagaagtcaactgggttcatctataaaaaagaaaatagagaggtgagtatccgaacaggtccagaacacctttcaaaaggaagattatcccagatactccgaccagaaggaaaagacaaaataaaacaaggtaaatccatcctcatgacgaaaatcctgagtaaaatatcaaatttgagatttttgaaacccaaaagctctgaagagcagaaactgaggtaaagaagtggatttttctcacataaattcctcaccaaacatttttataaggtaacacatggcaaatatgttataacctagtcactttatatcgctataattaacagaaaattcagaaacaattaatacttaaatctgctaatatattgctaatattattgctatatgtcgcgtttaatcgctatgttctcataggactttgacaacacaaaaaatagttctatttctatatgccacgaataacatcgcaacatgttgttatatgtcatgaaatattttcctgatgataaaaataaacctacaattttggtattcttattgttaccatgtcgataacgtcatagacatatgtcgcaaaaatattgttaaaacatgtacagaaagtaaaaaactacaaaatagagttcataaatcatactactaatgcatgcaattaatatactaaaataatgctcaaactcgggctttgcatgaagctttgttatggcccaagccgtcacaatttgaacaacagtgatgttccataacgtatttactgttagatggatattgattactccgtattcttcttgcattgctcttccttggacaaccaacgagtttcttctccactagtattcgactctcatgttctgaatgtgttcaggaagtacccaatcatcctcctcaccgataagattaattgttgcatcgtacgtattcttccacatctcttttgtgtaatatggggaggtaagagcgtacaggctgacattctgagtaactgttgtgacacatgcatgggcacaaaaaactttcaataattggaacatgtcgcatgtgcatgttttctcaactaagttcacatcaccacctctctcactcttaggacctctaccaacgttaaacaaatgtgcactattatgttggatgcttctgaacctaccatccttgtgttgtgctaccaaatctttctcaaaactagttgccaaaggggtagtgcacttacttgcctttttgagacgggcagcgaaccaactttgaagtgccaaccttatgaactcaactagagtagtgattggatatttctagaattcttctgtcatgttgttaaggctttcagcagcgttgtttgtcattatattgtacctgtctcctaaacaataaggacatactaacttttccaatcctatactctcgacataagcagcgatggcaggatccatttgttgaagcacctaaaaatatctatcacattccctcttcgatcatgcataagtggccaaccatatttgcgtgttacatacatcagtcttaaacttgtgggtgatattcataaaaatatgtttatagcatgcgcagtggcatgcttcaaggaaaacaacctcaacaacatgtttaatgctttgatacctatctgatacaaacactaagttttcaatttccccaattgcttcccttaacttttacaagaaatacttccaagagttgtgattctcact

SEQ ID NO: 379088 - DNA, 5686 bp, Cannabis indica
acaaagagaaggagtaaattgtggctaaaacaacccatccttttttttatggtaaatatacccaatattttcaaaggttgtacttttatacccaatcttttaaaatattagatggcagccgtgactaaatacacacctttgagattttttataaatgatgccacacaagtgtagcatttaaaaaacatttgatatagttaccgccaaaaagaaatattagtataaaagtgcaatatatgtaaaacatatggatatttaccataaaaaaatataatacacataagagtgttacattttaaaacattgggtattttagccgcaacttgtgcatagggttggagttattccatcggttgagagaaaaaaaaaaaagttattcagcaaaaagaaaaaaaattgaatttgacttagatattttttatatacacacatttttgatataaagtaaatagagatattttttttatatctcattaattaagaagttgaattaagcatagaaactcaaatttcttttttattattcatcagatcaaaatctaatagtttaatattttaaaattaaaatttatgattaaattttttagtatccatcaatgaatatacatcataaaatgcatgtgaactgcacttaagatattaaactattaaatgcatgtgaactgcacttaaatagcaaaagaggtaatgttgcaaataaagttacctggtttggttgtgggcagtcaaccatgaaccaaagtagacgacgaacatcatcagaagccaaagaaggaggtgctgctcctattaaaagctcaattatgaccaggagttcatcgaccaatgcattcacttcacccactggtcgtgttgcctcatttaaagaaaatgtattcaccgagtccctttcacgaattgtccagtagcaccttctgcagccatctagaagcaactggaaggcatttgcatctcgcattactgacgactcggtgaaaaccatgtcagcaagtgatgatagaagcttcttctgcagtccataattacacaagctccatatctttagatccaatagcaatgtactaaaaagttgcactttaagtgcatggttatttttctgagactgacatagggagacaacagctgccacaagttcttcatttcccacaccattgtgctttccagtatcaagggatgacaaagtttgcagaagataatttaagatccttgacagaacctcaggtcctctggcacgacataactcatcattgttcctgggatgttgagtagccatagaaataattcggaatattggagcagcaagagaagaagtggccaaagacaaagaagcattactttgttgaggttccaggctgtctttatttacatcactcactgctagaggaagtaaagacattggaccaccatatgctagggcccataaagcctccactggtcgcatccgtgtagcaatgtggacctgcccgaggacctcagctggccgtctgagcatgcctgagtcatcataacagaaaaataaacaatgtaaaacaaacacaagttcaacagggaactaaagataaattctcccttaaactttgacccagtaatcatcaaattatatataatttaaagtaaaaaataaattcatttaatccctccactgaaacaagcattcactcactttgtggcaggtagtgggctacagtttcaagtataaatgttaatgaacggtgacatcattaaaaaaacaaattaaaaaaaaaagtgactacgagttagggaaaatgaaaactattttgttaaactagggttgaattgtttaggcaagatcggcttcactagaaaataaaagtatgcacatctgcagctaaaaatatgttgaataatattattgcagaaaagctatagagaaaaaaaaataaaattataatatccacaaatcaattgatgataaaagattttatctgacctgcagatccactcggggaagcatcaggacaaaatcgcccactaagtaaatttgggtgatatagaagatggatacatcctccaatttctgcatctaaaagagaactttcctctgctaatctctgcacatattcatttgttgcaagccatggcaatcctgctccttggccaaatgaaggaagtacatcccctcctctagatgacaaccgtgtcatcctctcagggccaatcggttccttaaaaatatagacaggacccatctcagcaaacaaaggacattggcgacgacgacgttgtaaaccagcaattgtaggaggcgggtttgttccaatacaacaaaatgcaagtggcttggagatccgaggaaactcaaaaggtcgagattcatacaatgatccatcaatatacaatctcagttcactctctgctttcccaagcagcccttgtttgcaagtatgctcaagaccaacgaagtaccagcactgaggcttgaatgcatgagtaaaatgtaaagaagccttctttccctttccgcttccactttccaccaccaaaaactgtgcatggaagtatgcctctattccctggttgtcagcagacaagaaactgaacagacgtggcatatgcgctgttccttcacctgcaagcgcactggcagcagcagcagctgacatagctgaagattttcctgacttagcagcagcagcagcagctattgcagcagcagcagttgctgtatttaacgtatcagcaaatgattcaatgtaaatccatgttgcaaatgcatacccattagtgaacggccatcggctttcccctggaccaagcaaaccagagctttcaccatcaaactcaaaagtacatgctggtccctttgactcctttccactaactgccttctccaaagcaatcattaagcgagttgaccaaacagtgctaagtgttcttgtgatgacttgaaaccatctatgcaaatcgatgacactaagtgaatgtcccgctaagtattgaatgcagtagcataaaggagttccatcccatctcatttgctctgtggatcctatattctgtacaaaaatgttttctgctgaccttaaaagtactcctaatagaccagccatagagcacatcgctctgtttcttgtgcaagcacgtaatattgcaagcaaacccctgaccatccgtgtacgaggggacatgatactattagtatcaccttcccaagggagccaaggaataagttcaccggccacaatggcagcccgggagttcagcattacactaggaggattgcaatccccatcttcttcaaaactttcaacaccgcccattgttgcaatgagtgaatcaactaccactaaggcaatgctctccatttcctccccattgccaaaattctccaacccattaacaatcctttttagtttttctaaaccttctggcttccccataatagcagagtccaccaaatgcaataactccggggatacatttggcatggcagcttttggcttcggttttgctggtgagccaacaggagaatatgaagcatcctcgtacaaagcagaatcaatactagtggaagaggtggatggtttgatagaatcgaattgtctgtcttgttgagagttccaagaagggtgatcatgtagcatttggtcaactggggaagaacccgattctgctgtaagtgttccagatgaaaattgtgcagtatcttcaaacccaccagaggagtatcttgcattatctgagtttgatgatcgatttgaatcattaacagcagctttctcttgatctttcaaagaaacctgttcaaactgatcttcatctacggataaatttactgaatgcatcccttgcaagactgaatcattgtcattaatcagcgatatatcaccttcaggaaggctgatattttgatgataagatgaacctacatttccctgtacaccgccaactacttcctgattatcggattccctcctagagatttcctctacctccatcatttcttcttcttccattataattacgccttacaattcattcaaataatatgcaaaccgaggaacctacaaaaggaagaaataagcaagagcaggatataatcgtagaatattaatgaggatcaagtcttgtctaatacttgcacaacaaaataaccttacttcgagaaatatagaaacagaagaggacataatttggctgctaaggaaaccaaatttttgtgcaagcactttgcaaatatgaaacaactccagcggaaaatgatcattgagaaacagtacagtttttttttttcttttgaaagcagaaacagtaccaattagttaattctaataaaacataagaaattcaattgcagttaaatacagccccttttgttacatgtctattttcatgtttccacgcattatgtcgcattaagcaaacagtgccctatcaaagttatcttggattttttatagtaagtaatcaatttaaatcactaatcaactaacatactataccctatcaaataacccaaaggattaatcccagatctctttgtcgtgttttttcacttccaataagccaactatcgaagatgttatacgtaaaagctccaatcaagtttatcatagatccagcacaataaaattcacggctacacttaaaatcgttcgaattaccaaaatgaagatcgatctcctctgacattgtgtaaactgatcaatgcaccagatcgacaagctccatatacagaattttctcgccacaataacatatcaataaatatatgtgtatgcatagataaatgtgtatcttagaagctcaacactgatcgaacatctattggataatatacgtcaaaagaaaatgtatagatcattacaaatgtatagtagtgttgaaaaaaataaaattaaattgaaatccatgctaatgagggaaaacggagcgaacttgttacctcggagaagagaaaatccaataaattggagatcgtcgtacgatattgggcgttgaagagataatagatagaaaataatcaagaaagggaaagaaaagaaaaaactcagaatcgatgaaagaggaagagagagaagaagcgatttgggcgcgagagaaaatggcggatatagctagttatggaagaaggcctctctctctgggtctggctacccagtcaaaaatccacatattcaattactacatattttattattattatttatttagcacattttctatctatttattttttatgtttttttttttttttgactaagaatagtttttattttatttctttaaggacgaatagcaatgatctttgttacggaaaaaactaatatatactgtatttaaatttaattaattaaaacgtaaggactaagacaaatattttgtctttttttttttttgaaaaatattttgtcttttgcttttatgattttctttttcttttcacaaatagtacgtgccttttgggttgtcttaacttaaaagtgaagcaaatatataagagaatgtgttaggttacattattgattaacatgttactatgttagatatggaacgttaagtatatgtcgaggaatgttttgatgtttttctatctttttcctaattgatactatcatgtttttctattcttttcttttctttggtatttagtatttacttttatgtggcattaatttaattttattgaagttcctaattaatatgtgattgcctccctcaaatt

SEQ ID NO: 379089 - DNA, 4886 bp, Cannabis indica
caaacaaaaggaccaccacaaccatgatcacaaattaataaaaattaaggaaacaattataatcatgatgaaattctatagcttttagttttactaactgaactttgtaaaggctatttgtgtctgtgttcgtcttcttgaaaaattatatttggacttttttcttttcctttatattatcgaaaaagtacaaaacaaatactttttaagtgaaaagtaaaaaattacacgtgaacatgcaaggtaatgtgtgaacaagaggttgaatgagaggtgcttggcacccctctgcctgatttagtcttcaaatatgccctcaacaataaatttaagtgccaaaaattgattcaagtaaagcaggaaacaacattaatgactccatgaaaattcagaaattacaactaagcaacagatcaaagcataattttgaaacttaatgattatttatataagggcaaacctaacccaaagttatcagaaacacatacagaaaaggtaaagaaaccaaaaaaactagaggccttaagaaactacattgctccactttgaacaattttgatatctatagtacatggtacatgtatgacagcaagacaaacatgaagattagaaaaagttagaaagttctatcaaatgttggttagccaaaatgtaaaagtctcttataagagaccactccctcagattgccaccaagaaacaatttgtaagtggcagctaatgtattggtattagtcacaaacatatatatattactaatagttgacgagaattaatagtcacaaagatgtttttacttttttttttgaaaaataagatgtttttactttgaatgtattagtaatagtcacaaacatatatatatatatgtgtgtatatttgtgatgaaatgtataatctattttgtaattagacaatcgtcgaaatacacatgaattaccatgatcaatttagtgccatgacaactattttgtagatttatcttttcatcatttttctttggataaatcttactgacaattttctttactcattttaagaaaagaaataataaaataaactacgaaataagttctttttttttttttgatgaagactacgaaataaattctgatgagaagaatttaagcccaaattcgatgaaagagcaaacaaataaacaaaagacaataaatcagtcgctttagtcctctcttttctctctcctcattttcccctcaaccatacagtctcaaaaagaaagagagatggatagggatgaacaatgaacagaattgagtggatgaactgtagcaacacatagccttcatccatgggttttcttaatcagaagaattggcacaattaattaactaatcaattagtgatatcataccttcgagttaagtgaaaagaggaagaacagaacgacttgtagaacaaatcggcagcgtcattgggaccgtcgcaactgttggtgagagcattgagctccgtgggtcttgcctgctctcctccaatccctaaaataaccatcgcaaggattaattattgcacaaaggctgtagtagttgatgagaaaccaccaatggtacatcgtcagagagagagagagtgagttttagaggtgcgtaccaattgggaaccgacggcggcgacagacggcagtgggtggaggcgcggctgggtttcgaaatgggtctgctaggattttaaattgggtgggacgatgcgtgtaatgaaattagagtttataaaatttaagttttacaaatgcttcacctttttgcttcggtgcacaaacgaagcaaatatattaacctcagtttttaactgaagcaaaagaaattggcttcaattttacactaacgtaaaatgcaaaagacaattttttaaattatcacattttaccttggttttactttttgtatcggggtacgaggcgacgctaattgttattttttagcttcagttacacaatgaagcataaaatcttcccttatttttttgcctcagtaaacaaattttggtgagacgcgttgaccgacgcaaaaagtactttttgtagtagtaacaatagcctccttaacctcatttgcgtcccattagagaccatcctggacttggtattttagaaaaatatgggtcgcgttcttatgtggggtaatgaggccaacttcttggaggttcttagtggtaacaaacgtctctacttttaactctttgggcgagaaggatttatagaaagctatcctctcttccagctccagagttaatggccattggggaagatagtctagcagatgcgtaaaaatgtatcaatatacatcaagcaggaggagaagaaaaatcttaaagtctagagaagggtatgacacttacttgcagtgttgaaatccaaactaagcgaaggaaccctcttaagtgggaagccaaaggtgtaaaaatagtagtctcttaagtcgtgtgtgtacttcgtaaagctggtagggcaaggaacactcctagtgtagcgctccagcctgtagaagcccaccttctctttatggctccacatgggctaagacttgatgttgtagaaatataagatctccttcggcgtcggcacaagcttgccattttaaacacaaaaaatgtaccaccccgacatcaagtgataagcctagggaattaactggaaaggtgctctctggcaacgacgcagaagttagcaaagtagcacctcagaggcaggtgtgcagccatctcgatatgggcccaattctaaatgctgaagctccttttgtggacttactaggtctctccctgtgaacagatagtctatttcaaaatagtcctggaacactttccagccattgtggggtctcatctatcctcaggttattataattcttgaatttgttgacatgctagtccacttcccagggactatcattcaggattaaattttgagcgttttcttgccacatgatctcctcctctaaattagcttcctctcaacgattttgcctagacataatttctttacaaaagaagaaaactcaagtagttagccaccctaactacctagcatagaaaaggagctggaggtccccacccataaactgcttggagaggtcccaactagactgactatccaaaaactagaactttcaagagttattcattcaagataggaagtcaggaataacacagagaaaaaggcgatagaaattaatgcagaacctaaaaccaaaaggattttaggcgaaatttgctagtacctctactgcaaatcgaccaattacaaggatttttaaatagaaaattcaaaataatagtatggcccacgatgcttaaatcaacttaagatggcaatcacacaagtaaaaaaccctaatcgcatcccacaatagaacatacaagtatatcatataacggtgaaatcaaaaaacacagttcgtagatgaagaagcaacataccttatattgatagcagagatgttaagctaatcctctgtgggtctgactggggaagttgatcgtccctttcccaatgatgagatgctaaagtgatcaacaacttgatttctatgttgaaatccaggctcacaatttctcttgttgtaaaagccttgatcactaggggttgatgatgtgggaactctcatgctttaatcctcaacaatagacaaaggaaaaagtctacaacattttctagattgaaaaaaaaaaattgttttgagtttggttcttagttttgaaagttcacttaatgttataagcttcgaagcgttgaaaattttaaaaatagagaaaagtggtaactggaagttacaaagggtctttatacccataaagcaatccacgtgaaaaggggatagacggtgcacaatcccatttccaaaaatacaagtttcattcaacggtcggagagtttaaaaaatttgtgtatcctcacaattaatgttccctaaaattgaggggtagatcaatgatgaaaatgctattttttttatttttgtgccaaaaaatgaacagctacaaaaagatatagttgttttcagaaaatgactccttaatgttcgtgcccttctactctcatgcgattgacacgtggaaatattatcatcacagacagaagccaccttctgcagtcgagtagcattcgaaatatcacaattttattcttttgttttcacatgtccaaattgaaagagtactgatgcaagctcccaccatatgcagcattctagaagcttggggggtaagtattatctgtgtttctggtatttgacacgtggactccaggtcagcacccaagacccattagtaggacccttagcgaaggtaaagtgggccaggcccacttggatatgtccttctagaaacatatcttagcttcacaatttctggaagcatgttccgtaccatgacactggaagggcaagacagtgcattccttgaagacccttccagtttcctacttattcctacacacatatgaggaacttccagttgccaaatcacagtaaagtatcgtatcaagattaatggggaaacttcatataacaaatattatgcaattaattcagagattaactgcccataatctgcacacacggtcttgaccaaatcaatccaaatctgatcttcctagtcagcaaattgtcttctttatgggctggagttcatgagatagcctaagggtattgtttactataattttcccaatatagggaaaagggaaacctaatgtaattctcaaattactataaataatgttgggattttatgccctaaataaaaccaatttcaatataatctaatttgttatcaatagaagactagcagtcatttatgtttacatgcatttttcatgtttatggtctaatgtgtataatttctgttaaatccaaaacatatagt

SEQ ID NO: 379090 - DNA, 3113 bp, Cannabis indica
ataaatatgtatatatatatttatacaaatacataatgcatgaatgaatgtatagaaagttgccacatttggcttttatatccgtgatttattttcaaaaatattcgttactttcttttccatattgaaaatttttatgtgatattaggtaaacataattttcattttttttgtttacagtttttattattataattaattaatattttcccattactatttggggaataattatcttatatactattttaaaaaatatatatttcctgtatgagttgtttttataatttttatgtggattggtatttaggttgtttgttgttatgagtttttatataaattttcgtacaataaaagaaaattatttaaagtgtaaaaatgaaaattattattatattgatcatgacactatttattataagactatttaattcatttttctaaattgtattgacttatttttgataaatattaattggaagttattttttttaaaagctatttaggtctaacaagtaagaattgtttgtccttttggtttattttgactcttatatatattcgttttcattcaaaacctcccataacttttcaacctacaaaaaataaattaaataaaaatggtctcaataatcttttttatatttactcagaattacttcaaaggggcgcttatcaattgaattgtcattttcttaaagaatcacatatattagtttggttattaagagttgaaaatttgagccaaaactcttgtattgtcattttcaaaattagatgattttccaattctctgtatacctaaccaaaaaaaattactatatatgtaaaataataataaagtgttataataacatgtataaattaatgttataataaaatgctatcttaagtctcaactcacacattcactattctatacatctttctttctttttcagagaaaaaaaaaaaagccatggctggcgaccaattacaagtacttacagctcttgatgtagccaaaactcaatggtaccatttcacggccatactcatcgccggaatgggattcttcaccgatgcgtacgacctcttttgcatatcactcgttactaaactccttggccgtttatactaccaccaacaaggctcaccagaccccggaaagcttccctcgcatgtctcggccgctgttaacggtgttgctttcgttggaacgctctccggccaacttttcttcgggtggctcggcgacaaactaggccgaaagaaagtttatggcatgactcttatgataatggttctttgctccattgcctcgggtttgtcctttggtaaaaatccaacttcagtcatggccactctttgcttctttagattttggttagggtttggtattggcggcgattaccctctctccgccaccatcatgtctgagtatgcaaacaaaaagactcgtggagctttcatagccgcggttttcgccatgcaagggtttgggattttgaccggtgggatggtggcgattgtcgtttcttccatcttcaaagctcggtttcctgccccggcttatgagatcgacgcaattgcttcaactgtaccggaggctgactatgcatggcgtgtgattctcatgtttggcgctctcccggctttgttaacttactattggcgtatgaaaatgcccgaaactgctcggtacacggctttagtagcgaaaaacgcgaaacaagcagcctcagacatgtccaaggttcttcaagttgaagtggaagctgaggaagagaaagttgaggagttagctcaaaatgaagagaccaaattcgggttgttttcgaaagcttttcttagacgacatggtttacatttgcttggaacaacaagtacttggttcttattagacatagctttctacagccaaaatctattccaaaaagacatttttagcgccattggttggatcccaaaagcaaaaacaatgagtgcacttgaagaagtttacaaaatcggcaaagctcaaaccctaatagcccttttttcaacagttcccggttattggttcacagtggccttcatagacagaattggtaggttttcaattcaattgatgggattttttttcatgacggtgttcatgtttgcgttagctattccttaccaccattggacattgaaagaaaacagaatcggctttgttgttatctactcactcactttctttttcgccaatttcggccccaactctactacttttgtagtcccggctgaaatttttccagctcggctaaggtccacgtgtcatggtatatcagccgcagctggaaaggccggggctataattggagccttcggatttcagtatgcggaacaagggattggagtaaggaatactttgataattcttggtgtggttaacttttttggaatgattttcactttcttggtgcctgaatctaatggaaagtctttggaagaaatgtctggagaaaatgaagctgatgaagaaaatggtggtgatgaagttagagagtcaagacatgagtagtagtgaaagctttggattgtactgtgttgtgtgatatgaaaaagctctctctctctcttttttaaattagtattaattattgtcactatttccttttggtcatatatattagtagaacaattaaatcatttaaaggtcttttttttcttgtcattaagttaatattagtaatgtattaatcctaatttcttggagaattaggtatttttctctatacaaaagaaactatcttgaaccttataattatgataaatgagtcactttacaattattattatttttttgtcaaaatccctattgacaaagaacaagtatcaaatttatttttggaactacccttgtgagttttcgaccactttctccacttttttggtttatagtaaaatacaaatacactttattgtatataaattgtaataattaattttaagtaatgaataatacaattttcattaaattaagagttttttttttttttaatctatatatactgaaaaattacaatattttatgagaacattataaattttatgagttttcaaaatttttgtgtaaaaatatagcttttttcaaaaaaaaaaaaaaa

SEQ ID NO: 379091 - DNA, 1702 bp, Cannabis indica
aaaaaaagaataaaagtgaaaaaacacaaagaaaactctatttcttctcactttaaacctatttacttaagaaaaccctccatctaaatctctggctttaattcttcccttcttcaacattctcttgctagttgaaaaaacaaaattacagcaatcttctcagtggtgatttggggattctcttctgctccatgaccatctaacattgccggccaccttctccttcaactaaaatctaggttttattcttcttctttttcactgcatattcattttgtttgttgtttttcctgtctgatttttggtatggataattgttaattgaatcttttgtgtcattcattgttagacaatgaaaagaaaaagaggagttggtaaacttggagcattttgccagaaagatttggcaggggacaatattgagatagaaaaatcacaaggttgtgatcaaaaggtgtcagggtgctctccccaaaagcaagctactaatatagtgacgagaagctctttggagcgtatatcccgacttgtgcacaaactttctgtagcacagaaaactaaagttcaagaaattggcttcggtgcgtacttgagagaggatttccctgcaatgtgcacctctttagccaatatcttagtgaagcgtgtggacgtatacaacaattgtcttaacctttgtggtaagtcgtatcctatcttcgcttctattttcaaagaagtgatggctttgcctgatggtccgatcgtgataaatgagaagctcaaggtccccaattgtgaattaaagttgaaaatcatgggtaacaaaagttgtattgagttttcttatttagaaggtcaactgctagagagcactgtagctgatgattatcttttcgcattatttgttttggtggtggtggtgcatgtctagttcttgggtccggtaacaagttgtgcactaactccatcaattgtgttcttgattatagccaaattagtcagtataattgggcaacgcattgttttcggaacttgatgagttcgatcaaaaaattccaagataatggtatcactcacattaatggttgtacagtattcctataggttttttcttacttatattttgtagttgctgtctttcattctatatacataactttagattatgacttttatcaatatgtttataaatgttcacagtatatgtactttaagaatgtccttgttcctaatttttacattgaccgatcggttctggcaataagtttttggaataatagaaattgtagaaaggcaaagaaacaagtgatgacatatggtggttatttggagtatgcaagagtgggtaattgattatgttttaagttgtatttttttatataggtcagttaatgaaataaattttagtctaatcctttaattttgtatctttaggaagtcgaccgtacatcgaataaacaatctggaaaagagggtggtccttcatgttcctgtgatgatgctcttaagatggtgaatggtagcctagaggctatatcagtgctaatggtcaacttacccgaccaaatccgtattgttgtcgctgaagaattaaagaaagtacttgaaaatctaaatatgaaaatgatgactcctgatttacagaatgccacatagggtgtggatgacgcaggagttaatgaaaatgagttagtggacagtagtgttaggttttatgccc

SEQ ID NO: 379092 - DNA, 3227 bp, Cannabis indica
aaatcctaattagccttaaaatataattaaaacaaataaattttttaaaaatcatttgaggaagggatttaattaattaattcgccatacagtttttaacgaacaccgtgacagacaaattataattaacaacgctaaagtttgctaatttacgttgatctgtcagtgaccgacagtagggctttccttgtgagttgtggcttctgacacgaactgccaaaccaaattgaaatgaaaaataaaaaagagagatacagagattgttttttttttaaaatagaaaaagagattgttaaaaattaaaaatttgtttgcttacaaaaaaaattataatctgctcttacttttcaacttgctatcagaaacagccacgtcaccactttaatatgctaaaagaccatagacgacgcaatgtgttttttctttattggttttatcccgtcaacgatttgacaaatgtaatggagaattcaattcaacaagttctcataaaacttttccttttgtgtaataaataattaaatataaaatgtgttttgtgacttaaaattatttatttaaatcttaaagtagttggtgttgttaagagaaaaattagataattaaatcttgccttctaaattacgtaattaagttattagagtgaaacacccaaataaagcgaagacttgaaaacgaccaaatcaaacaaaaagaggagccaaacggtttctggcttctcggctttgtttcccacggtaacgcgtatacttgaagttgaagttcagaactacagtgaagatctaacagacactctttccttttcttttaacaagttttctctaactttccaagcattttctctggaaatctttgtcaggtaattctactccccatctttaatccaagtttgttttctttctttcttcttttcctgatattaaacgtaattttatacttgcttttcggaattctagagctgcgactttcgctttcttcttccgctgtagttgttggttttcttttcttcttttccatagttcctcttcttctcctttcgatctgtctggtgtttgtagaaaattgatcgaatgagaatttagtagtgcacctacgaaggaggtctcagtgtgtttatgattatttacaaaatataattctattgtcactcatcaactaatcggagcgatttcggaagctcatgatgcttttttcctttttcttttttgtgggggtgaggggggaggaggtagggtaggttaagtgtagtgttcttgtttttctagtcaaatataggaattaggaactacagttctagaacatgttagggaaaatacgcgttgaataagtcactaccactattctggactaagttcatatgttttgttttattttatttcgtctagaaaattattcgaagaatttctgcatctaatttgatgtttactggctgtgaaagatgaaattaatatcttcatgatataagaactgttggttaattagctaagatgtcgatcagcgattgactggcaactgtaaaactaaaaatgatttgatctattcaattgcgtttattgaggaagcattgttgcaatgggggtttaaattggagaaggcgcctgagtggcctgagtgtgatccattcaattatcatggtattaaacttgagagtattcttttattgtgtggcattgtttgttgtccatctcctaattttcccgataacacctgaagttctgtgctaaattggcatgtttttcttgtgttctgtttataccaatgaaattattgtattaacagacgctagtggaaatataatttttatcagagtttcattctttgataggcaaagaaacacctgcttttcttttcactcttattttcttcagcaggttttatgacaaaaatttcacatttctaaatgtaatttgtaagtgtacacctttgtgaagaacttattgttttcattatttcaggttcatcatgagttactagatccttctctttcaaatctttatgaaactgcttgcaaagtgtttgttggtgtcagctggatagctggttgagattcgagaagccttgaaaagttatttcgtggaagcaaaggtcctttaaccaatgcacttaatatgattttattgtgctacgattggtttttagcagtttgcaccaaatggatcgttcttctttctccctatcagaaatttggtaacaccaccacttgctggaatttttgaacttttttcctcctttactgaggaaatcaggcatatcgaccaattgattgcttgagtaatatcaagaatgaagaaatggtatggtggtgttctggttgggtctttgtttatgcttctggttctgagatatgccttgatgaaagatcctattgggaaaagttatttgacaactcctttctcctctaatactagtaatgttaaccctcttgaatggctcagtgccttttccccacctgcagttcagaatcctgtgaatactatacaggtgatacctaccgaaaccattattttcgatctctttgctcggaggaatatctctaatgttgagcagaaatctctgcagacttgggaccatttgaaacacctaattgatcatgctcaaggtttacctaatgcagtagaggccattaaggaagctggaggtgcttggaataacctcatggcttcagttgaagaggaaaagctaagtacaaataaaagttcaaaaggcagggcaaaagagaaacagtgtccctattttttaaacaaaatgagtggcacagaacttaataacagtgactataagttgcaagttccttgtggcctgactcaaggttcttccattacacttattggaattccaaatggtctacttggaaattttcgattcgacttgactggggaaccacttccaggggagcctgaaccacctataattttgcattacaatgttagacttcatggtgataaactaactgaagaccctgttattgttcagaactcctggactgctgctcatgattggggtgaagaggagcgatgtccctctccaagccctgaaaatgaaaagaaaggtactgccttaaatttcaattaattttgtataaagaatgttgtttagtataaagatccgttgctaaaacattttagtaaataaaaatgcataaaatgttagtagtgatatttaaactaacatatctcatcaactagtatatgaatatcaaatcaggttttctctccctccctctctct

SEQ ID NO: 379093 - DNA, 3995 bp, Cannabis indica
catgtcgagagagtatatataatactcaaaacacaaagtattgttacttaaattaataatttaattttctacgaaaacaaaaaaacaaaaagaaaaaaataataaatttaattaattaataagtttatcttacgggcgattactcgctgtttaaaaaaaatcatgaaagaataaattatgaagttgacgaatgggttgaagacaaagctaagtcaacacatattttatgctcataataatggattggtcaaaatagttttatataaggagaggagtctcatgcagagcaattaagcatgagatatattagaatatattataatatataaaaataaaaaaaaaaatcatgacaggctctcctcttgtgctaagaggctcaaaaaaattgtaaatttagttggcacagtactatactaggacataacggtagctggaggccatgcatcacatcatgtgtagttgacatttattaattttattaaaatgatatttcagaatatattcatggattgcgattaactttcatatatatcttaatttatagaatttataattcatacatgctactttgttttttttgatagagttatacactactattagctgtattatatatacttttcgtttagtggaggagtgtatgtgtacggttaagttaattaataacatatatgcaactccttattaatcatataagcttatatggatatatgtggaaattttctgatgggaaggacccggtaaagaccctttttttgggaatctcttcagaaaattaaataagctacatacgtttataatatatgtgtataaatattaagtaaataaatgaataaatataggaattcctcatcctattttgaatgagaaatgtacgaagatagaacgtggaaacgacgattagaatgattaatgagaaattcggtttgcatgcctaaaacctactgtaattattaacattaattataacaagtctacgattgtccttcttaatttacttagccattagcatataattattattaagaaaaattaaactataaacggctaaatgtaagaaagaaaaatgatatgtactcggtttggtcggtttatgctatacagatcgggttataaaaatttaagtgcaacccgcccaattaaaaaaaaatagtaaccagcccaatgaattaacccgtctaaaccgaccactaatattttttttttatttttacatacaattattatattttagttaattgtaataataaaacaaatatatatagattaaatttaatgttaaaatcaatcatcatacaaaatatattagtttgaaatttatatttttaaaatagtcatataaattatatgatataaatatatataataaaaatatgtaaataaatatatataataaaaaaaaaaaaaaaaaaagtcgtcttaatcgggttagtcgggttagttctgttaattcgggttagtattattttcaactcgcttaatataaagattggatggattatttttttttttcgagttatctcaattttatttaggtgcgttattttgattaagcgggtttacaaatatttatgtacagccctagtgtatatatactaatcatgggactaaataaaattgaatttacaattgttggatgacggtggagatgatgtcatttaatatgataattattataataattgaagaagaataatatgtgtacatatcggctaacttatatatttatataatgtttctctaaattttgttaatttttaaaagggaacacagaatcatcatagtacagcatgaatctaatttcaagggacgggacaaatggaccgtaagaagtgcattaacgctacatatataattaataattagggaataataatatagctttattttgttgtgagcattattaataataatggtgattacgtggcattgaaattatacaatatgaattaagtagcatttatacataaaagagagactatatgtatatatagttttttgtatgtgtgaactaaggagccacaagagagacaaacacattgaatggaagtatcatctaccaagagatatatttagagagatgatatacggtcttgaagatcgtttcagaatataatttggcaaatccattcataaagatgctactagcaaaatcttttatgggtcatatatatataactaatgtggattgagggagttgtccagttttttttagggcaagtgggagattgttagggtttatgccctgaaaagcctataaagaatttatgattattattaaagcattgaaattattattgaataatttcttatccatatataaggctatgacttggagttgtacagtgaactaagatcacttagccatgtataaaacagtaagcaacatattaaagttatgaaatctttaatcaataattgctagtacaattcactgatgcccgttcttcgatgcaagtaatctttgctgagattacggatgttttatgacatcaaagtgaaggtattgtatataacagagattatatatgaaaaggagcgatataaataaagttgtctttacctaacatgtcatttactacacagacctaattcatgctataacaaagatcaatgatagattggcctaaaacttacgtaatcatgaactcttgttcatgttataagtttccatgattcactcgttaaagtttttaacttctgttttaggaatctaataatgtgaatggttgagaatatgatctataattatggaatcctaactttcttaatggatcgaatgttggttccctttaagtgttaattctagaactggaaagttgtgcacaaatttaattggatctaaattattcttccactagtaaattaatgacactaaaagataaagaagtaattagaaggttcaacagtaatttgatcaaactaattacgaaccaacacatagaggtctaataactgaaatttattcaatggacacgacagtagaactcagtaaatataactatataattactaagagttcaattctatatttttagtagagtaaacatggaataaataaataaagattatttggttgatcagactcaataaataatcttatttattggagcttagaattatgggtccatggttcctgaatcgccaccttaaaacactgtcaatggaaagaataaagagttgtataatgttgtttggaaaaatctattttaaattggaaaattaataattatttatttttgtaataaataaataattgttcaaattaattaaatatggaaaagacaaaaattgttaagaaaatatttgttgagacaaaagttgttagaaaaaaaagacaccatcattgtcctaaacaagacattgtaggcgcatgagtttgtcttttggggttaatcaattatttaattaattcaattagataaatattttaatttgaaacgtggttaaatatatttcaaagttgtagagatattctctcaaatagttgagagattccctcataaatatcaataatcaaattcagttaaagatatttatttattcaaatatttaaatatgatttaattaaatagatttaactactataaatagaagcatgagttgagaaatcagataacatctatttttgaaatacaggagagaaaaagaaaataattttctctctaaaattattcttgctcatttgttgagaactcaacaagaacatattatacactttatcctaatagcccacactattccttgtgtgtggtggatcaatttgaaagatactggtgtgagttcaattacatcatcctcatcatgtggattaaaggatacaacatacgagaagttttgaggataccttgatagtcttcaagaggtatttattctaaacttatattttatatttttatttaatgtacacatatataaagattgcattatctaagtgtcataggagtcgtccaatactgtaacaccctaactaacttaggcgtattacgtgattt

SEQ ID NO: 379094 - DNA, 7798 bp, Cannabis indica
ttcactttttctagggcctcagtgtctatcattggccctcctttgaaaagtggtgcgaatgcccttggagatctcaaccctctttactgtgaaaaggttggcggccctcttttggagaacaattcctttccttttcatggcgcttcctcagaataccctcgatctctcctaccttcttcaaaattgcatgattgaggcgagtcgactttagtggaaacttgaagcctaaagatggaatcttgggcaaggaagagacaagcctgagtggttggctggaagtagaattgtggcccctcgaaggaatgatggctcctgactgagggtgttgttgcgatggttgtggttgtttcgatggtaattattggtattgttgttgttgatggtgttgtggttgttgaagttgttgctgttgctgctggttttgttgttgctgctggtggttagttgtgtttgacaaggatggattagtggtggatctgcgaagatccccctctcctcccgaagaacgatgcttgtccgcagcagatctagctttcttggcgtccctaccggaaggtggaggagtcttgcgcttgggagtctagactctcgtctgaagcattgttccccaccaagacctccacggctaatggtggcgaagcttccacctgagctagtggttcaatattgccagtttgggttgcgccagtcccggacacaactggttccttggaagcctcccttgttgcagcatgagtcttgtctgccccagcgggagtctggaaaccggaagctttggggctagcctttgcgggaggaggaatcttgcggacatcagacaaagatgaagtagacggaggctttgcattgcgggtcctgtgggccttggtcttgcctttcccttcctttggagccctccgtcttggtcaggctcttcgtggtcttatcactcagtgacttcaacattttcgctttgggagtatcagcaaacataacgaacatatggttgacaagccaactctaaacaggaaagccaaagcacaataaacatacaacaatatgttccttacaagtgcgcgtgtgggtgcacccgtttagtgaacagttataaggttctctacgagcaaagaaggtcatgtcctcccagccaatgaagctgtcgtgctctttgaagtgtgagaaggacatgatcgcaaaagggtccacctaatagtatctagagataattttggattgctaggactccgaatgatatcacctaccctatctatgagttcattcatggggtatttagtgtgatctaaatttaaaaaatatgtattgaatctcccttggtctatgcgggatatgcgatgaagattcggggtgtgggatacgcggaaggctttgttacatcttccggaagtgttggctcctggggcgcctttgtcccggtatgttgcagcatacctctcctggatctgctcaacctctgttagagggtttgggtgctggaccatccaactagcttccagaagttggtcctctttgacggcctctgtaatgatcttggccaaatcatgaactatcgcttccttaacctcttttgaggcctggcattggccccggccacagatgtagtctatactttgaaagccaacgatgagttcatgctcatagagtaatggagtggtaaccaaacccttgactttcagttgggtttcggtgaaggccatatattggaccaccttcttgtccaatttttcaatcttagcactccgaggcacagactctgccagaagaaatgtgaaagctcaattagcactcaaatcaaattagaggagggtttgaaaggaaaaagatcgaaacaatcagttcagcataatttacttggaatttggaagctgagctgaagagtaagcactctcttcactggaaaaccagtggagaagaaccaatactccctgaggtcgtgggtgcgcttggtatggctggtgggacagtgagagtctgaatacctctcaaacttatagaagcccacctttttcgcagttggtcctcttcggctgaggcttcatgccataaaaatagaggatttcttccagagtaggcacctcgaatttgtgaattctacaaaaaatataccatcccggctggggagttttgtaagatggaggtattagctggtaaggagcaatcctggtcctcgcgatgaaatccacgaaatacgccctaagagggaggtgtgctttgttcgaatgtgggtccagctccaagcactgaatccatcggtgctcatggatgcggactcctcatcaatggataacctatgccacattagtcggggcaagttgtgaagtatgatatctgaggcatacatctccagcattccatacaaacggaaacaattctctttttggtccatttcccaaatggaactgttgggtgcccgagcaagaggcagagtcttagccttcccctttcccttagactcctcagctatcccggatggagtagcctccggaatagtctccattgtgccatcttgttgaagctcggggactggagcctcagttgtcatttcctcagtagccactttctccataagagcaactgatggattctcgtcgatttccacagcctcaaggtggaactcttggttcaaatccatcactagaaagacgaagagaggaaaaaccaagcaattagacacccactatctaatgacaaaatgggtatcgagaaaggtctcccctaaaattgctcagagaggtcctctccaaacctatcactgctcaaaatacgtttttcctagacaacttgaagcaatagatcgggaaccgaggaaaagttacaagaacagaagctaaagcagaactcgagaaactaaagcccctcagagtcttaacaactccaaatgggtttgaagaaaatacactggcctagtattcgttcaaaaattcttcttgcctaattctgccctaattcttccctaattccagaatcctataagtatgcaaatgtctacggagcgcaaacagtcatatccaaactatacatacaataccgtcattttcatgatgcaaaaatttttccagataaccctgtcctagaaatgaaattgtacgagctacattttaccactcaaacatacaagacatcctagacttagcttgaactagacatttttgtcttagatacgaaatggtaaatagtcaatagggtgtcagggtacttgttatgtgagtcaggaaggagaggttgtcgtggaaatttgcccaagaatgctgaacccagtcgattacccgattgtagccggcatgagcgtcgaaacgtttgtcggtctggggatgcagcagttcgaggtttaatggctctgcgtttggaaaatggactgaacaaaggtttagaaaatattggatcaagcaatcgaaggcctcttgcattcacggttggaaacgacggtgaaagggaagtttttaggaaaatgggaagctttggtttgaaatttgaaaatgagaattttaagagtttgaggttatgaaaagaagaaatgggttgggcgaatcctttatacttcaaccaagatccttgccatttgaaatgaatagcccagatctcttcttccaaaaagcacactttgatttaatggatgggaagttgaaaagatggcatttaaaactcacccttggcgtttattattcatcattacacgcctcgagtatcgtacgcattaaaagagaggtcatttcaatcttccacgcctgtgataccttcaatttatggccctttacttgatgacagctcacgggatgcgttcgcaatctccgcagttgccacatgtcaagcacttatctttaagaaacggaagaggactgcacgctcctagatctcatagagtcccagaagcttggaggtaaatgttatccgtgtttgtgagcaagtgacacgtggcaaataaaggaagagataacctcataatcccactaattaaaatcccctactacaaccttgtcacggagaagcctcgcgaatccatgagcaagtcaagactgaaaagatgcatgggagtacactttgccctatcctggcttccagacgcaaaagacattgtctcttctggacacggaagggtccgaatatggaaacctgcctagttgatacccaaacaggtactcaaagggcttaatgcggatgtcgaccgtccaggagtgttgcgaacgtctacttttggaataactcgattgaccctgtgacagttatggtttttttgacacaagctcaaatctttttccttgtgtccaggcatggtagtgcccgcacctccatcacctttttgccagacggattttgcaaacctctacttttaaaggtgaaagctttgggcgatacgtggcctctacttttgaaggttaaatctttgagcaatacgtgtccacgtagtacaaatgatccccaattgtctagctgcagcatgcacgggcataattgtttccgagggatgcaatagtcagctctcattttgcatgcagtttacctcattagtggactttcagcagaaaccctaggcgggttatagacatgtctatacccaccatttagcctataaatgcgcttctatttccaaatgaagggggatcagaacattttatagcaaaaattctgccaatattactcttcgggttcttcttcaagagaaactgagagtacagagttatggtttcttgcaaaactactgtaaacacatcaaatacacccttagaggctaatagattgactcgtggactaaggttaattaatactcgaactacgtaaaaatctccatctctttatctttccatttagttttcgaaaatcttggtaaatactatctatgtcatcttttaaattaatgcagtgtcaatgtggtcatataaatatattaaatatataattatacataatatatttattttttggactgtaactactttgacttttgaacttatggttatcttcaccagtagtgagttttttcccatacatttaggtggcatttggttggaggtaatgaaatagaatggaaaggaaaggaaacaatctccattccattcttttgtttggttgcatattatagtgttagaatgtcatttcaatagaatggcctttccactattttggtggaatgacaattatattttaaaatggaaggaaagaccattccaatgcatgatgagaaaaaaattaataatttttttatgtattttaaattttattctattcttattctcatttccattctcattcttatattttcattcctctcaaccaaacccactttagttctgtgctctttgggggcaagatagttttattactcgatattccagttgcttgctttctccgtaaaatttttgtcatatgtgagtcttgcttttatctttatagttcatttaaaatatagaaagtgttctccaattgcagatcttttatacaaggcaaacatgaatactggaagtgtgcttgaatatgccctcgcctttacaagtgcagcattggataagtattgcagtaaatggagtgctattcccaaaacaggatttgttgacattacaacttcaaaggatttctacagaatatacagtgggcttcaaattgtaaggaaaagttttatgttggcatgtatgtcaaatcctcagtgtatgtgttagagcatttttactgcattttctattgaaatcttgaagaaattatcttgaaagccaaaatatattattgcacgggtcaaattgcaacaatttattttgttatgaatgatctgaattatttcttccttcctatctatatttacagtcatacaactatatcaataagtttgtattacacaacgatgtgcatgcaaacacacatacacgtcattctaacttagaagcacaatccaagttttggcttgtgttctttgccagcttactgtatatcttgtattcctgctaatatgtcagaataattgaattgtagggatatttggaagaatctgagcaagtatcttcaggcaatcgtgaattgctgggtgattcagtagcatggggtggttgcaccataatttatttgcttgggcagcagatacatttcgagcttttcgatttttcgcatcaagtcctcaatgttgctgaagtagagactgtatcatctgtacaatcacccaggaatcctcagttttcccaggtatgaacattcatcaattttaagcttatatagcattaagatttcaaaaatcaatactcaggcccatgtatattagtattgtaacagtagaggctaccaaactaaaattatgtgttcaatataatctttgatgaaatgtacttttgtttgggtgaagggatgggaggtcctaatagaatcaatgaagaaagcaaggaggctaaacaatcacgtcttttccatgctaaaagcacgttgccctcttgaagacaaaacagcttgtgctataaagcaaagtggcgcccctctgcatcggataaaattcgaaaataccatctcggcctttgaaacactgccacagaaaggggcctaagccgtgagtttgtgcaattccatcaacattatgctttgtttttttttcctcttccttgtttgtaattaattatatagattatagggtggtaaagtacaaaattgttttcgttaacgttgttccattaattaaactctatttagaactgaatactaggtaaaaggagaatgaaaatagaaatgtagggatgggggaatgtgatctttcttcagttcaatttttattttttaccaagtcgtcattcattttgagttgtataaattagaagactaaaacccagggtaacctttgtgctccgtcgattcaattgttgaatctattcaagcatttgccattataatgaattactttttttttatccttaatcgtggttgccgtattcatgccagtgatgccaccacctctcactttcaaatatgtaataataataacaatatgcgttggaactttttttgagttttgggaccacgtctgaccactttgacaacatggttaataatagtgtccacaaaataggtcagacacgataatacgattagaaactcacatgaaataaacaagtttaggggtctgtttggcacagttcttggaaaaactaaaagttgcttttttaaaaagttgataaaagtgtattaggtaaacagtcaaaaaacaattttttttgaagaatttaagttgttctgaaattaaaatttttaacataaaaataattttctatttaattaaatattttaaaaataataatatttaaatatcaagaataaaatcaacttaaatatttaattttcaatttaattaaatgtattaaatataagaattaaataattaagtataaaatcaatttaattattaattctaatttaatactagaaaatatattctaatttaagttggtctaaaattaattaaaataattaattttcaacttttaatatttgctaagggaaatttgaaaaactatactttaaaaaccttaattttttattcttaaaaacaatacatttcaaaatatatgacacttttataaaaaactcaaaaataaccctcaaactctctctcttcctctatctctctcttccactcaaactctctctcggtccctctttccttcgccagtccgacggagacccacagccgcaccatctcgaccgaaccgaaccatccacgaaccgaacccacacccatctcgaccgaacccacctcgactgaacccacatcccccgtcggactggttgtagtttggggaagatgggggttcgatgcttgcgagttgggaaaaaaaat

SEQ ID NO: 379095 - DNA, 1744 bp, Cannabis indica
tttatgttatagatgtgtaggctagaaggtttaaataagcatattttatattttttttataaattatttaaaaaaattaacaatttatccattcaaaaaattaacaatttataatatgtaaaaataaaaaattactatctacactattattcaaatgtagaaaatacaaaaaatagttggaacaccatgagtttatggaaatttctaaattagtaattgactaaatttgctgctgcttcattttacccgtactatcagtttataaaatatatgttgtaatcaaactaccttaacatatatataaatatatatattatagaatttgaattaaaggaacccaaaaacaatttaaacgcaattaagttactgtaaaacataccaaacacataaacacctctcccaactcccaaatcatcagctgaataaactaaacagagtttattcctatcaaatacagaaagcacaaacatattatgtaactaaagaagaaagaaaacagagcccaaatcacgaatatcgaaactgttaaataactatattcttaaaactgcaccaaaaaagtaataaattaccaattaaaaaatcatttaaataattctcaaaaactaaaaacaagtagagctagtgaaaatgttgcgagtgttattgaaaggtacgtacgtaaagaaagggtagaagcgctaacgtggttataaggttggctggagttcggcgccggagcaagatgaaaggccggtagagacggagtcgacgatggaaggctctaattcttgacttttggttgaccgttgaccgatagcaaacagtgtaggattttttcttttatgaaaaaataaaaataggtatttttatttattcaagattaaaacatagaacaatactcaacctttcttttcaaatagtgaaaattttatgtttggtgttatgactcatgacttcatgttaaatctaacttggatactttctaaaaaatattttaaagacaaagctatttatttacctcatatatttttaggaatctacctaaccaaagagctcgatatttaattcatgatttgcagcaaataataactactataaataaataaaaaaaaaaattaaaaaaattaactgtacaggtagcaattaagtaataaatatactgcaccataaaagtaccgtatcatcatcaacttacatttatagatacacctaaaagctttcaataaaagtatattttactcagaaaaaaaaaagtatattttaaataataccaaaaaccataaagaacaaaaacctcatcacatatatgttgtgacttgtgagagcacgaaacttgtgtttaaccaacataaaatggaatttcaaccaaacaaaaaacataaaaaatagtataactaaccctttaagagtgtttggtattgttttttattttttttattttttttaaatgtattttcagcaataagaatagaaaatatttttttgtagtttttaaaatgaaagacgtattaattaatgttttcaaaaattgattttagattattaaggaaaaaaaaagaaaaacttcaagctttcacatcttagacacgaacccaaccccaacctcggcatgaactacgaacgttatccccgatctcggtccagtacccaactcaagctcaaactccagacttagacaaggaccccagacgatctgtacgaggaacccagcccttgacaaggttaggtctaatgatgaaaaaaaaaaaatgtgagaaaaaat

SEQ ID NO: 379096 - DNA, 2747 bp, Cannabis indica
atataaatatatatatattcaccttatatgatatgcaaagttaaggaaatggtgaacaaaaatttatgttcaaattgttaaatgcaaaaccataagctgatcaaacaatccaagcaaaatagcagtaaggaacataatgaaaagaggtccgtctgtgcatccaaatatggtgtctagctactaaaaagaataccactgaaaatgaaaagatgaactatatatacatttacagatgactgtaaaagcagcaaaacaaaggtataggtttgctaattttgctgacctcctaataatcttctaccaatatatgtttacataataaattaaacacatatataccaatatatgtttacataataaattaaacacatataaagtctctgtacatttttatgtgattacatttacaccaaccattacgactaccctacaattagatataaatactcatagcaaggctccattgataagctctgaaatctaaatataaacaaagttatatacaatatatgactaatttgagaagtcgccagacaaatatatgacactttcttctcttacacagaactaacagaaacaagatatttggaaaacaaaaggctaataacaaggagaatatactagttaaagttctaaagtgaaatgggtatttatcaagtactaactttgggcctccagaactataaatcaggatttctggacgctccaacttttccaacctacattgcttagccatccaaactgaattagcggttgtgctgattgtagctttagtaggtgagttcggtatggaattagtaaattccttaagcctgcaattcatgtaaaataaacgtcacatcagaagcataaattcatgagctatggcttctcattcacacctatttgcaattaataatgaaccagccaaacagtaacaacaacaaaaaagtcaaatacagcttcatattcttagtacattttatgaattgggacaaaaaagacaatgcaacatagcataaccatagtcatcctatcctatgattttgtaacaatacgcatacctgtaatgcacattgtcctgtaaagatgagcaacatgaacatctcctttagtagtcatattctttctctcaagacactcaagaaatgctaagtcagccttcaataacttagcttgatcatgagtatcataaccaatatcatggcagtagcagcaaaaatccaaccaatcaataggtcgtttgtcccaaacaagcgatccattatccttcccacttgaccaattgggtccacaataatgcccataccggggaaatagctgagaaagaaatgctctcacgcctgtatgccatggtaccttcgacacatatggcttaaagcgcaccggggcaccccgaagctcattgtcaactccccctcgaggcagggcacgctttctcagccctctatttatagtagttggtgtctttttaccatggggagtcacccatggaacaaaggagataaaagaccacttccaaaattttacatcaagagaagtcttttgctttgtgtcttctactaatagtgcatcactagtattggattcaatggatgcaaccatatcattgttcaatttgtttgtttgggttctaagccaaggcatgttatcaagtaaatttgacttcatttttttttaacaaaagttcatttactaaacacacactatttaggcaccataacatctcaaattcccctttcctgccaaaagaaattacacaaatataatcattacataaatgtttacaataggttacatcaaaccagaaaactttactttaatggtttaaaattaataacattccccaaaaataaaaagctttaatttgcaagtaaaggaagaacaatttttaccaatatgaacataaaaagtgagaaaggaaaagtacaagaatttaaactttcaatttttgattccttttacaggaaccaaaaggtagagtgaagtcactggaaatctttgaagaaagaaagaagacaaatttgaattgtttctccgttacaaaattatagcgaaggcgaaacaagaaaaggaaaaaaagaataaaaaagtaatacattgggttagagttagagagaaaccgacctgtggaaaattctcgagagtttttatttcgagaaggaagaaatggaagataatgaaagagaaagagaggaggaaagggaaaagattatagttttagatgagtttttgtggaatggattgcgtgtggtgcggtaaccacatccacatattaatttcataccatattcctaatcccttttgatttctataattaattcacctcatacactatagtactactcctacatgtagtaatatatatctatttttttgaatcgcttaaacgagtaatatcttttattaagcaaaatatatttttatatataaaataaacaatttttattggtttaacaataatattttaaaaatataaaaatattttgttaaatttaacgggattagtagggttgatttttttaaatatataaatattattattattattattttagattaatttaaattatatattaatatattatttataattttatttattttttattgtttattttaattttaagtagtatgctcaattttaatatttttaaatttttatattttttaaaaatttttaaataatttacaagtgttgaaaataaagtttaaacaattatttaccacgcgtataagaataacagtcgcgcgtgcaacaaaatgta

SEQ ID NO: 379097 - DNA, 8252 bp, Cannabis indica
tgataaaaatcaatacttacaccaaaaaattaagaatagctaccatttctttctcaaaatgaatcatttatatatggaacacactatactatacctcagatttacttcctctccgagtaacaaagctgttctagaactccttctactctcttaccgcgcatttaaggcgatgccctcaactcgattttcactttgtagcgccacaaagccaattctctttcgtccaaaagactggaaatggattccaaaacactgcagatttgcataacttactatcttacacatagagcatttaagagaacatgagccaacatgaggtctacaaaatactggtgcccaatttggccatcgcgccatctcatcttcgctggaccacggccatagtgaaccccgtcgttgcaacggttatcaaaatgccatggaaaagtcatgtcaaagttatcaatcacaccagatacaaccccagcttctctcaacttctccaaaactacccaattgaaagcctccatcttgctggggttgaaggccaacgatctagcatagccacccgtggctattgtggtacggtaaaaaacttttggggctttcagtcccctttgcctgacagaatccaaaacttcagcccaaaatgaagctgcataagttgcccctttggagaatgctctaatggtagaccaaaagattccatcatgtaaacctgaattcataattacagtgtctggaactgtgtcttctgaaaagtacttctttaccaagttcctaaacccttcatctttcaaagaattcaagccttgatagttctgtgtttcgttccaatgaccattgaatatgcttgtgattctaactgtttgagaagggttcttaggattagagaaattcatatcgaatcgtctaggtacagactgtatctcaggtagatccaacacaaaattgagaatgttcctaattgtgtcaacatgattagagtctccccaaaagaaaatccatctgttactcaagcaattccaagcagaatcagctgaaaacaatctaaatgaacagtgtgttgagtaaacccaaccattactctccaaagaccccaatgagccatcacaccatggattctggcatggaaaattcgcagccaggcatcggtaccgcccatcatttccgatttcacaagcatcatttttgccatgcctagtccaccttccagaccaaatgtctctaccaaaatcagattccttacaaaattgaatctttggcagctgagcagagctgctgctattatagaacctgatttgaatcttacgaacctctctatcatatgaaaatctagaaggtgaaaacttaagaccctcaaagtgcctaaacagaagtattatagtaagattgtatgtacccacgaaatctgggtgtacttgaagtgaaagagagtaagacccattaccaaaatctttaactacaggcctagatttccatgaatccccagaaagatcagtctcaaagtaatccccacctaaacaacgaggattcttaacctcatccaaagcttgaaacccaaattcatggatttcaccggctggtaactcgatcaaatcctcaccgtccaaaccaggaatagcaatctcaaccgtcttagaatccctgcaaggcaatcctccaggacttaaccaccgggccagaagattagacgtcacgtttggctctaactcagcttcaacccaactcaaactcaccggggttggaactggaactactacaggacgagttagattctggtccgactcactagatataatagacgagttctgactcaacaatggctcgtaatgagttagattaagaagtgggtcatcgaaattgaagtgagtactcaaccgggtcgagttggtctggttaaccacaatggtggaagaagagttcaaacgcaaaccgccattgatatgagtgagattactatctagcccattggtggtactgaccttcatagtgaggaaatcttggttggacttccaagcttcaagaaaagtccttactgtgcaaccgtcgatgctccaaaccacaaccatgccgacaagaacaagacttgtcagaagcccaaatcgccaatggagcaatggactcggccgaggaagacatgggtttgttagggatgaagaccagtttactcccttctccttcatctgtaaagagtgaaagaaactaataaaattattaaaataaaataaacccaactattatttactcataaagataataactttacagaagagaatagaaaagcttcatttcaagtccttacgattttctcgagaaaattatacgcaagatttcccaactatctttcgagaaaatcaattgttgtagttcatatatagtgttttttatatttttccctttcgtaagagaagaatgtttttcaagaaaatacggcgattagacacagttagaaagaatggttattacatattttgctgtccttttttagtggaataaaatctataatatatattgagagaaaataaaaatagtaatcaaaatcattatatttttatttaaaataaataaataaatgggctacgcggttgacagaagttgggaaaccaagaatacaaggacagaaaagcttgtgaaatgtgaaggtggacagagaggaaattaatagattctatgacgaaaatacccttgagaagttagaaaattacttccaaggtagaagaaaggaatagtgtaagatcagatcaccgacaaaaatgaggtgaagaagaccaggggtatttgtgtcatttggagggttcattattggattagttgttcatttatgtatcaaaaagggcatcacgtgaagatgtcgtttgttgattggtttgcctaaatctaatgaatatgattctatgaacccaaaagccaagccattaagtaaggcatatgttgtgtgttgtgaacttgtgccaaccgaaaaccattgccatgcacattaaatcaacaattaattaatcaattgaagtgaattattattcgtaacattatttccctcaatagaaaaaggaaaagaaaaaatattggttacattatagttagttaaataaatctttatagctatggcttaaccagctagaaacaatgttgtaaatttaatgaagttataatgatgagaacacgtaaaataaaacaggaacgttaattacatataaatacaagttgttttgtcattactttgtcttgacaactttaatatacatttaacaataattaattcattaggatcataaattacaacattccaagaatggttttcttttttgggtgttaggatgtatacaactaattaaatataattattaatttaagatagagaaagagttaaaccttgttgttgtgttggttgtgtcaccaaacgatgttcttgagataattgaagaaattaatgacaagttttgatggttcttcatggatcaccagccaaaaacacaaacaacaacaataataatcataacaatggaatctctattaataagactaataaaggaatgagatatatagttcaaggattgagagaatagttagggattatatttttctttaatttcctcatatttagtattcatgttaattaacggtcttgtttaagaatgcttagttttttattcctttgtattttttgttctcaccttgattccctataaatatcaattcaattttcccaatttgtcaaatatagtcaatatagtaagagaggcctttcccatttacttaattacaatcaactcatgattattattcatttaaattaacccattaatttaatatatgtaaaatttaattaatagttaactattgaatattattgctcattctaaatttgagaagaaaatgagaaatgagaacctttaaaaatgcaatgtgaattttcactttgcaagaagaaaattatgcaattttacaggaaagatggtgtggagcaggactttcatgacatgttaattacaccctttttgacttttgacttttgccttttcttttctgcttttcaatttttccaatggaaattagcaataatttatgtagagtttgaactgtgaagggcctactccactttctgttttatacttttcgaagaatcacttaaaaaaaaagccaaataaaataagatgttaaatccatgaaccgttaaacattatcaaaggagtaattggaagcaaagcaatatgttttttaagttatgctatcttattataaataaagccctaattcggctaaactcagtagaattatatggtttttttttcattgagtataagacaagggaaaaaaaatactgatgcattaattagttgtattgttgtgtttgttagaagtgactagtttgttagagttggtaagccatcacccttaaaagtgctgatgaaaaaaatattaagtgtaccagcatgttatacatcattattatatgattctacaaattagctcatcttagttatttaatgattacaaaacaatttaatattttagcaataagtcaatcaatattttattttgagatccttttttgaacttgaagtggttcagcaattcagccaatatatattacttaaagtaaatacttttctttctcagtgctttgacaaaatatttaattttttatcaaatacaaaataatgggatataggtgcagtatatttatgcttagttttggaagcttgttaatcatattaaattcttaggaattcacatctcaagaacaaccaaattaggtacccctgaaagctggacacttctatgtaatcttgggatacagttggagttaaaggcccaaaaaaatctagggaccatattcatcagaacaagaatgacctttctcccaaaatgtttatatatggttcccaattttgatttgaaacaagactataaagaggtaatttaataccaagttaatggtgtcctttgtggtggggctgaaggtttcaattttccttttgagtgatttgtgcaccagatatggcatctaacaaaattgattttgtagtgtttgtgaaagacaacatggtttgttttggttggtacacttgtatgataaaattcccttgtattgtctatatgttaaaaataacgcatctgtgtaacctgcactacacaaataatttttataatattattaaattctttacgtgtaatgctccataaaattactcttaaagtatgagacttttacttaacaagaaaaaaaggtagggtttgtatttgtggtggctatatatatatatattggtgtggcaccaccaaccccaccaactaccaaccaactggtttttggccagtggcaattaccaaaacaacttaagaatatatgatatgaatttgtgattttgtcattcatttgaattggtgagaattgagttcaaattgttaaggtggttaaggttatattattttacttagatgacttatattaattacacgtacacacgtgcgggatatgattagattaatttggtatatgatacggaatgctgacctaaattgactaactaatacaatctcttagctacaatgccaacttagaacatcttgtaaaataaaacaatatcgatgtgccaactaactcaaattgttttgaacatttttaagccacatatttctcatacatatttaaaatcttcctctggggacaatttagaatcaaagaactcaattcttaaccttgtaattaagaaaaatatttctcaaagtcttgtatctaacacaagttaaaaggaaaaacgtagtatctaaaaagtacatgatcttgtttgttgacatgagtatggtgcattaagttgttgtctagtgttttttcagttagtattgtctagtgtttttgtttcagttagtatttcgtgtgtttttctgatggcttccactagccaacatattggcaatctgaatgatcaatatgaccagatacagttagaggaggaggaagagggaggactactgtgtgatgttactgaggacgtcgaccaaccaatcgatgacagatggtatttagttggaagtttttgacaaaaaaggagtcatcgactttgatttaatgcaaaatactttgacatctttgtggcaaccaggcaagggcatgtttgttaaagaattggaacctaacctatacattttctaattctatcatgaagtagatattcaaagagtcgttgaagggaacccctggacttttaatagatttcaattgatctttaaacgtctgaaggaaggcaaggatcctagctagaagtgtttgtctctatcatcttcatatgtgggtacaacttcacaacctccgaacaggcttcatgactgaggataatgctaggaatgttggtaattacatcgacttgtatctcaaaccagattcgaagaatttcatgggcatttggagagattatttatggattagagtttcagttaatatagagaaaccattgaagagaagaatcaaacttaaaagaactaatgacgactggctgtggtgtcaattcaaatatgaatttgtaccagcattttgcttcatatatggcataattggccactctgaaaaattctgccagcgattatttgataacccactcaaggaaattgaaaaaccttatgggttatggatgaaagcaaagccaaggaggagaaagcaaaggataggtgcacaatggctacgtactgaaagtgaggctgataagcagttctccgatgaagttaagatcccagacgcgcgctgacgataatgcattcaatgatgcatataatttcgtctaggaaaataggggtaatgttggcatgactcaggggagtaatggtggagatttacaaatattaaatgctcgggggaataatggcatatttacaataatttagcaaaaataattaccagcaagagcatgtgagaatttgagaaatgataccttaattatctctgatatgaatagaagacgaactgataaggaaggtatcgagacatttagtgatgaagaggagaatatgatccttgactctattgggctttcaaaaaatgggtgtgcggtggatcctgcggtccaggcccactaaggattatgagcatcctcagttggaattgtcatgggcttgggaacccacgggctttacaattccttaaagatctcgtgatccataagcggcccaagtttgtatttttgtgtgaaacactttgtaaaaaatgacactcttgaaagactttgtgtttccttgggttttaaaggtcttttggatgttgatgttgttggatgaagtagaggtataacattattatggaaaattaaagatgatgtccacttgctaggttactctgatcgccatatagatgttactgttagagatggagacaatggtgaatggcggttaactggctgttatggtgaaacgaatcgcaatctttagttcaagacatgaaatctgctaagaagtctggctgagcaatatgatctaccagggtgcattataggagacttgaataatgtggtaagtcaagatgataaaaaaaaaggtggcaacccatatctcgagtggctaattgaaggcttcaacaaagccttaacaaattgcaatttatgtgattttgaaattgaaggatacccgtatacatgagagaaggggagatggatcgatctttagattgaagttcgattggataaagctcttgttaattaaaaatggctagacatcttcacatcagctaaactccttaatcttgacatttctagttcagatcattgcccaattcttcttattcataggaataatgatgtaattgttgttaaacagagctttagattcgagaatgcgtggctccatgaaccgatgtgtacacaagttgtgaaagattgtaaagccctaatctatagggacgccatgtgtgattttataaactagtttagtactaatagattaattaattataaaaaatcatgataatattaaaaacttgacccaaatataacactaaaaatggatattataaaggcataaaaagcgtgttcagggatccctgttataaatttttttataaaagaattatatacgacgatgactcaaaaatataaaaccaaaatacacaatagatacagtacattctggagaagactgtcacctcatggttgatctagcttttcttttcctttgcttgcaccacatagcacatgtgagtcacaaagacttagtaagaaaaataataataataatcatatagtttattaatcgaatattatcatttatacacaataagaatcaaa

SEQ ID NO: 379098 - DNA, 2494 bp, Cannabis indica
atcaaaacatagaactcactccatcaataatactttgccatcacgatccgtacacatataaatgtaaggtttggcctcaacaaatactcctgcagcaatcaactcctattagattccaccacagatcatgaaagactgtagctcaaacaggtgtggactatttaataaacctatgtttgataacaaaatgaaacaaatgtacaatctaatcttcaaccattctcaaataataaatcagtaaataaccttaggatgttacaaagcatagaatcatactttcaactgtctcttctgtgccaaatctttgggataccttgtttccactatcaacatcacgaagctccacctacaattagcagctcaagtttcagggaacagaataatatagttacaaaaatgtcatactgcaatgaagaataagcagaaataccagcaggacaatgatatcttacagtgaatatgatgtatgaacaaattaatcatatgttaactaaataaattaaaaaatacatgttcaatgaaaaaaccaaaaagaaactcattcaaattgttctagtacaaatcatgatataaatatgaaactaaagaccctaaggataaaattttgactcagtgtcaacaagcccactcatatagtcaatcagcagatgctctcctcacagactgatgcaagcttctagcagcagaaacaaaatctaaaagcatccgtattttaacaaaagctgattagcaagatctggttttgcacagctacactactaaaaatgttttgtcacagttttgaaatttgcatttctataccataggctctaaccttatttgtcaagcaaacaatttttttttctccagttttactgttttcacaatatgtctcatactaaatctctattcgtctgtgcccatttgtgcgtaagcatagtctctgcctcaaactttccatacattgtaaataaaccattatggaacgaagacttcctatgtgaatttacaattcaaattaatcaagtatttaaatcctgacttttaacccctaattgcatccaagattttcctctttttcattcctcacttcttactcacacacaccaaaaaaagttctaatgaaacattatggctgatttcaacctcatcacagagtaaagacagcctttttatgtgcatataggtgtaatgcttcctatttcacaagctcacgaacaaccccatgcttttaaaacatatcattgttttcttccttattcacacacacatatatagttataacctaccatcttgattcttgaactactactaggaagtgcatgaggaattcaacccagtgatggttatctcttctcaattgtcaacaatataacacacaccaatccaaaatcacagattgacaaagcccaaaacttttaacagtaaaagtgttaaacttcaaaatttagcttctataatgcagtgagtgaaatgttaataataacaataacatgataatttgacaaaaaaacacacctttatagtagcttttccccttccttcgtgagaatggtctactttcacaacctaacacgaataaagccaaaatttcctttaaaacattacgagttatggttatgagtacggtataaatgaattcaaaaaagccagcaaaattacctcataaatacggtctgatgcagaatatcataaaccatttccaagaagaagaacaaaggttattaaatagaataacaaatttgatcaggaaaacaaaaagagactaataattatacacacacctttcttttcaatgacatttccaggtctcaactgcatatcgaaaaatcaccttataaatcaatgcgaaaattcaaaagaaaacaagattaactcataattttttcccatgactcacactagatccgctagttttcactccacgggttggaatagcgaaccagggagattgaagcagggtcctctggaaaataccgatggcggcggcgcaaccgtcacggcctggtgacggtaacgggtccgatgatgagcgcgacacagtagcatacgaagaacaagaaaacagagaagtaagagtggtcctcagagttgtacaaggtgaggttgaatcactgaagagagaccaagaaagcctcttgctcacatgagccaaagctcccatttttgtacggacacttgttctcagtttcgcattcgaagcattgggctgccatttttatagtgttggcttgaaaatttacacatgaaacgatatcgtttttaaataaatgagttagatttttcttaaaatataatgaccggaagtttattttcacgactaaattgcaacaaaactcttaaaattctatagtattagaaataatattttagtcaaattttttctatgattatgtaaaatatagttatttatgtcatcctgcaaaattttaagaaattcgaaaacctttcccacgccaaaaactgttttcaaacagtgtggtgcacgcgtaactattttattttatacgagtgt

SEQ ID NO: 379099 - DNA, 9158 bp, Cannabis indica
gcccatacaaaagtggcatgcatgtttctcatattaatgcaatgaaagtataattttctcagtttagtagcaatagaatttgggccgtctatacaaatagggtggttaagcatgaatcaaggccaggatcctttaaataggtaccagaaacctttctgattcagaaattatacaactgactatatagttttgttccattgcaattacttagctttttccaattatttgtgtatagttgatctgtaaaggacttcagtacggtgtatatttcctttttcttgtatattatatgactgtactgtgactatgagctcacactattaaatggagtagtactttccaaagacaaactacacaaattaaaatttgaaaacagtaattcttacaatagtaagtactaaagatcagacaataatcttcaacttttatccacgtgtctaagatagaacaatgagtaatgaaactgtcaggggcccaataaagaatcagatagaaagaatttagtgggagccttaaagattttctacaatatttgtgataaagagtgttggtgattttgaggaaattaaaagaatttctagaaacaatgagtgtaatcaaatagtgtaggagagattaagggtattatgtattttaagaatttggattaagagctattgctcttgagagaggggtggtctcttgaataccaccagagatagtgagtgtttgcatttctctttaaaagtaaatcaaaaaattattgttctcaatcttctactgttttttgagagatgtgctttgctcgtgacggtgttatttggtagcaaatcatcacaattagataagagattacctgaagaattagatccttggactcattgtctgaaagtggagaaaagtaaaagctcattagagtctcaagaatggagttcctcgtataaatttgaacatcatcatccaagttcaaccccgcatataggagacgaagtatccacaacctttctgctctaaaattaacagatgtactccagaagaattcattaaaaagaggtacattctgcaatatgtaatttgaactctattaaaacaaaaagggaaaaataaaatggaaacagtacataatatattcatgtcagaaaacccataccttcatactcaacttagacgaattcatcaaaaccctacttattgttgcataatgatcatgtgaaggatctaacaatataaatgatgcctctgcagcaaatattgcaacaacagagggaactctctgccatggtgtttctataccattttgcaaagaactaagcaaaagtcgtatccgtgtcacttctttccgttttttacatagctgaaaagatagtttcaacattaatcaccaaaaaactttaaaaaaaaaaaagacaaatgtcgtggtcatcctaaaaacagaattaaacagctctacatcaagtacttaacaaaaaaagagaaaagacaaatatagtaaaccagaagttactacctccagtgctttcttaaatatcccaagaatactataagccaatcttcttatcccatcatcaggtgatgacatgctaacaaatgcaacagcaagcaagcctaaaccagcaaactccatgggttcaatatgacctgctgataggctataaagcgagaagtgcaagatgaagacaggatcatatcgctctagatttccatcatcaggtgtactagtctgggcataattctacatacaaattattgagaattatgcaagtaagactaaacagaatacaaattactgaaagattgtgtagctcaacccaataaatacttttatcattgaactaaaaataaaggacgtaccgcaagcatacgggtaaaatcacttgattgaaaattttccaaggttatagcctcattagatgcaattctatcatagggaaaatatagcactgtagaagcacatattttggggtcaataggaaggttatctctaaattgacttctatgacgttcttttactgcttcatcatcagccaccacattagatggatcatgttccaaagctctttctttttctatttttaaagcagcactaccccacaggtgatcagaaccagcaatgttttcagcctccaatccatcaatagattcaattgccaacatcagattgtatatctccatatcaattttgctaagctttgcaccataggaagacaaaagcattaaatgcagacttctgaaatttatgcctacacttttttccaaatcaaaagccgactcatgtggtttggatggaaagagtgtccgcaacaatttaataagctccaactttctcatgtacaacacagttgattctagatttaaataactgctatcagatgcattattttcagtaggaaaaacaagatgtctcagaacaccagatataggcctcaaaaatgccccaagttgcgaactatttgttgagagagagaccgactgaacactagactcaaattgggagtgggaaagtagaagctggaggtaaaagtcacgtgaaaattccccatcagacaacagagttaggatatcttggagcattttcaaagttgtgggatcttcaaatcgatatctaagagcagacttcatcaattgctctagaaagggaatggattctagctggataagagtctcatgcatatctttagttaattcaagaatacttcttaatatgaaagcttctaagtatccatacaggggcaaaacatatgtgctcttttgaccactataagaaacagaagagaactttttaacaatcaattgccaaattcccactaaaatgttaatgaagtacatttttgaactttcatctctagttggccccatttccatctgaatatctttcaaaactccgctttcttctaatggaagtaactgactttgattacaaatgggaaacaacaacatccttccaaatgaaatctttgcaataactcttataataaaattcaatgagtcgccaagtgagtaagaatcaatttcagcaaaatcacagtccatcagctcctcacgttcaaaagaatccaggaatatggaattaaatagcttcagccgcttcttcagttttactgaatctccatttaaggcaaagtgatactgcaacatacggatggcttttccaagaagactatcatttacaagattgagaagttcttcagtagatgatggtacaaactcaccatattcctcctgaaacacgtcactaagcacaaagctcttccaattgacaagacttttcaaaagaaacttcgaataaaaacaaggaatacttctaaagtgcttgtaatactgcaatccatatttcacgcagtatgaattcaagtatgacaaagcagtgggtagaagcatcaaataatgctcatcagaaggagcaaattcagggagctcctccacaaatttacttttatgagatatatctttgttcatcatattaaaaaataaatgcccaaagattgatatatgaagggagctgacatcagtgagaaaaaacaataacttagctctggtctttgttgtctcataaatgcaatgggaaatgattttcacagaagtgtttatgacaactcttgacaataccaaacaagaatgaaaatcatcgtgctgcacatatttttgtctgtgtgcagctttaacagcctcaagcaagcagagatccgcataatctgttttaactttcaaggcaaactttgtcaccagaaaatagatctcctcaacattctttgcatttctattcccttccatttcccaaagtatattgtatttttgtctctttgacaatggctgcaccaaatagctagatagatttctgaaagcaccagcagcaatgcaaaacccaaaagaaatagcagatatcctgttagcattccaatctgcataagtatccatggaaactctattgaacatccactgcactaaatcgagcagctcaaaggggcctataaaatgattcagaacatataaagcatagtatggttggaggaggggcatcatattttctgtgcaaatgcataccttgaacctatccttcaccgcttcaataaccctctggattggaacattaaaaactttcctaagatgtttcccaatgcctttttcatgtttggtattaaaatgctgatcgtcgcaaagagaaagaaagtactcataagctgttcccagcatatctaaaacatgatgatctaacttatgaacgctctgcctggataaattaattaaagtatccatattgtcaacaaggcttgtatttgacaagcccatctcacaggtaaaagggcgagaaagtgatatctctactgcgggatgacaaaagatagtttcagccaggtcttggacttcttgggttgacaaatgaattctagtagttctgggagaatcaaaatccccattcaaatgtaactgacccaacaagtcttttaagagaataaagcaaacctcagaaagctcttggactttggctaaagggctaaccgtataagatgattgtaactgatgaatccagaatagcaaaaggcgcagataagagacaaagcagttatcaaatttccactctgccagtttagccaacagaaggtcttttattttcacggggtgtgtggaataaggaccatcactgcacataagggaaggtaataatatatgaaaaggtgtctgctttaaaaagaaactaaaggtagctgcagcttcatttgcatcaaaacctttgtcacaaatcatttctcctgcaacaaaagcaccatcggtatctccgccggcatcatctgttttgtctttgcttttacccgatactgccatttccaggccaagaagaaagatatcaggccataaattagaaatacttgccagaaacgtatgatcaagaaagaacacagatggcattagatatgtggaaacaccaaaaagattttttaatacagtcacaacagctggaaagttttttgaaatctcttcaggcgttgcgcaaatgattgaggaagcaaaatctttggtcattccagctatttcaccattgttcccactggttatgaatcttttaactttatctccaaaagatctaacagctggtatagctttattatcaatagaaaagacagatgtttctggatgagatatacattgcgataaaagaaataaattcttcaatggtctccactcacagaaggcagcaccagaaacatcactaacagaactatgttcacaaaatctctcagataacattgaatcaactacagcagacagtaacctcgcatctacctataaaaaatatgttccccaatcagatttttttatggatagcaagcaattattaaactaaaatgctacactgtttacctgagtttgcaagatatattttagtgtattacccacatacaatgatatcattgatttttcaggcgatgtaaaagtctcagatttagaatcaagcaaccttaggcacttttgcagtatacatacaacaagagggctgaaatcaggtgatctatctgccagaataaagggataaacataagacaagtcataggtcaataaagggtaaaaaacatcaactgaagctaaaatgcctctcacttctttcatagtgtggccacttccatacaactacaattaattatataagaaataataaaaaagaaataatcaaacacagcaatgcactagttactaatctaacacataaaaaaatgaatgaaccgatcccagcaaacaatctggcaaacataactgtacttttcatgcaaaaaatcattacaaatcaaatcacaagtagatagaataaaatagtcaccccagcatctaataaatttctcatttatcttcggctatattgagtaaaattaagaaattacatatacaatctccaataacggaaaacaaaattgctaaaactattttaatatatcatcgtgaatagtcaaaataccaacttttctttcatggccttcctcagccttaccatgatgctacacatctcaaagatttgtccttaatcatactctcatagcacatatttgttttgaaatccatatcacagaataattagatgtctcaactctcaagtttctaaaacaaattataaactgatgcagaaaaaacaacaaactgtagcatgtaacaattatactcaaaagtgaacagaattacttcaccacactaagaagcacatatgactatgtgagttacagttaccttttagcccttctaagttgcaggtacgaagcttaaccatgtcccaatatttgaataaattatttcccatagtagaaattgcatcacataagaatgagatgacaacctgacacatgctctgtaatacttccacacctggactgtgtagatcagaatttcttctgccataacctggtataaacaagaaccatgatctaatttcatgaagatttctatcaaaggcaccagtacttagcatcgctgcttgtgctagatcacaagctttattcttaacttcacttaagggtgaacaaattaacaatggcataaatgactgaagatgtttatacatcaaaggaggagccgatacaggagttccagtaggagaccatacaacatattctattagcaaagacaatagagaatgctgtaagttagtatctagtcccaaaggatcaactaggagatttataaggaactcgaatgatccctccaaaacagttggcattactcgctgcaaaacaagaatcaattacagtgtaagctatcctgaaagaaattttgaaaagattattcaaattctgggaaggttagtatggataacactaatggaacttacaaaataagttttgagagcatcaaaaagcttggactgaaagtatatctctgcatctctcatcgcaaaagtagacatatcgcacaggtgtggcccccaaatttcatgaagaatttttacaatatcctttccatcgtcaaattcatctgcactaggtgtacctataattctgtcactgtcctcaaatggagcaaggtctgtagaaagatttactccacccacaatgatatctgaatatgtgttgtttatatgatctgttttcaatttttttcacatcatctctcccctgcttccctgagtctgatttcctctttagagaactgacacgatttttggattggctactcagagatgaaagtagagtcagcagaacttgtggatcaggaagcaatgttcgaacctcattttgaattagttgcttcacttgaactacatcacttgaagtaaaactactttgacttttatagccccaattaagaatctagcaacttcagtgcttcaaaaagcagccgcaaagttccatgcttaactagaaaatctgagtgaagcaaccccttattgattactgaccgtgagaatgaacgaggacacaagcatttcaagatactctgccatagcagatcatgaggtctggaagcaaggaaatcaaactttaggccatttccaactgaggagatcaaatttgcagccaaagtcacaattgaaaacctgcaaatgacatagtcataatagaaacatagagagcaacggggaaatacctaaataacaaatttgtatgacaaaagagaaaataggaaatgcaataaaataagataagatatctaaccaattaggtgatgcataatcttcaaggttgtaaggaaactcttccatatatgcagcaccgaaagagggtctcccactaacaatagccaaaatcaagtctctgtgaaagatgctctcagttgcattcagtttcttcataagccccaaaagacgttttggattaccccttaaaggacttgggtgtcttgtaagatcaggcatcaatccattacagggatcagtacagaccaaaacaagaatattgtatgccaactctgcagcatagccaccattaccctttccggaaatattaaccaattgctccaaagtgccactaccaaaaagaacactcctaagacctggaggaaccaatgactcctcaacaagaatcttatctctcaaagtggacagaacataaacaacagtctcatcgtcatcatcattcccaagcccacgaagtacaccagaatacatttccttctgctgcaacacccacctcaacaaccctggcttccccacctctaaaaatgacattgcaaacccaacaaaagactttctggaagaccgttttgctttcttctcattttgcttcttcttgaactcggccagcttagaaaaccctttgagtttgaaatcaaaattcttagcaacatcagaagccaaccctgaaccccgccggacaatcgaagccataagccgaagtgctgcattttggctctttgtttctttaccattgagctctttgtacacatcttccaaaagttcttcaataatcaatcgagcaaacttatcaagaaccctacttataactaaaccctctttatcattgggtctatacctcccatcaggatgactcaaaataacaaaaattaattttaaaatgtatgataaaccaggttttcctcgttgaagcttccaagcatctagaagctctgagcacctacatgaactcctcacataatatttaagcaactcacttccagagttacctttaagtaacctgatgaactcttttgtagcatctgagcataactttatttccagtgaattaattttatgtaatagttctctgagtttagcctcatgattcacttttagctcaaactttggagccccttcttcatgaagcccgttgtcagaaccatcatccaccataactgtaataaaataaaataactttggcacactcgctaagctaaataacctcttcccagactaggccacacccgcttctaaaccccgctaccgccaccgccacaatgcccaaaacgttcaatcacttcccgttaccgtcgtagagagattaaaaatataaaaaccctaacagttagggtagccgaatattattgggctatttacaaaaagggaaaataaatatatgttttgtggcataaaaatttaattagcctatggtattttttataaaaaacattaagaggaatgctataaaatctttaaatttgtgttttttttctttttctattaaataaaatactaaaataaataaaaaatgatgtaaatgttatttttttacagaaatttaacttgttattttatttaaactact

SEQ ID NO: 379100 - DNA, 4779 bp, Cannabis indica
tcatcctttgattattgttttgtagtctcagttttcctcttctaatacatattcagaggacaaaataaaagagaatgatctttgatattcttttccaaaaagaaaaagagactaacattcttcctttagaagagccaccatggggacaaagcacctctagttatttctaaaaataaaaggaatcaaaaaataattttgcaattaaaacacatgtctccaaaataaaattctataaacaaaagataccacaaataaatgaaaaataataaaaaatagcaacacacgaaaatattacccccttatttttgtattttttttttcaattcattctttttatgataccaaaaaataaaagattaacaaaacactaaagaacataggacataaatcaacactttagagcaaaaatactttctaagaaattaatgaaacaaaacattcaaaatcaatataagtatttttaagaaagttcataagaaaatagtcacccccttttattatatattataaataaaataaatcttgattttttggaaaaaatgagtttgctcattgagcaaagagcctttgagaacatttgtagtaaagtaggctatcacatcttttgtggttactttcctcacttgatacattatattcaaaaacctttgtaagaatttatgaggatgctttccctctttttgtactgtttgatataggtatttcctttcttttctacttttaacattttcaccgtattgtgtgacgaagagttgtgcgagctcctcaaatgagccaattgatcattctcttatctgcttgaaccataactgagcttatcatgttaaggttgtagaaaatgcattgcacttgaattggattacttgtctccaactccattttctgttaaaattggagcacaagttctaacagatattcctcattgttgaacaatgcaaaagttggtatggtaaattcttttagtttgggatcgtcgacgatccacttagcaaaaggatacttagtcgcgtttctcatgatttcaattctattgaatcatctagctccacgatccttcattctcaattttcgccataatctctttcatttcatttgtgacatatcatctccagatcggtcaaaacacaaaggttgcgtctgtgcggtgaatattggtgccttttgtgctacttttgttgaagttagaccacaatctatccttacttgctcatccttccttcttgattgaggtacttttggaatatttgttctgtgcttacgtcgttagctcattctggcacgaaaccatagcttttgcttgctttggttgcctttctcgcccttctaacacttctttctctttaaacgttggtgcaagctgatttctcatttctctttcagagttttgagatattgctactggttgcaacttgtcaaaaatatgctgaggttcagacccactcatatacccaagatcgtaatgagtttgagttctgttcattttggccctatattggccatttcatccataaacttctgcataatgcggttaacatcctcttgatgttgcctattctcatgctaatcttgctaacatttctcttcggctgcacgatgctcttactagaacttctcttctattcattatttttgtctcacgtagtcgttctttaattcatttctttcatttctattgccaatatagtagccagatcaataattggattcgacatatctcttttgcttggagttgttcccttctctgacaccttcttaaaacccaacttagtttgtatccttaacttcagatttttgttctagagattcccgtagatggtgccaactgttgatgctgaaacttagctccacaaaaaaattataatatgactttgaattctttacactaggttcggtctaatcaaaatatagtctctgtcagtttgcacaatttctctcaatttactcaattttgtttgggtcatctgcttctcgtgatcaaagtgttcttaaggatgtattcccataaagttttgactagtcttgtgtgagaaagaattcgtctcttttttgaatgatgagatcttctatttataggcatgcaagatcgttaactttcctttttatgcatgttctaattggcccacatggtttaatactatttcgctctcttgttcactttctttttctcgcttttagagcccgttaagtgtttgttctttactttcatgagttttgctccagatcctctcttattttagttttggttccctttaaatgaaacaatgtgtttctttacaaaccttccacacctcaatatcagttcttttttttattttatagttttagaattacttttttacccctaaatttatttttctcacttaaactctctatgggctaaaacaagcctcgagacaatagtttgaaaacatttcacatgccttgttagatgaaggcttcacttagttagcaactgactattccatgtttatgaaacatttcaagatgagttttatcatcttgctagtctatgtagatgatgtcattttggccagtaatgacttgtgtctattagaagctctcaaggctagactaaacactcattttaaattaaaaagtcttggacttgaaataattttttggccttgagatagtcagatcgaagaaagggatctttgtgtcacaaagaccttatgctctccaagtacttgaagatcttagctaattgggatgtaagcctgtcaactcacttatggggggaaattaaaacagtgtcaaggtgagaaagacacttatacatattcaacctcatacagaaaagtgattggtaagttacaatacttaaccatcactaaacctaacatatcttactcggttaataataagctgaatcaattcataaattctcctcaaacaaaatacttgcaagtagcatacaaagtcctgtagtacataaaatcatgtcctaggcaaggtatttttatgtttgttgcatcagacctaaagttaaaagcctatatagactctgattggacaaattgtattgagacaaggagatccatcacagggttttgcatttttcttagtattttctctaattttatggaagagcaaaaaagcaacacacagtgtcaaggttatcagcagaagtagagaatattgcttgtgagttagtttggatcatgtctttgcttaaagaattaaagatagagtataaaggtgtcctacaatgatgtactgtgacaacacaactgcagaacatataacaaccagtgtggtgtttatgagaaagcaaaacatatcgagattgattatcatctaatctgagagaaggtgcaaaaaaggagtgatccaagcaactcatgtttcaactaaaaatcaactttccgacttattgacaaagctttgttctcaacacagttcaaaatgcttaaggacaatattagattgatagatatataccataagggggtattattgtgttagttagttagctttggtaagctgtaaagagttagctgtagattgttgagtgtgttgttggagctgaattagcagtagactcatctcaatttgttactagagctatatatagatcataataatctgtattctccctaattcagttcaatctttaaattcatttttttacatttttttttactgaaacactatctaattaataaaaacacgaacggagatacgtatatacttattatgactttcataataagctacactaggaccacgtacataatttaaaaataataacaaatatggacatataaacaaaaaccaagttttgggtttggtgaaaaacaccacaaaagaagggagactttttggcagcatttccaagcaaatactgctagtttactcaaataataaataaataaattaataagataaatgataataataattatttaatattactttatatagttctaccatgtgaaagaacagtgaaagtaaagtagatcgtatctttcttttcaaaaaggaaggtatatgtttctaaatttgtttcttttctaaatgaagcctctctcccaaggagctggccctctttggtaaaaataaattaataaataaatcggtagtagtcctaaaaaaccctaatggtattggtttcgaacatatgggagaaatagtaatattattggtgtcaaagaactcatttccaaatctatatatacaaccataccatatatatatgtacttttgttcttggattcctttgttataatattgttatatatatatatatatgattatcagtttccatataacatgtagttttgcttatatatagtctataaaaattataatttagatatataagatataagacatcgagtgtatctatagaaaatgtggttgtaatgttagtgtaaagaattatagatagataagataatagtttcaaaaaggtcattgaagggtttattttattgttatcttgatatgtatatatgctttttcttttattaagagtcatgatatcatgtcttaagggaactaattcccttaaaaaaaaagctcatcactattagtttgagctgatccagtccgcatcatgttaattatatatataatactattctaataaagttagagacacttgtatggcaaagaagatattttcaagctagggtttccatgaaatcatcaatctatatatagagtgcattggataaattaataatctcaaaatagctatttgtatataatttaaaacacaataataatatataatacaattagacatgtgtatttacactataaaaaatcttactt

SEQ ID NO: 379101 - DNA, 1561 bp, Cannabis indica
gtttcacagaactaatgtaactttattctactttttaatgtactaaatacaaagaaaaaatgacatatgaagaactcacatactaattatctaatgcaaaaaaaaaaaaaaaaaaaaaaaaaaaaaactttaaaacaaatataaataaaaatgatgaacaatagacattaatgaatcaaaaattgagaaatttgtgtcagttatgtaaagtgtttctcaaaattaaggatgaataaatgagagattataactaatactgtaattatgtgtagttataagatagctaatgaagtgccaatatagctaacatatcttagtttcctcactctttttgaataaaaattgggatgattatataatgtactattttttgtaaaaaaaattacagttttaagtttaaaaattttcaacaaaacaacaaaacaaaaatgctcaacttatacaatcaagaatatgaaatatatacaaatattctcttgttaattttggagaacacaatttcatcactattccatatatgtgtatgagtgtttattgcactggatccatttggaatgtagaggccatttttttctcctctgattttttaatccatttcaaagtttccaaaacaatgactgagagaagaactataccaagaacaaatccataaccaatcttccaatcattcccagctcccccaatttgcattcccaacactatgttcaatgctccgaaaagaagggcaagtcttcccattgaatgatggtaccaattccagtacctacgaatctttgcttccttgctcggtcgaagaaagaatgccaatatctgcacaaacaaacgaacaaataattaaactaaaatcatttagatttttcgctttatttcaattaggagtgttcgctgtgcgatttaaattccttttgatacactaggcttcattagaatataataactattgctataagtaccaagaaatgacttgaaaccttatattttgtgagaacaacccaaatgcttaactaattgagctataacatttgtattattattttaaatagacctgaatctaaataaaaaaaacaaacgaattagactaaaattatttagatttttttgcttaatttcaactaagagtgttcgttgtgcattttgaatcccttttgatacattgggcttcatcagaatataataacaattactatgtaagtaccgaaaggattaaaagctttagattttgttaaaaaaaaaatagcctaaccatttgagctaacattcatgattactacattttgatattagctcaaatggttaaattttgtgagaacaaccaaaactaaatttttgaaaagtaccggtccttatgtattgggttaataatcaaaaaggtagtggaaagaaaaaatctctaaataaataatgtgaaaggactcaaaacctttagattttgtgagaactacccaaatatcattcatcattattactttaaatagacttaatattaaatagaaatttacatggtatactaatttttgtcatttttttacaaaaatactatcaggtggtattttttactttt

SEQ ID NO: 379102 - DNA, 4607 bp, Cannabis indica
ttttcatcatcaacacatcaaaatcaagtgaggaaggccactaagtcgtgtggaaaccacctacctgacattttccatctttgtgcacaagaaagtggcacaggtcagtcacatccaatggggatgagtttctttggccaaagtatatttccaacaccaaggtaccaaaagaaagtgagaaaagttacaaagaggtgtagaacacctatggccgacttgtgccatcattgtgactcgaaagatggcgcaggtctctcccagtaattggccaagaattaatgtgtccaaagtgttttgctagcatccacatggtaaaactaagcatgaaaaaacataaagggattcccataagccctagctgacccgtgccatcttttggcactaaaagatggggcaagtctctcgttaggatttttgatgtcaagatgagatttcagaaccccaaaacctccaaaagaaagttcaccatcaaaaaccaagtcaaaacccaccctgaggtgtctaagaacatgtatgaccaacctgggcctagattaggtggcatgaatcatgatgacatggcacatctcagttttggaggtgaaatgtacttactaccctttagtaaaatagacataagtctctcaacttttatccaaaagacttggttcaacttgaatttgaaaggtctattcaaggctgatctatgtgtgtctcatggtcatagcataattttaaagttatcgtgctcaaaattggatgacaagataggttagcacactttacttaagaattaattggttttattaagtgtggaccataaggggatgttaggagagttatgtcacaaaacttgtgactctctatttacggtagtcaacttgtgccatcccgtggtgaactttatccaattttgcccttctcaaagtacaatgtcatataagcaagttcaagagaccatgaaaataaacatcttcaacgaaaatccaaataattgtggaacatttaccaagagtatgggatattttcataacataataaatatacgggctttgaagtgagatatcccaaacctaggcctatataaagacagtgataaactagggtttgagacggcaaaaatgacctttgacctgctgacctttgatcgctttctagatcttcaagctcttttttgtgcctagaacacatcatccctgaagaccttctcttttcacaatttccttgagttcttcatgttggtacgacactaagtcttcatacaattaccattaacatatacacttaccaagaataagagaccattctctaatctcacttccattggtgcattgtttccaagaacattaccaccagtattattatcaagtttatggtattggatctcccatgagcattttattcatgagcttcgatatagatttttcctagaaatctccttttgtactattatctacacactcggatgactttgcggggagaaataacatgtcaggcatgtctttcttagcctggaatatcccgatcaaaaggatgatccttaggcacgaaagactttttcttagacttcttggacggatataatctgtacttttgaaaattcaccttcttggctagcacaaatatgtcccaagcttctccaaaaattcccaagattgcacgggccctatttcttagtgccaaagtgtataaggggcggtaaaagggttcgacatgctgaaaagaaagatggtctgcctcgagcccttcagtaatgtattaatcgatgctttatccaccaatcttggaaaccttcttgtcagtggtatttatcaaccatgcaaattctagctggaaaaaataaaaatactcggaccatttgtgacatttgtttgacttaagatcaaataaccaataatgtcatgaggagaaggcattccccatccctgctcaacataaacatcaacagtgcggataaaaattttattccttgaagacttatatgtgtcgggaagatcccgtagtagttggcttccttttggaagtaagggtgaaggggtagaagagtagggccccaaaaaggcacaaagccattcaccatggtatgaggcaattggtcctccctcggcaagaatgacgcaacatcttagacccaacctttagcaaagaggttgtttagcctttttacagttagcttcaatggtggtgattcccagtgcagtagtggcttagacttgagcaacatcagtattgcctccaccaaatcctcataaatggtatcctcaccaaggactggtatctggctagatgaggatacaagtttaacggcctcatcaaatcttccatagggaaactcttcatcaacatcatgctccacttccccctcaggagcctctaggttctcatactcatcctgctccgtgctttcctcctactccttaggctctacgggtactgcggtttgcctgacaacttccatatacctggcgatgtgaggattgttaattgatataacatagatagttttctttgtacgagccagttttgacctaacctcaaaaataaatctttaactatgacgagcaaccatgactgctatttcatcctgcgcagagcttcttctgttgaccaacatggagtgtatcctatacgtcttccctctgtacatccacgggggtggaagaaatttcctccaacttctttttaactcccacatgaaacgcccatacacttctccagcgttttggttagagtagtggtggtgttgtgtttcttgttctggggaatcactgctggcttactactagagaaactgaaactagtggaagaatttctcggagatgaggatgtatgctcagagcctaggttgattcttatgaagaagttggagcagttcatcgtctattcaaaaatcacctcctcagaagtcacttgggttcatctatgaagaagaagaatagagaggttagtatccaaataggtttggaacgtccctccaaaagaagaacatctcaagtacttcgaatagaaggaaaacacaaattaaaataaaggaaatccgtcataatgaagaaacacctgtgcaaaaacagatcttaggattttaaaacctagaatcgctaaagagcataaatagggaaaaagagacaactattcttgcaaaaattcctcaccaaacattttcgagtcaaggcgcatgattcttgggtttatttttcttttcttttttaataaaagtaaattcaaagaaaacctagaatctagcaagccacaacgaaatactcatatatttatgtagttctaggcatgtgaaagcgaagtaaaaaaaagaattcaaaagaaaaaacttactcactgttgcgtcgagaataaatttatcttggtagaaggtctggacgaagaatgaagctcatgcaaagtaaaaaaagggaagtctcgatatgcaattgaaattaggttttgctcccaaaaactgccaaaatatataataatcattaaaggtctggaggtgtacaaccgtcataacacgttttcccatttctcagtttttgaataagcattatatgtagatatttaaagagactaaagaagatacacacgtcaaaagcagggcaaatttcacctctagtaaggcatgtgaaccctacacgtgtttccaacaatgcgaccagtagttctcacgcagacttggggaactaatgttattcaaatcttcccacaatgtgatgtggcactcaatatggtaacaagtattaagtatattttcacctagacgcggtatactagttcaggttttcgtccagatgaaatcagagccaaaccgattaagtttagttattcagcaggtattatctaagcaagttcaatgccttgcacttctctaagcgaatcacatacaccaatctgagttccattcttcgcgcagaagaattcagtaattgaagatcttcaattaagatattttccttaaatttctcctcaattatagcttaagtagaattcttattttaatgggaatgattatatctgattgagagagtcgtgggatttaatatttagtttgtcgaattcttcgcctatatttacgggacatttcatcctgtattttccctatagtggagtgcgattttttttttttgacctttctaaagagctattatgctgctaaaatatttgtaagctttcttgagactgttaagaaactcacttggccgaacccttgtgatttttataattctctatgtaatacaagtaaaatgggagtagaatattaccattatcacgggattgaacctctataaattttgtgtgttcttattgtttttttattattattatttaatcattcaattcgatcactataaagacgtagcgtcgtttgctaaaactgaggtcaacaaattataaacaatatatattttggggaaatgcccatatatttgtttagtttaaagttagaatattagttagatctccaaagtatcctttcaaagttctaaaatgaggatttcaagttcttaaatatggttcaacatactctactgtttttatagattgtgggtctttaatatgtttaatattagctaaaattaaggagtataatattgtatgttagtgtgtatattctagtgtttccatgcgttagctag

SEQ ID NO: 379103 - DNA, 3319 bp, Cannabis indica
aaaagaaggaaagaaaaaaagggggggaggagggacatctttttgcaggtgaaattttcttaagtacatagcaccatccaaaacagaaatttaattatcatacatgatctatgcaaaagatgatcatatacctgcaactttgtcaggaatgtatttaagcgcagcccaagcatgcatacctccacttgagtgggctagcacccaaaacttatctcgaacaccaacagcattggctaggtgcagcatatctaatgctgatgagttgagatttcggctggggtgagggtcactctccccaaaaccaggaaggtcaaacgtgaccaagcgaataccaaactcttcaagtagagacaacttaatcccaggtataccttttgaaaagagaatgaagattaaatgcttaattttccccaaatctagaaatttagaaactcttcaagtgaattgcagtatcataagtgccaatttataaaaatttagaattaagggaagaattttacctgcaagtcgtgatgaaaggaaagaatgtggggtaattatagaaaatctagctatgtcagctgggacaccttgttcttgataagccatatgtctcccgtccggaagttgtatacgagtagcatttggaggatgtattctcactttcttcattggggccatgcttccgtgttggttatttacattaatagctgcacatttttaaattataggtagaacaaaccacccaaatatagcaaaagaaaaaccaagttcagtcagtacgaattctccacaggcagtctcaaggtacccagataaagctttgcacattctagaacagactacctaagttaggatttagggaaatagctaaaaagggaaaagaccgtacaaacagactaaaatcctcagcttatattcacctctcctgaatgcttcaaatattcccttttctcttttattaatcttgtgtggaaattaataccagttaattcttagaaaattataataccgttccctgccagcttaggtcatacctaacttctttaacattatttaattttttttttttattgactgtgacttcatcgaagcataataagaaacgaagaaaaagcaccaacaaaccagataaagaaacacaaggcggaaatgcatgaaagcccttctatttttcacgttattcattgggagtatgtaaaaacaattatcttttattctacaaaactacattattgttgtcctgtatcattcatgatcatcaaagtttcgaatcaaataacttaattcaaatacaaagaaactcaatcacctagagaataaaaatcttcataaaccccagaagacccacgagtagtttacctgctagtgcgaggaaaaagacaaagaagatgacggaccaagcgtgagccggatcgcgatcctcaggcaaaaagtcattgaagtaactcaatttgtccgaagctcttgcgatcggcttctcaagctttcgcacaatgtacgaatcctcagtcaggaagctctgctgaacaatgtccttgcatcctctcccccaaaatccaagagaatctcgccccaagcgatggcgaaacctttcacctgttccttcaggctctcgtctggagcctcctccgatttgtcgtttcgaggctcgtcggaggaggaggagacgaactcggtcgatatcgtttctgtatcaaacgacggtgttgagagaaggataggatcagcggcgtaccgtactccggtgtcctcgataaaactagcgaattcgtctcgccacgtgttagatcctcttatctccgccatgtttgttccccactgaaaagagcatacagttaacgaatatggaccctgtgagattgattaggtaatagtactgctacctacagagctatgtatatatctatctaagagagagacaaatgtcttggttttagtaaagaaaattcagaagataattatgtcaataaaaagcaaaaattagaacagagctgaaactgcaactttccaagcgtgacattcaagctacttttgtttattccattccattcaaaggaataattataaaaaagaagaaaaaaaggaaaaagtaacagttgaatgctatcaattaactttccaacactgaaaaccgtttggctactctgaaaatttcatattcaccatcaccaaccttttctcggcaaaatagactggttaactaattctgtccgccattacttattttagaaggagcttttttttttgcctttaatgtttcagggttttttgattaagacaagaagatgaacttgagtcgttgatgatgatgtcacttatagaatgtgtcacagggatcaatattgcacggtgatgatccttccacgtcaccaatagccacgccgtacggttaacggctgacaaccggtttggccggtgcgtgtcttgtggtccagagcgtgcggtgtgtgcagtgtctacttgatattgccggtttgaggtgaaagagcagatacgagtattctgcggtggcaccatgtggcttcagaatgttctcttcttttacttttcgttttctcgttctttttccataacactatatattattcagctactatatttataagaccctcaagcaaatgcttatttatgctaaacatcacttaataagtagtaattagtactaataaatttcatcaaagataaaatagttaagacttggataagagagaaagtaacaacagaactacagaagccatattgatttaaattttcgatataacatccaaattttaacattttcttattagttaaatctttttaaatttctaaaataaatttgtttcaaaataaaaaaaaatcctcaaataaataaatgacgcttatcgtaaatatataaattatataattaggatttaggaggtctccactccacccctaattctcttactttagacaactgaattgataaaacgagatataagaagtggggggattgagtttaattatgattaagatagatatggttgagattaagatagcgacaaaaatacgaaatgcatgtgaagcaatgtcaaatgcagacagataacatgcactgttttccataatcgagtcaagtgagaaaactagatggggaatgatgacgtggagctgagtttatactagctaaacttacacagagtcggttgttttctttatctttttcttttctcactttctttacaacagctttgtggtccccacttgtaaactcagtcacaaatcctcttttcttctctccctcatgtattcaacacgatgtggtttttgttagattttttatttggagttacattaaattttattggttttatta

SEQ ID NO: 379104 - DNA, 8515 bp, Cannabis indica
gaaaaaaaaaacagaaattttcatcatcaacagaaatcaaaacatacttttatctttaaaacatatgtactttgatatataaactaaaccttagaatggaaggacaattccaaaataccgaaattcatataatcaatccaatcttatccatttcaatccttgcagttggaatggccgccgcaatagctataatcagtggtctatgtggtgttaaatatcgtaaaaaaatcatcatcaccatcaccatcgttatctttgtctccttcatcgtcaactaaacaagaaaacaatgaagacataatattggattcaccatcaccgccacattcttctttttttcctttctctcatcaagatgtagagctacacgaaaataaagcacaagatactagttataataatagaaaagatgaggcgtcatttaatccaaagaaagtgatgagaggaacgtattcattcaaagaattgaagaagacgataacagctggttcatcgagcataaaagtgagaagaagtttgtctttaattgctagaggtcgaccagagagtcaaattaaaaatgaggatacgataaatagtagtagtaacgacgatactactaagaaaaaaggaaagaggaagatggatcatcaagaatcgatttggatgaagacaatcattttaggggaaaagtgtaaagtttcagatgaggaagaagaagctgtgatttatgagcgaaaaggaaagaaaatctctgcataccatcctagaacggggagttctttgtccatttctaggcaatcatcgttcattaatcaagatcatactctagtttcttgttcttcaagatcataaacattatgatgcatttcaagtatatatgcatttaatctttattgcattattctcataacttatttcattttatttttaattcttccatttaataaaaggaaaattgagaaggaaaaagaaacttgtatttcatgcaaattcatatgaacaaattaaatgtacacgcataacaaataaacaaattatacaacatgaaattaagttggggaatatctatctatatggaatgttgtgtaaaattaattttgtgaattttatctcaacatgataattaatataagaaaaaaaaaacatttaacatgcaacatgtactggtggatagtttcatcaatggaattttgtgtttagtgtgattaaatttatttaaaacaaaaataattttataaactttgtattttccacttacattattatctttttcattgaattttattatatatataataaaataaaattttgaagataacattaaaaatattttcatttatttttcattaatcaaatataggacataaaaaatattttcatttatttttcattaatcaaatataggacataaaaaaaaatatatctatctatttttcattaacataaaaatctatctattctagttaaactactctttttttttctcattttttaatttatattaattaataaacaaatatttcattatctctctttaggtttagtcgtgattgtaaacaattaattccttatatgattggagtctctttagtgtttatttatcagttaccaaacattaactcataaatttgtaagagcttctcatttccttcaaattgaaaatttaaaaaagtattattctcgctgaatttatgtctacgttgttatacaatttatcttcattaacaaaagttattttaccttttaaaaaaaattcaaatacttctccaattaccatttataaaaatgatttttttttttcatttttacatttaaaatatttttatagaaatttacataacaataaatccaaaagaataaaaagtaaaagaaataataaaaatatagtggtaattcccctataaaattaaaattttaaattaattaattttttaaaagtattaaaataatgagtaatttgcggcataaatacctaagtttaactcccaattgcaaataaatacctaagtttaatttttagcggtaataatacctaagttatacttttggaactctgtagatacctaaccgttaaaatattatgtcattatccacgtgtcattttttttattggtatattttaattaatttttttttaaaaaaataaaaatttaatgacttggaccaattaggaattgccacgtggcaatttacttaacaattaacactcaggtacctataaaagttccagaattataacttaggtattattaccgccaaaaattaaacttaggtattaatttgcaactgaaagttaaacttaggtatttatgccgcaaattactctaaaataattaattaaaactaacattttttttattatttatttattagtttttaaaacacaagcgaaattgtcgttgattttaaaggaaaaaccgaatattccgtttctatattttgttttccacaaacgttaattttcagattctttaatcaaaaggcccagaaaaaaccctcttcttcccgcgaccccggagattcacttcactttcctctgacccagtcaaagttccaatctttataggttatatcaatcaaacatcgacaaatctcatctttgggtatttgtgatttcgcctcaatttgatggctttatcccttttaacaaaagggtttgtgtcaaattgatcgttctattgaattttgatccaaagttcttatttttaggtttctcatctgttgttgaaacttaaaaagttgaaaccttgaatgtatcttattacaattgaagaacaatcttggcttgtgaacttgcccaaattgtttctgggtgttctcaggcctcttcaattgtcttttgagctaaaaccattctcttcttattgtgttaagagagataggtgggatctagtgttgttttctttacagggtggttgatcaacaaaacttgtcttttagaatgggttctacacaaaggtctacattggggttggttgatcatggtggttcaacttcaacctcacatgaaaaggcttcttcttacattgataatatgccagtttatgttaaggaattgattgctggaggagctgcaggggcgtttgcgaagacggcggttgcgccattggaacggattaagattttattgcaggtgaaatattggttaaattgtactttgaatgaatgttattgtttgtgtttggtgattaagctttatgttattaccacttgatcatgagcagagaataatttgtagatggatgctttggaattgagttttacctttagtaatggaaattaggaaaaggtttagggaaagagcatatctaattgttacaaatgattgattttaaccaattggtattaggttcgaatcatacttgaggagatttgattcattccgaattagaatttgaaatgaaaggattcactttaatcgttgagagagtagatactattgctcatagcattcagaatgattgatttttgtggtttgctctcataaggtcttaggttcgagtccctcctcggtacctacatagcacttgttatattttacagttcccaaaatattgtagagttaggccgggattctagtttttttgttttaagatagatttgttaatgttgccatatgtttaagatggattttacattcaaaattttgcttctattgcatcatatttcctcatatcacattcttgtggtttgctctcactaggtcttaagttcgacgtccctcctcgggtacctacatcgcatttgttatagtttcctcatgacccaaatattgtagggttaggtggggatccttaattttttattttttttacaaaaaagaacaaatttatttttcttagttaattacaatgatttgttaatgttgtcatatgtttaagatggattttacatacaaaattttgcttgtatttttctcttgtagacaaggacaaatgggttccaatctcttggggtgcatcaatctttgaagaagttattaaagcatgaaggtgttaagggattctataagtaagtttgttattaatttgtataatttccttatcttttgttatatattttaaatgtcattcaagaattttccatgtgttatgtttgttcttcaggggaaatggtgctagtgttattcgtatagttccttatgcagccttacattacatgacctatgagcaatataggtcttggattctgaatcattatcccattttaggatcagggactcatatcgatctcttagccggtgcagcatcgggaggaacagctgttttgtgcacatatcccttggacctcgctcgtacaagactcgcttaccaggttagacttagacttatttagttagatttcagtatagtatttggctgtaaatattgaagtggcaatgaaagtttatttgaggctgatatgattgtttttcgggttgtgaattctcaaatcttagaacaatttatagctcaatttttttcaagtagttatttcttaatttggtaactatttttatcctcaagggatgatctagtggttgtaaggagtattgataggcatttatttcagagcgttttgtaaaaatagccttcatgaaattttttattagtaacataattttctgaaaatttttattaacaaaataaccatgtttggttgcacgagcgatcaaaagttacactatacaatttcaagttcttagtttggtaaatttccctttcgttccaaggttcgaattcccagagtctcaaaaatctcaggggccaatgggagatcgtcttggtaactgcaagggccaagtcttttatctatggttttccggtctgttgtactctttccagtttggtagtttggttgtccattctcattatatactcttttttgtttatcatttcaattaaattcgttatggctatgtaggttgtggacactagaggaagcttagagtatggttcaaagggttttcaatctcaaactgcttacaaaggcataaaagatgtgctttttagcgtttacaaagaagggggagcccgtggcctgtacagaggtgttggtacgtgtgtttttacatattctcttcttatttgataccaaatattatataatgctcttctgattctagtttttatgttgaataggtccaacactcattggaatcctcccttatgccggtttgaagttttacatatacgaagagcttaaggggcatgttccacaagattacgagaactccatcactatgcgcctttcttgtggcgctttagctggattattcggacagactttcacttacccgttagatgttgttaggaggcaaatgcaggtattgtcacatttcgaaaactcactcctttttattagatgaatttgttgggctaatgaagagcattatattagaatcattgttaagtctataaattagagatttatactcagctcatctttatccagcaaatttgagccatggccacagcaagaggcagatgataaactgatttgaagttgtttcttctgttggcgctgaggtcatgataaactatgatgataaaattaatagaagtttataaagaaagtaggatttcgagttttaatcattagcttttggattcaatttcaggttggaaatcgatcgaaaactactcaaggtggtgatcccggatccaagaacacattggaagggcttaccactattgttcgtaagcaagggtggagacagttgtttgcaggcttaagcattaactatatcaaggtgatttttctcgatcataattataatcactaatgtctataactcagagtcgttaaaccaaataggggtagctcacatggtcaagcatctttgctgcttccttcaaatcccctcctcgtggaaatcgtaggattaggcgagaagcctagttatttaagattatttctcggtcatagtcataatcaccaatgtccataactcagagtcccaacaagagtagctcaaatggtcaaacatatgatttgctgcttccttcaaatctcctatgggaatcgtaggattaagcgagaagcctagtcatttaagattatttcttgatcataatcacaatcactaatgtccataacttagagtcgttaaacccattaggggtggctcaaatggtcaaacatgtggtttgctatttccttcaaatctcgtgtgggaattgtaggattcggcgagaaggttagtcatttaagattatttcttggtgataattgtaatcactaatgtccataacttagagttgttaagcctaacaggggtagctcaaatggtcaagcatgtggtttgctgcttccttcaagataagcctagtcattatagattatttcagtcataatcacaaatgtctataacttagagtcgttaaacccaacagggatagctcaaatggtcaaacatgtggtttgtgcttccttcaaatcccctcgtgggaatcgtaggattaggcgagaagcctaattatcaaagattattttgttcattcattcaataccacaagagagttaagcttagttcaccttagtcatgtgattgctttattttatctttatgatgattaggttgaagctcatatttgccatgtgattgctttctttttcaattttcttgcttacttactgataaatcgtgcttgtagattgttccatcggtggctatcggttttactgcatacgacacaatgaagttttggctgcgtgttccgccccgacagaagtctcaaccaacttcctcagcatgattgttccaacaattttgagtatttgtcatagttctttattttgttataaaataataaaatggttaataattggaagataaattttagttttgtccttctttggaattctttattgtgtaaattagtggtggaaattgtctaattgttctaactaatcctttagttaaatagtaatgatatatataattaacatagttgatatcatatgttatgtttagtttatttatttatttaatttaatttttcttctctgctgtatttatatttttttgttacttttatgtgatttttttattttttctaatagaataccgttaaatgtaaaaaaaaaaacctttaaacgtaaaaatgtaaaatttttataaaaattggtattttatgtaattattcaaatatattaaataaataacatataatatttttaagcaaatatttccattattttctaagatgtatattattattattattgttgttgttgttgttgttgaacatgtcacaccatgaaatttttagcaacaaggatcttttggttgaaattttcattcgagttgatgatagcaaattcgtgattcgatttagcaatgtctgtatgtagggttgtttgtaaagtattcgattagatttaatctgcacgatacaatccaatctataaaaaatgaatatttgtatttgtgcatattagattggattgaaaaatttaaaatccacatttaatatttgattgaattggattaatttttggttattcattcattatattatcgttgcaaaaagctgcttcacaaatatgtacaacactactcctttaaccttcaaagttgattttctgagactaaattcaaaactctttattaatagaatcacaaactttctattttagtgtttgtattttataagaattattaattagattttttattttgttaaatgataaaataaactttatgttttctaaaataatataaataagatcttaaactcaattttcaataaaattatttttaatataaccaatttaaaggtatacgaacagatgcaagaaaaatataactaattttgtcataacacatctagatcagattattattaagttttattttgacaaaaaaaatcagttcacgatactatttagtactattttgaaaaattcaggatctaatttatcatttaacaaaacagaaagtttaactagtaagatttacaaaatacagagtaaaatgatatttatccataaaaatattagaaatttttgtagtataaccctcttaaagggtcgatttggtagactttcggtttattttggtatttagaaaaactttttagcctaatttttttatgattgtgtctgtagtagttatttatgatcatttgtaaatttttaaaaaattctgaatagttaacagtgtcgaaaattaaatttaaatagttacttagcacgtgtataagaaaaaatagtcacgcgtgcaacaaaatatgtaaatcttattttcaacattgtaaattacttaatttttttttaaaaaaattacaagcgatcataaattactataaccctacacgatcataaaaaacattaactaaaatattattttatatgccaaaatagataaaagtctaccaacactcttttaaaaggtgtaatatagacctactcaatattatatattatacatgattaataatatgaattttaatatataaaaaatgttagatattttaatataatggaagataaatcaagaatatacaactcaattgtaaaaataatataaaaactaaaataagagattgat

SEQ ID NO: 379105 - DNA, 8559 bp, Cannabis indica
acataacaaatagacacatttctaagagaagccaaaagatgacgacaatcatgaataataataccatatgcagaaaacatttcaatagaactatagataggcttaacaacgttgatgcagtcggtttctacatcggcatgaaattcaggatgatccttcaaccagctaagagcttctttgaccctaatcgcctcagccatctctgcacgcaccagtcctttaacacagcaaacctgagcttccaacatcgcaccagcagagtcacgaataaccatagaaaaaccatactcaacaatgttgccaaaaattgcagcatcagtgttaattttgattttattatgcataggcctgatccaatgctcaatctccctaatagaaccatcagaactatgaggagcagactgtttgtctacatgagcagaattcaaagcagctactgtggacttgttccaaactaattcattccgtaccttccaaatttgccaaacatatatatgatactaacaatccttgcaatcctattttagaaattatcaaagatgtcagtcatccaaattaaaaaaatactccatcgacacctggaatttgaccctcgttgagataggaccaacaattcgagcaaaaacacagtccacaaagatattgacatagtttcaggtgcttgtttgcacaaaggacagatggagtcgattctaactcatttcgtaaccagcataacatctgttgggagacagttaactagccctccataacaaattcttacacttcggaggaatcctcaagttccataatttcctccaaaaacccgagttactatccacatgatttaaaacaaaaagctctagctgtaatagataggcagtacctccctgtggatttattagtattgatcttaagtttatcttaaatacagaggaaatatttatggtaaatacacttattttgttcttatagtaataatatttttcagatccttcatttataatccagggtgagaaaactttaagaataccataaagttagtgttgttcaacacattatttaaacatgggacttctgtaagttatttgacctatgatgattcggagaattcttttgaacatttgttttgtcattgtcctcttgcaaaattcgtgtggtttgcttgctagtgggggattcatagtgcagacctcgattttatgagcccctcacagatggttaagtggattttatatcctgattttctggtggacagagaagagagtgaagtagctgccttcaatcgattcgatattagcctttgtgatgaactttggacaactcaaaatcgtgcttttcatgagcaaattattccaacttgtgtttccctttggaagtggaggcctcggcgttaattatgcatttaatttttaaatttttttgaatagtttacagtgtcaaaaatatatttaaaattttataaacacgcgtagtaaactagaatatcaaggactctatttcgataccgtacactatttaatttttttcttaaaaaaataaaaacaatattgtaactataacgaatattaataatgattcaaatgtttaagttaggatctaattaatttattattattttttataaatattaatcacaacaaaattaattaagtatgatatcaatatacattgaatcataaatcattgcatcaatggcaattttttttagaggaatctatgttatcaattttgagcaacataaagtattatgttatttttttatttttatttttaatattaaaaacaaagaaataaataataaaagaagaagaagaggaggaggtgtcaaacacgcgctagagaaaggagagtgaaacagtgaatgtggaaaacctttttctctcagtttccgcgaagctgcacgtgtcaacgcgtcatcatgagctggttcctaatgacacgtgtcatcttctgacaggttgaatcccagtctccgaagatcccatcacagccgtctatttgatcctatacaagccgacattacccttattcggatgtttaagagagagaaagagagaaaagattgaaactttagtcaatagagagagagatagagagacccagttgcttgctccatccacgggtatgtatgtatacatgtatctatagactgtatatatatatatgtattgttgggtttattccttttctgtaaatttctgttcttgaagcttaatttgtctgttttgatctcttaaagtttcttcctttttttttggtttgacttgaatagagagctactgtggttgaagttcttctggggtttatactttctctgattatgcttggtttgttgctctggtatgttaattgattctcttctcttcttttcttaatttggtttagtcaattgggttgaccttaattctttcatgtttactttgaaaaattctatgttttgggttttgggttttgtggtttaatcttcttgtgtttcttaatcttgctaaagttataactttgaaaaattctatgttttgggttttgggtttttatcaattgggtttgtggtttaaccttcttgtgtttcttaatttagatttttctctctaattttgctaaagttataatttagtttatttagtgtcaaaatataaataaatttagatgatgaatagtgagttgactcattgaggatgatgttgttatgttgtgttgtgttgacttgtgttcttcatttattttgtattgaaaaaattgatgggttttggagtataaagcgatttttcgaagcaaattatgtagtaatcatggtggtacatactacatagcattaaaattaggaagaaaatctaaacccctttgtcctgtataactgtatatagggaaaatccaatcatctcttttgtcttggcttgtgtaaaacatggttaacattcatgattggtggcttgacaagcatttaatgaaatatactcatttgtttttatcaaatttgatgattctgttgaacccttactcgagttagtcctttagtttgaatctttaatgtttttcctattatgttgtgctttttaaggtgataaatttatcgtcattacctcgaatttgtggtcccttttgattgtttttgacaaggttcttgtgttgcttggtttgatcagaaggggtttggtttcccagctgatgttttcagatcaaatcgattgtacatatcacacgtttagatcaaatgccatcattaaaaatgaagacccaatcgagcacgggctgtttaagagaaagaaatggtcttcgtgtttgtcaaaaatcaactataatttccaaaaaaacatgctctcatgtcagaattcctgatcatactgcagatctcgatacttgcttacaaagttgtcaagatggtaagccattgaacttgaaagaagattgtgttggttttcatttttgttgtaaggattttgatagattttcatgatgattatatttctaagattgtgttggtttcacttattaactagtcactttcataatcttttgagggtcattcatgagctttctaattgtgttgtttgaatttgagattatcagttgttcatgtgaaatatttcatgtttactttgagcaattttgttctaagcatttattgacatgaaattttacattcatatttgaaaactcattgaacttttctcatagtatgttcgagtatccaactctctcccgaggagattgttaacgatgaagcggttgaccatcaggaattaccagatgaagaaaagtctcagtctttgaaccaatcttgtgattcaacaaccatggcacaaatggtaaaaagaaataagaaaaattgtttccttttcatatgacattgtgattttctctcttaataatggcggtttttgtacttatgtatcaacacttcttcgattattgcaggagtctagccatgctttacctccgcgattggagactattttttctccttctttggagtccattgaagttcgcagtgaagcaaataaagacaatgatgcaggtttgagcgttcgatattaactaatttctttaaattttctgctgagaaaaagcagttgtagaagaaactactgtaattttattcgtcttatatctgatttgctgttctttcatttctcagcggtatgtagtgacagctatcccgatatttcttggttagaagctgatgaaagtgatgataatagaagttcgggcgaccttcagtattgtgatgtgtcggagttctacatttctgacatgatcgtttcagactttacctttgacgccactgcgtttgataatactagtgaagcgaattgctttactagttacgaacatccagagccaaacatgttgtttggtgttgccgagcaattttgcgttcttcctttactagaggaatcaattagaagcagtagtgccaatgatgagaaatcggatgaacaagcaatgatgggtccaaatgattctagcttgtacttagcaatcaatcagataagaccttgtgaccaggaatctgctgtcaattcttttgactcagaccaggccgagtgtttcgatcctcagatttttataaagaatttgcctgaattatctgatgtggtgtccaatttccaatccaattcattgcctaaggaaacttcaagaaggaagcttatcactctagttcttgatttggatggtaagtgggattgagttgcttgaatttgagcattgttattaggcaccagtagtgtccaacaccatgttgcagttatattttagttaaaatatgatacttaattacatcaatagcgatatgaacaacgtgatagtgtaagtatacgattaatatttagcctcacatttccatacatgcagaaacacttgttcattctacattggaacattgtgaagatgcagacttcacctttaatgttcttttcaacatgaaagaacacaccgtgtatgtcagaaagcgtcctcacctcaaaacattcttagaacgagtcgctgagatgtttcaagttattatttttactgccagtcaaagcatatatgcagaacaactccttgatattctcgatccagatggaaagatcatctctcgacgggtttatcgcgaatcatgtatcttctcagatggcagttacactaaagatttgacagttttagatattgatcttgcgaaagttgcaataattgataattcccctcaggtacatctcataattcttcgatcttcggttcactctttactttgtcaatatttggtttgctggggtttctagatcagttaaacatgtcctaggctatagctacaaattcagtatttttataggttaaatcatatgtagaaaatgccttgttttagtgaaaagacgtttttggaacaggcgacaagatcctgtatcgtacattgatttgattcgagctaatgtgtattaaatttatgagaggcaggggaattataacgaacttttattggtagaattgaggtaaaactgcggaaggaagcaattttttcttctcgcactttgtcatgtacttaaattcctaagccttggtctctttttgaatatttttcaggtttttcggttgcaagtgaataatgggattcccataaagagttggtttgatgatcgatcagactgtgcactaatttcgttacttcctttcttagagacccttgtagatgcagacgatgttcgccctatcattgccaagaaatttggtaatgaggcataagagcctttgccattctcaattttcttgagtatagcagctccttatcccctttgcctattttttagcaaaattcggcctctaatcttagcataaatatgttcggtttttttctttctttctttctttcttttcgcttagagctctttagatattatttgcattgttttttaagttactctattgctgctttctgttgtcgtctcagctggaaactcttcgggatcttctctctaagtgttgttcaaaggtaattttagggctcgtctcgtcttttatttttagttgtacagtttatggggggtgtacatgaatggattactcttatatattgtgaaatgtaattcttgcagaattgttttctttttctttactatttttgatctaatttacttgcatgttattttagtttgatctcacaatagaatagagcatagtttagttgatatgatgaaatgaaaatgaaaatctcttagaattgacttaattttgtaaagcaagcagcaacaacattctagaaacataagcttgatatagttcttgtagataaaaaatggttttttgcagcggaaccccctcatgttttgattttctacacttaacccccttatgtttactcttctttgtaaatttgaggtgccagttggatattaccgttgaataccaactggattattactgcattgactttaaagtcttactttcacgtatacacaggtgttatacagtggtcatagttggtatttaacggtgatatttaactgatgcctcaaatttgcaaagaaaagtaaatttaagagagttaaatgtataaaaattaaaacataaaagggtttcgctgctaattactcagataaaaataataggattagtaagaaaaaaataagtgatatgatagttaaacactaaaccagaaaaatgtcttgttacaaaagaagaaaaaaagagaaaaaagaaaagaaaagaaggaaaaagaatgcaagaaagaaaatagagagaaatctgaaggtgttgtaaattctctatcttcattcccatgtttgaggaggtcggttttagttcgtaccaacagagctttgccggtagctgttagaatactattattattgttgttgttcttctcaatctctccctttttttagattaattgtgttttttgatgattcagtgaacatagttgtgcattagttgtcttgaaacagatctttcccatgatttaatgagctcgagttaccgttgcatacaaggtatgtgcgtatgtatgtatgtatgtgtgctatatatatgtgtgtatgtatgtagaaaacattatgaaatcacattgagattgatgaactttggttatcatgctgaaaatatggaacttaataggtacattacataaccacttatctgttacaatttctctttaagaatattctgtttttggaaatgagaaagcagaagatatgaaattaatatgctaataagccaaactagtgtatatatagggttatttgcaacgatatcccgttatgttttgattttttacgctgaatcgtctttatctttttcttttttgtaacaaaaccttctcatgtttacttttctttgcaaatttgaggtgctaactaaatatcaccgttatatatcaactgaattattattgtattgacttcgaagttttactttcacgcatacacaatggttatctagttggtatttaacggtcatatttagctgacatctcaaatttgcaaagaatagtaaacttaagggagttttgcctaaaaaaaaagaagggggtcaagtgtataaaaattaaaacataaaagagtttcgctgccatagatcaatttatccctacttgtgttttgcaggtataccttgtgaggtaggaaatttgtcttagtttatgcatcaaaacattatttcttttgacttcttcgcctttaagattcctgctcgattaccatcttttaaaattccgagcaaacatgttgattttgcttcgatcaaaacatgtttcgtgtttgttatatgcatcgatacgaattaatatgtcaatctcttaagtctactacaatgtttcaggacactgctctctcagaacattgctctgtaattaagtgtatgtttctttatgagaattagaactcgaaaacttattgatgaaccaaatgatgaaaactagatatgctgttgttatgtttgctctgattatgaatacaaaaaagaaaaagttggctttaaatttcattatcttgataaatatttgaccgattaagggagaccaggtgatggtttaacaccgaaaaatttacaatttttacgcgcattgtctgcaggtctgtgtgccgagaccagtaatagctcttctgctaatgccaacattagtaggtacacagagtttttattgttgttagagttagatgtttgtatgtagtgaggcattttcaggaacaaaattttggtttaacttctcattctcaagtatatataattgaagaagtgatttgttcttctttttaatgtaatgatcttatctcagcttcttcttttttgtaaatcatggtataaatcagtgaatgtattacttgtgtttatgatgattaaagataactgggttttagcttttgttttgattagaatcattttgacttgataaaactttgcatatgtattgttgtaactattaatagtcaacaatttgggctacttacagtttgagctagggctgaacatcgggtgagttgactagatttcgagtgaaaaagttgaacctgtactcgtccgttcacatgttgtgggttggtggattggcgggttcggctgtttgtgataaacatacctaattatatataaacatacaatcaaacc

SEQ ID NO: 379106 - DNA, 1488 bp, Cannabis indica
ccaatgaacacccctactagaaaccatcttctctataatttcctgaacattccactactgagagcctctttgaaaaaattgaaatccccaaatatcttaatggcaaccgacttcgaacaaaaccaaatgcatctaacaccctctaaactttactctgctccattccacaacaataaactattgaacttgcctcactcaattgaaggcctaaagtttgagaaaaaaaattcggtccctggagcagtaagtaaatggacctaaattcacctttgcaaaacaacaaaacatcatccacaaaatagatgatttaattttaaaccacgacatctttcatgaaacttgaattcctaaagtggagacattgaatctccttgttggaaacttctcttggcttcgaaaaaaccatgaagttgaccattcatcgtcaaattgaataaatttctccaggaatctgaaaggatgaagtatttcatctatgaagctccattcaattgtatcataggctttcctaaatccaatttaattatgcgattaggctgagaaatgttctcccataatgtttaaccaaagcctggcatgccatcatattatacacaatgaatcttccttatacaaagccactttgatgttaattaattttggtagcatctccttgaatcttgaacaaatcatcttcatggctcctttgtaaatgatattgcaacatgaaacttgcctatgctcacatacatttacgggacatttattctttgaaatgagggtgaaaaacgttgaattaatttccttcaataattttcccgaatgattaaaagaaaggataacagaacacactttatcccccataacttcccaattatcttgaacaaagaaactctcaaatccatgtagacctggagctttatttccaggtatgtcaaacactgcccactttacttcttctttagtgcaaacctccaacaatctcttgctttgagattctgtgatcaaaggatcgagattcacaatactttgcatcacttccttcttattgtttagagttgacccgaggaggttcatataatatttttaaaaagcctcactaacctcttttgaagtatcaaacaattttcaacccatgtccataatcgagtaaattctgtttgtaatccttcttgctctaatactagcaggataaaaagatgtatttttgtcccattctttaagccactgcacctttgttttttgttgtggaaacaacaacaaagcattaggagcttctttataatcttatcttctttgcattttcttcacaattaatctatcattaaatggatccttgctcaatttctcctgacgatcaatcatgagcttgtaacacatctaatctcgaccattaacatcaccaaacttcttcctgttcatttccttcatcatcagtttgcttcttctcagtttttggaccagcttgtacatctcagctcctgtgcatagtgttgggttttatgccct

SEQ ID NO: 379107 - DNA, 2921 bp, Cannabis indica
tctctctctctctcttatagtgttcaaagtgttaaattaaaaaacacagaccaaaagacagaacctttggtgctttgagtaatatagacactttccacaccccatgactaaacaactaattaaaaccctttacccaaagttaccataaaacactattattatactaatcaaacttgaaagaaattgataaaatggactaaacaactaattaaactaaacccctttatccattagacaactaattaaacccctttaatttattttcttgttaatgttaccattaaactaatattatactaatcaaacttgaaagaaatggattaaaatccccaattgttaaatgacaaaagcaataaaataaatgaaaacaatccaaagaagggggcaattgaattgaattctctctccttagtgggccccataattgatgtaccaataaaaatctttcctttagataagtaagaatcccaaagccttattattattattattaacattattgttctttgcttgattatgggattcttttccaatttccactccaaattgcaatagccaaggagtgaagagaggagtgtatatgagatgacccttatgaaaattctacacaaaaatccatgaaagcccccatttttgaaaaaccctaaacctaaacctaaaaccaaaggcaacaactttataactttggctatttaaagctttcacctttatcattttttttgataattcaatatggcacagaaggaaattatggatcttgatgagtgggagctcataccagatgatgggtttctgggttttcgtgaagattgttctgaaaagaaaatcctttacagaaaattgagtgggaatactaattcagacccaaaaggggttctcaatgattacttcaatccaggaagattgcctcaaagggtaccgagtcaactcgttcctgtaccgattccaattccaattcagctcaattctacaacagcagcaacaaagacacgtggcgaaaccccagatgatgaagatgtggtaattgcaggtggtggtttgattgaggctaatcaagattcagtctccaacgtttccttcaagaaaatgaagaaagaaaatgaatttgtcgacatgaaaatggtggaatcaccaaagtccccaaccagaggaggttttaatatgactcagattgatgctggtgtgtttaattttgatcatcatgacaaaattgaagctgaaaatatgagtagtggtggtggtgtgatcacttctccaagatttatgaacatgaaaaagatgagtggtaacttggacatgaaggaagatcataacaaaaatatggatgaaaatagtgatggtgatgaagatgaagatgctgatgatgatgggcttaacatttggaaatggagtttatctgggattggagctatttgctcttttggtattgctgctgctacaatttgtatcatcttcattggaagccaccacagaaaccaacagcacaatcacaagatcagatttcagatctacaatgatgaaaaggtaagaacaaaaaggaagagtaaaaatctttccttttcttttatttttttttagttttttgttaattttccataattgaaaatatccaattgaattttgatctcaatgattaaatctttacaagtaatgagtaagattgattgattttgttaatattatggggttttgcaaagtcacccttgtttgttttagtcttgaaaattgaatgtgaagaagattgaattcaatcatctttccttttttctttaatgttttgttaattttccaaatttgagaaatacccaattgaattttgacttcaaagattaaatttttacaagtaattagtgaagattgactgattttgttactattattgggttttgcaaaaacacccttgtttgtcttgaaaattaaatgtgaaaaagattgaattcaatcttgtttttttcttatttgagaaatacccaattgaattttgacttcaaagattaaatttttacaagtaatcagtgaagattgactgattttgttactattattgggttttgcaaaaacacccttgtttgtcttgaaaattgaatgtgaagaagattgaattcaatcatctttccttcttatttgagaaatacccaattaaattatgacctcaaagattaaatttttacaagtgatcagtgaagattgattgattttgttattgttatggggttttgcaaaaacacccttatttgttgtcgtactaaaaattgaatgttaagaagaagattgaattcaatatttaacacaaaaagatttggttaattgcagagaatgaatcaagtggtacaccagacaagcaaaatgaatgaggcaatgaatgcagtaagaggtatgcctttgagtagagctcatgttacctatggaggttactatgaaggtctttagatacaatctctctcttcttcagctaaaaaatggtgaaagtttcttggccatagatgaatttgataagctctattttattaccatctatattattttcatatctatataaattttaatatatctgaaggtgtctctgtttctgtgttgtagtgttgtacatagttttgtttgttgtgttttgtatataattctcagttctgctttgtaatattataggttacttagctcttttacttcttcaagaacaaattccaatgattatataacttggcttattagtttgtgattttggtacttgttgtggtatgttgagtgattatattttatggaaagaaaaaaaatttactccagaaaatggcattctttcataattgattgataacaaaaaaaatatattctttttacccaacattgttcatatttgcaaatttaaaatttgaaattatatgcatattagggattaaaattggtatcctaatctaaaactatac

SEQ ID NO: 379108 - DNA, 2465 bp, Cannabis indica
agaattaatatatatatatatatatatatatatatatattggccttactaaaacagttgatgagagaaatcatcatgttatgatcacaattcagagactactactctagtagtacaacagttttgatcatatataatactgctattcttaaattatatatatatatatatatactattatatgcatgacttattaggggccacatcctaattaaggccctaatttaaggtgatttgtattttcttatcttaattagtttacttataatattcatttttttttttaatttgtgctaattaatccaaagaaatatggagaaaagtgggactgactatactgtcctcattaacttatatagttgttataattttaatattatggtagctagctttatgagttgtttaaatatatatatatatatattattgatttttgagcttgatatttgagattgtagtacagctttgttgatcgtgataaaataataattttgcatgcaaatttgcatggacgaattcatggggacagattttctagagggcatcattgagtttagaaaaggaatgggggagattacgagtgaaagacaacaaagaccaggaagaacatagtaagagagcaatattatcccctttttgattgttgtaatgatgagaatgtgcaccaatatttctatttctacccaccatttccactacacgccaatattacttttccccaaaaaaaataatgcattgcctaaactattcatcacccttcgtctttctgttgtcccaaacactcccagttcttttttttattattattatttacataatttttaatatttagtactcttttagtgggaggcagatggggaagccttgatggtacatttatatacctacctttccttttttctttttgtttttcaactctcaatttgtttgcgcttttaatatctatactatatacaagttttattgtacactaaacctatatctatatatattacatggaatttggtttgttaaaatgtctttaacaacactgtatatgcgattttgaccattataccaatttattgcgacacaaatgggtggttaggtatccaactcgatcaacaattatatatagtagtctcttaatttattataagagctacatttgtacatataattttgcttaaattgaaaaaattacaagtttaagtgccatctgtatgtggcaaaagaatatttaatgccacgtacataaatagaagaagaagaagaagtccacttactataaaagagtagcatcgtcccaaatttatgcatgtgaaacttcataacaccacgtgaaatggaaactgtggggtaaaatattactcacttatgtcaatattatgagcataaaagataaaatcatttatatgtgaaaccccacataacatggcactatatatatacactgcaagttgagtagctagatatataaatgtatattatatcatatatgtatgcatgtcgtttaatatcaaacatgttaaacctaccaaaacatctacagcaatattgcatatattataggagggaccacttatatatatatagttataggtatattatgtgatgtttgacaaacagggtgttaggaagcaatattttttcactaaaatagtgtagcgatttcagttacatttgccatataaaccaaataaatggacctcgtactatcacatggcaacaatgctagctccaagcactttcaatatcaggtatttataatattctacctattaacatcttgctgagaccacacatgttgaaatattaagaatttattcttaggatataataactgatcaaatcattaatacccatgtgttttgaataaattttaccatttatatatttttcaaaattataaaataatattcaaatactagtatattttagtttatatatgtttagtaaatttacttctgttaaaaccagaaaaaaaaagataaatgtaacttgtaaaattctatgagcccctatttcacttacaaaacttatattacaaagtacttaacgctaaattataaataagaagtttgtggtgatcaacaacataattcacaatgttaattatatttttgacatttttaatttgagaaaagtattttataatttattaattaattgcagttgtggtatttatttagttttcaaattttgtgcatttaattttcacatttttgtatttattattttatatatggaagaaaagttatctagattttctatttttaaaaaataaggtataaagtgtaagtttgatgactcatagctaaccagttgtatcaatctaattttgtgtgagtttccaatgatatatttgatcagatttcttgtggagaaaattgaagcaagacttttcttttttacaaaaagaaagttgcacttactgctcacgattccgtaggtacaaaaataaatttttttgggctgattgaagat

SEQ ID NO: 379109 - DNA, 4386 bp, Cannabis indica
aaaacagataaaaatatatcggtaaatgagtacattataaaatttccccttaatatatatatttttctaaaagtagaaataaataaaaaatacatcaacacactcctttgaggagagttcattgaaaaatcacctaaatattatgatacgaattttttttgtaatagctagtattgttttttttttttttgaaacaataatagatagtatggtagaatcaaccaaattgtaattttacacataaaaaacaaatgaagtgaaatttcaaaggacaaaaaggtaatttgaggtcaccttcttcctcacactccttttctagctatcaaaccaccaaaaaagcagactcaatattttctcaacggtttcttcgtatcaatttatttatttattttaataaagaatttaattcttcattttcttctcattattcacctatatatacacatacaatacagacaatttagggcataaaactgttccagtcagccatggaagaatccatggagctccgagctatgaagaagaagaagaagaagaacacgacaacaacaacaacaaccgaagaaagcttgaccaacttctttgattttctctccgaagaacttgttgtcttaatccttgacttccttaatcaaaacccatttgaccgtaaatcattctctctcgtctgtaagtatttctactccgtcgaagccaaacaccgcaagacccttaaacccctgcgatccaattccaaacatctcggctctgttctcacccggtacccgaacttgacccgaattgatctcacgctctgtcctagagtcgctgataattcgttagccgaaatctccaatgcatgcaaggcgaatctcaggtccatcgatctttcgaggtcgaggtttttctcgggagctgggttgttgaatttggctttgagttgtgagaatttggttgagattgatctttctaatgcgacggagctgagggattctggtgcagcggcggtggctcaggctaagaatttggagagattgtggttggcgaggtgtaagatgattacggatttgggggttgggtgtattgctgttggttgtaggaagcttaagctgattagcttgaaatggtgtgttggggttggggattttggggtgggattgattgctgttaaatgcaaagaaattcgtagtttggatctctccttcttgccggtaaaagttttatttttattggtgaaatgattatgtttcaatgtggcttttagaattgtaatgatatttggaagaaaatggtgagttgattaatgattttttttacagatcactgatgaatgcttaccatctatcttgagattacaatatcttgaggatttggttctagaaggatgttttggtattgatgacagcagtcttgaggttctcaaatgttgctgcaagtcattaaaggtatgcttgggttgatgattagctagttttatgataaaactttgtttgtaagatgttaattggaatagctgattcataatatttaacaatattttattgggttgggtcatagccttggaaagtagtttgacttttttgctagttatattcatcaatttctggaatacacaattgacgattcaatccaccttgcaagttgggatgatgtatactttgattgtttgtgtttggattttgataaacagagatagaattgagctttgtggcttccatctttagattaagatgttgtgattatcatttgataactttttctgagaggatgttgagtggaccgtcctgtttctgatgcctagttcggccttacttaatgttcttctttagctttaatcccttttacttctgctgcctgtaacagaaactcgatttgtcaagttgccagaacattactcatgttgggttatcttcgcttacaaatatagctggcgaaaatcttgaggaactcaccttatcatatgtctctcctgtgagtcttggtactttatatctgcactttttaatagtttaatgtttctttgaagcctaatcactctttgtaatttgcctctggttatggtttaggtgacctctgttcttgccgatagcttgagagggcttcccatgttgcaaacagttaaattggatggttgtctagttactagtgctggactgaaagccattggagattggtgtgtatctttgagggagttgagcttaagtaaatgttctggtgtgactgatgatggtctttcctctcttgttatcaaacacagagatttgcggaagctggatattacctgttgccgcagaatcacttatgtgtctattgcccacattacaaattcatgctctgctctcacttctctcaagatggagtcatgtgctcttgtttctagagaagcatttgttttgattggacagcgatgtcgtttcttagagagcttgaccttacagataacgaaattgatgatgaaggtttgtcctaactctaattttgtgtcgagaaagactagtatgttgagcaaataactcaaactttgtttctatgtgcaggtttgaaatctatctctagatgctctaaactctcaagcttaaaacttggaatttgtttggacataactgataagggagttgcacatgttggtttttcttgctctaaactcaaagagctcgatctatacaggtgttaatcattttttttttctcttctctttgatgtagtttctttgtataggttacgtttttatagtttctcaaatttcatatggtaatatggaaaaacaatttttggattttcattaggattaatcatatgaaacattgttaaccgaaaatttatcttgtttaggtgcacagatattacggattctggcatttcagctattgccagtggttgccctgaccttgagatgattaatatagcctattgtaaagacatcagtgatgattcgttagtatctttgtcgaaatgctcaaggttaaacacatttgaaagtcgaggctgcccacttattacatcttctggcttagcagctattgctacccaatgtaagcagcttgtcaagctagacataaagaaatgtttcaagattgatgatgccgggatggtttctctggcttacaattcccagaatctaagacaggtatgcattttctttcattgatgattccgcttacataattttcccagaatctaagacatgtttgctctcttttattgcttttcagaatatgcacaatggatatcattgactcagtatgtatgcctctcgtgatctttttggcagattaatttgtcatataccgcagtgacagatgcaggacttgtaactcttgccaggattagttgcctacagagtttgaccattttgcatttggacggtttgagtcctggtggaatcgcccttgccttgttggcatgtgaaggcctaacaaaagtaaagcttcaaacatcctttaaatcattgctaccgcaccctcttctcaaacatttagaaggacggggatgtgcgattcagtggagggataaagttttgcaggtaggattggttttctctatggtgtcgtgagggccacaatatcataccattatagtcaaattgtttgtaaaaattaaattgttcatatttacttgactattttaaccagtcatgactaatgagattactatctgtgatttacaggctgagctagatccactgtgttggaagctaaagttagaagacatcatgtactaagggcacctcacctatctgcatgtttttgaagagttttacctcgccatggttgcgtggttccatggttcgatgataataggtagacaataaatgtaactcaaagaagtagcagcctcatcatggttcgacaagggcaacaactgtgttgtgttgtgttgtgttgcagtgagagctgtggggacattttttctattccatttttcaagtctttaaatggtgtatactccccaaaccaatgagtaactttttattatgaaatgaattctagtttagtttagatcatgggaatgagttgtgaagtttgtaaatatagtactaatagtaatagacattgtatgtacaatcgtaaatgcatatatatatatatatatatatatataataaattttgtgttgagttaattaaatacttataacgttaatgatttgtttaaagtttaaattggtaactgagaagctgttgaaactttgatgaatattttaacaaaatatagtgttttagtgggtgtggagtgtgaagtatccagttttgtgcgaatgggtgaggactcaccactagggtcggcccaaatattttggggaccttgtacaaaattttaaaattgggctctttacaaaaaaaaaaaaccgtatacattaaaattaaaattctattactagcttttttttttttaaagattcgttcat

SEQ ID NO: 379110 - DNA, 2563 bp, Cannabis indica
aataaatgactatgtgactcaaagttccactcacatacagggctaaatctttgtatcaattagtatgtgcttcctcactaggttatctcttttaaggaagttgttatggagtgattgccacataatgaatctgtgcttcactgagagcttacaccaaatagctgacctaaaaactcaaattaatcaccacttataagcttgttatatatctgtccaatttttaacttgtcattaacctttgcttgaacaatattctaataaatattcacttatttttctcatattttgtgaatatcgtatccctctatttttttttaaacaaacctttaagtatgttaaacaagtacagagtatggagtgtcataacgtatttgcaaattttacaaagtgcaatgaagaaattaaaattataatttgctaaacatataactcctaattctgacaaacttgtttttgtttacccctaattaaataactgaatcaaggaaacttcctatgacccccattgatctattagaaaataactccactttagtatctttgcactttccgcagtctttataagaagaaatcacataacaatttaaataacattatgtcaaataagtgagctaccctaccaccattactttaacaaaaacttatcactaaattttacttggtcagcacgtatataatatataaatattattaccatcaaagaaaatttcaaattcaaacaacacgtattcaattaattaattaaatcatttaaatacatatgggccctctattgggttcttgctacccaaggcaaaggcccaacccaactaattataaagggacacactctctctctctgctattaacatccgaaaaagaatagagagtaaaaagccatggctacaggtggtttctatatagccgaagcacatgtgatgcgaaagctttacaaagagaaattgaagagaatggaagaagaaagtggggtgggggaggtcagaggtggaggtggtgactctgctggagtgaaggaatcgatgagtggctgtttcgggttcttaaagaagattcatccgaccagtggtcagtttgtggtggtgaattctggcaaagaagaagaaaaaggaaaattggaatcgaggagattatgatatgtttttttttgtatgaataaatcaaaggtcttgtaaataatactttttctttttctctaaagtcttgtttttagttccttcaaaaagaaaagtgttattactagtttgtagaaatgcattaaggttctgtttggaattcatgattgtagattggattgaataaaattgaattatactgtatttagtttaagtataaattgtttttttttttatttatgttaaataataatttaatcacaaatttaatataaatattaattttctaaaatattgatataaattttttagtaatttaaaaagaatatataatgttattattatattgttatttaagtaactattgcttatttaatattattttaaattttaaaaatttatgtatgataatttaaaattatatattttaaactaactattgttagtttacttgaaatagttgactgcttatctttagttttagttttgaagaatgtatagttattttaagcaagacaaaaaaatcactacacgatttgatttggttgatttttttttatttgactttttttttcagttatataactaaattaatggaagattgagttttactctatttttaatcatttgtattaattttactttattaatttattttttctatgatacatatttatttgattaaaaataaaccaatctatttgaattgaactgaaaaattcagagagcttcaagcctagctaggggaatttcttcaagctttgaagttaataaatcattaagcaaatagatgtgatcaagtagatgaaaaagtatataatagtggcaaatatattaagagaatgttgagagttaagattatgctagctagatcatattgattgacaatgtttgatcaacaatttagcaaagagcaaacaatcaacaaatagatgaataaaatcagtataaagaaatgtgtagtgttagtatgtgagttaacagttaatagagttagtgatgtttgttgttattggtcatttcatctcatgtcctgtgatgtcatgacaaaaaaagtcctctatgttatattatgttgggttattgttaattattttttgatgtaataccatggaatggaaatctccttgaaattgaatagtagcaaccattctcccctctttgaatatttctcccttctttctctctcactacaagtcttatctcacttgttacatagctcaaagtctttcaattacaggcttaatcaattaacatagccaacattattacttaccattatcagggatcatgactgtgagtagaatattttttactccctcttcagctattaaccgaaattggccaacattttttagttccttccttttagtaaaaagtttcatgttgataataatcacaacaacaacaacaatcaattctttttcagttgtagtataattcaattgagc

SEQ ID NO: 379111 - DNA, 5287 bp, Cannabis indica
taattcaaaaaaaaaaattaacggtcattaaaattcaagtagcataatttagtatattttaaaatttaaggggcaaaaatcttaattataatttttttaaaatttgtatttatgtgaaaaagatagtagtctttttataaaaacaagtccaattttctttctagaaatttacaaaagaaaacttttataaaacataagaaaagatcaaacaactctaaatcataaaaggaaaataagaattaccaacctatcaattaagtccaaattgagaaaagcatctttaggaccctcagcctccgatttacatctcacagttcccccaaaaaacggcgccaaaagaacatagccctttactctaactcggcccaactcggccgattccttaccgagtcgaatcgccaagtgatgaccaatgtttccaccagccgagtccccacaaataaacacgttcccaaaatccgccacgtcacacatccacttatccggctcatacaccgactcggcttcgccttggagccacttcacagccgtgtacccgtcctcaatagccgccggaagcctattttccggcgcaagccgatagtccggcgcaacgatcacagcttggagatcagaagccagacgtaagcagtagttttggcagttcggccaagtacgcgagccgatgcagaagccgccaccgtgaatgtagaagaaaactggaagcttagagccggattgagccgcggctggcttgtagagccgaagggagagatgattgaccttgtcgaaaacgacatctttccatataacggagccgtcgtcgtttatagggacgttgaagcttggcttggaggagcggacgatggagccgtcgctgtaaacgcggaggactccacgacattcgtctacttcgtacggttcgtggtgagatgaggaggagtcgttggtgctgtgaaacgacatgtcgtttgcagtgaatatggatttttgaagtagtgaagagaattaaattttgttgatttttaaaggaaaaattagcaaagacaaggattactagagcaagtagtattttggtgtttgttatttggcacctggtttttgtagccttattatttgtgaagacagtgtaaactttagtgtctagcattttcttaatatttctatttatttaactaaatatcatatagtatataatttaatataataattttagagaatataattaactattgtaaggcgacacatctaaaaagtacaatattaaacacttctagtgtttaataactatgcttattatttatttatattattggtttatataattttgcatgcgtaaatattaattttgtattaagggttcatcccaaaagttgttgggtggttttgttttatattttaacagcacacacaatgtttattaaatttatttatatattaatttggtcattaatttgtttctatttgatattaaaattaatattatacattccaagccggccggcacaggtgaaagtgaaatgcttttctgaaagctaatgggaaatgtaacattgggcattaagcatttttttcaccaatgagtgagtttaatgtttaaacacaatacgtaataaaatgatacttcccaaacaaacaacacgaaatatatatagagaagagaaataaataaataataataattaaaaaaaaaaaccataagggagtcgtatgtggataaatgaagatcttggtattgttattaaagatgatggagttgaaagtataagtagacaaatgattgttgaaaggattgaattttgggtcaagggctcatggcaatagctcgagatggtgtgacaagcctcctctcctatgttgtcaaagaagagattttaacccttccttcattcctctccatccctccatcattctattctttctaccatagtgttatttgggttaagggctcatggtaatagctcaagatggctagcaacaagcgacaaagaggtcaaacttgtcccttttagggagcaactcgcggttatcgtggactcgaggagaacattcaggtcatggtcctcagaggcacatcaaggtcctcaagtattagtgagcaactcaaggagtttatcgaggtcatggtcctcaaagaacacatcgaggttctgggaggaattcatggtactcagggagctcgtctatgtcaaggtcctcatagaactcaacaatgtcattaggtagtgaggagcaactcatggtattgtgggagctcatccaagtcatggtcctcgaagaacacatcgagatcctcaaggagcacatcttcaagaacaagttactagtcaagtcacaattttctaatcacctcacatataattgcacatcgtcaagaactatgtatcaatctattagacacatgattgttgatctcatgagctattggcatgtgcaccaaaaccagaatctataatttgtcatcattatttatttcattgctttcttttagaacctataatattacatatatgtagagagaagtaggaatgttcttgaagaaacaattacaaatttagaattcgggaaaaaagaaagaatatagctatcatacaattagaagaaaaaacgagtcgaagagtgaggctggctaatggtatgaaaatccagaaaatgagttcataatcgtcgagaatatccagaacctccacatttcttgcagagaattaatcctacagaatatggaaacattaatctgatatcttcataaaattttaagacaagagaagtttcaggtcatgactaattattgcccaaaggactaagtaatgtatggcacttgaatctgaatttttaccaccaaagatcaggatataatcttcacagagaactaaaattatattcattttgcttttatgtttaatgcaaaggtccatttaaatgaccaaaacatgtgtgtttctaagagtgtaaagtaacataatagactggaatggcatgtacagttttttttgcactttcatgcttaatttttcttctttgttgacagtgtagcacatggtaataaatataaatattaaggtatattattggatatgccatgtaaatatataataattcacaataatcaatttactgtgccataacaattaggttaccataataatccaaacaacatgaaaagaggaaaaagaaaaagcttataaatatataagaaaatagtacctgcacccttgcacaccttgcaatcaaccaatccagtctcttgcttcattttaccatcattacaaaatacacattttgtcccacctgcctagtataattcaaattagtattcttttttttcttttaaaccttgtcatggattaaagaacctaaaaaagaacagataaaggtaactcaaatcactttgacaataacaaaaatcataataacaaagttaggtgggggaaggcagtcttatccaaattccaaggtaatatccaagtgatcttgattcttgacaacaatcatttaattggcatattgtaactacacattttggttcattaaacatcggtttcttttctgacactaaacaggggatccttaatgctacttaatagaatgtacacatctattccttcatttaggaatcttagcagtttcctaactgttcccaactaactactaagtagcgctttagttcttttctaggcttcaaataaatttactatagagcagaacaacaagggagaccatctgggaaacaaggagaaatgtcttctagttgtctactcactattattaaaaagcgagtcttacagctagataaagcatgtaacacagtcctaacaacaactgttgctcataagctcttccaatgtgtttcattcatagtacagattcaactggtgcatagatgttttaggatctcttgaaatgaaaataataagatctagttatcgtcttcatattttacaaatttcaatggcagcctctaatgtattatcattgaatttcttactgcatgatggtagaactacttggagcttatcagacaactagaaggagttaaaaactcttcaaaataagttattttaagctattgatagactaagtggtggttggttacttctaatttttgggcattgcatctaactttcaaacatctaaactgacttgtcatatccaaaatctctgttatattggaaaacattgtcacacatgaattaaatgtaaaagtattgaaccatttataagaacatggactactccactcatcaccaattgattttaagatggaaccccatgttttttgatatggtatcagagccatatcgctggtgggcgagcaaaatggccaaaaaaaactcaacaaaaattaaaaattattcttatagcaaagaatgcggcaaaccatggtgttaatttcagttatagcaagtaaaattaaaacaaatatataaacattaagaaatgaaagaaagaacaaaacagataatccataccattgccggcacaacgctcacaaggcactggatcaccctgcaaataagaataaaatatattaattgaaaacaaaacccatcaaccataacccagcaaaaagcataaaagaaaacctcatttcactcaatttttctttactttgctagaaacaacgaaaactcaaaagaaaaatgaaggtgagagtgagagtgagcgcagttttttttaccttgaaaccaagagagagagaaagagcaatggtgacgagaacactgatagtggcaaggaaagtctgggtatctatggaggtttcaaagccagcaaaaaggaaaattgggggaacaaagagcctggttggttggattgagagtttgggtctgagcgaaacagagaagcagcgagacagtaatggggttactgattttggtgaaagagaatggaaggagacaatgagagatgatgatgaagaggaggaagaagaagaagaagagaaataagagagaggttgaagagagtagtaagaggaggagagagtagccatggatatagaagaagaggaatatgtggaggagtggagctctcttatgtttcttttcctctcatttctctccgctcctctctctattttccttcactatatactaattaaaatttagtataatttacgccgtaaatactaattaattaataaataatattaaagttaatttttattgggaaaaagttaatattttggtactcggacactttcatagatagctgatcgttaacagtcaagttaatgtttgagagttcttaattggttcaggtcgttaaaaaaaagttaaattaagattttaccttctaaactttaacatgt

SEQ ID NO: 379112 - DNA, 7469 bp, Cannabis indica
agctgtgccaaactggcccctaatcagttagctcattctacaataaatctttttaaaccatcatcgtgattaattaaataccaaaattttcatttaagagtaaataaataataaatagaaatttcaccccgtcctattaccaatattgtattatgccttctaaactatttttgttactcagttttgatccttttgttatttcttcgcctatgtggcgaacaaaaagttaatctcacactttaagtactgacatgtcattgccacgtgtcatgttaatgccacgtgtacaattcaattttaaataagagaagataatggtatgtgaagaaatttagataagaaagagaagtataattacaacatttttgagttgcaaatagcaacaagtgttgttattaatagcagcacagcttataaatgttatgatatctcatgaaaatgttatgcttggtgctgcttttgaaggagaatgaagaagttatattacaatgactagagtagaggagaggagagtggagaggaattgagacgatgaaaatgaagattaagcagtggcggccgcctgttcttcgtattgtgaaactgggagcagggtgcaggtgaggttgcggtccccatacacattgtcaacgcgtcctgaaatgacaataaaaactttattattaacaatttaagttatgagaattgagaagactttacgcataagaatgagtggtcacccttcattgccaattcaatgtgtgtttaatattaataaatgatataagaccaagtttcattgatcattcttctttgagcatatgacatggtagacagtgtttagcaccactggtgttttttagcattaattctcttatctagatgggaagacattacctgtggtaggccagaacttggaggatcggagccatggagcggggaaagctgcgtattctcgggtgtatggttttgtccaagtgtctcccatgagcaatgatggtggatgaggagctccctgcaaatttacaaccttttatatattgcaaagcaagtgaaagagagcaataaaccatagttttcaacgccagctagacctacaacattaggggacctggaaactatagcaattgctatgtaagtacccaagaggggcttgaatctcggatcttgtgggagcaaaatcacatgcctgactatttgagcgacccatgttgggtagtttttttttaattattatttcgtaattaggctcgatcagaaaactataacaattgttatgtaggtatccaaaatggactcgataaaccatacaatattaggagacttggaaactatagcaattgttatgtaagtaccgaagagggactcaaacctcggaccttgtgggagcaaaaccaaaccacacgcctgaccatttgagataccctttttgggtagtttttttattttgaaactaggcttgaccagaaaactataacaattattatgtaggtacttagaaaagactcaaacctaatcatagtttgttagttataatgtcgagtgacaaactattaaaaaaaaagattaccttgagcacattgttgtgaaggtcagcttttccattctcaatctgagcaatttcttctcggattgaaataagagtgtcgcaaaacctgtctaactcagcctgcaacagcagaaatttcacttgatgaggataaaataaaatgatagggaaaaaacaagtgttttttagctttatgatggagcgtactttgctttcactttcggtaggttcaatcatgagtgttccgggaacaggccacgacatagttggtgcgtggaatccgtagtccattagacgcttggcaacatcttcaggctcgattccagcagtgttctgaattttcagaatgaacaagaagagtacaaacatagatgagttctaaagctgaaacaaaataagtaaataagaagaaaaaaggaaggaagaactaccttgaagcctctcaagtcaataatgaattcgtgagcacatgttccattgacaccgcggaaaaggacagggtaatagttctgtaagaaataaacataagcgaaaataagaaaatcgcaaggccaagaagtttacaaagctccccaatataataattaagaaccgaaaaaactaaagcaattattatgtaggtactcagaagaaactcgaatctcacaccttttatgtaagtgttaatttatgaagttgaataatgaaatgacattacctccaagcgttttgccatgtagtttgcattgagaattgctatctttgatgcatcagtgagtcccttagatcccatcattgcaatgtaggtgtaagaaatcggcaaaataagtgcagaaccccaaggtgcagcagaaatggttccaagaggcttagactcatcgggggcaggaatgccaccggtaggtatcttcattataaaaaaccgagtttgttgaaaatgtgataaggagaaaacacaaaatattctcaattaaaaagcagtgtatttagtatttaccactggatgtgaaggcaaatatggtgccaagtgtttcttcacaccaataggacccataccaggaccacctcctccatgtggaatgcaaaatgttttgtgaagattgagatggcaaacatcagctccaatccaacctgggctggtcagaccaacctgagaaaaccaacttacttcagaatttcatttgaaatttactttcacatctaacttcagtagtagttgaagaaaatagctacaaagtttgaaacacaactacaaagatgagctatgcaaatggtaaatgaactaaaaaccgaattcttcgtgtaaatatagcaaccgtttctcatgatgattcttttcggtatgtacattttccaagcatactttgaatctgacatgtctaacatcctaccgctatcacaagtcctcttcacccgaacataaaggacaaaggaaggaagagaagtgaatcaaacctgtgcattcatgttagctccatccatgtaaacttgtcctccattgtcatgaattatcttacatatctcatcgataccttcttcgtacacaccatgagtcgaagggtatgtcacctacaatttttacatcccatcagcatgattcaacttttaaatcaatttgcaagtcagttaaaccttaacataaagaatcgagctttaccatgagagccgataggtgttctttgttcgattcagctgccttctttaactcttcgatgttgatgtttcccttggcatcagttccaacaggcacaattttcattccacacattgcagcactagcaggatttgttccatgtgctgagacgggaataatgcacacatttcggtgatgatcccctcttgcctgcaattttcattcagtgcacattcaaaatggtcagccaactttaattatagaataagagttttctcttcggtatcaaattcaaacatgacaaagaagaagctattttgacaaatatattgttaattcgaacgatcaaaatcaaatcatttgattaaagccttggatgccttgtcatgtttgtaaatattcctaaatgttcattaacatgaaatgaagtgctatgtcaattcctaatttattctttttccgaaattgagattgctacggaacttgaagaaagtaagtgaaaatcaagtgagtagcggtaccatatgataagcacggataaccattagcccggcatactctccagcagctccagcattgggttgcaaggagaaagaatcaaacccggtaatagtgcacaacaaatcacccaaatttgtgaacatttcctgaagatggcatatttaaacaaaaaacaaggtcaattcgattgttctgatgttaaaaagagagaaaatatagacaaaaaaaccagcatttggattacctgatatccttgggcttgttcagtaggcgcaaaagggtggatatcggtgaaaccaggccatgtgactggcatcatttcagttgttgcgttcaatttcattgtacaagaaccgagaggaatcatgctgtggcataacgaaaggtcctttgcttgtagcttgtacagatacctaagcaactcgtgctcggtatggtacctaacaagaaagagaagtttaaaagattagaagattttcccaccaaaaagatgtaaactttaagagtttagaccgagcaaaaatgccatacgagttaaagatttgatgggtgagatacgcgctctcccttttcaagccatcagggacaactgtcttaacttctggtgcaagtgatgcagcagtgaatggaacctaatatgattaaacaaatttctcattaagattctgattagttaaatccaaatgttataacttctacaaaacttgttataacactcacagatttgccagatgcgaaaactttgaaaagcttatcaacatcctccaaggtagttgtttcatcaaaggcaacagtgatctgaaagacaatcaaaactgatatgagtcaaaaaggactttaaggaactaattgattgaagaacatgagagcaaacttacagtgttcgagtccacaactcgcaaattcatctcacttttgtaggcagcatcagcaatcgcatgagcatcagcagtcttaatcttcactgtatcaaagaaaggcaggtcctgaacttcaacagtcccgagtttcttcaatccaagtgctaaaactccagcgagaccatgaactcgttcagcaatagttttaaggccttcaggtccatgataaacagcatacatagcagccatgttggcaagcaaggcctgccaataaaaacataataacaataagagaaaaatcaatcgataaagcacatagcattgcagacacactcaaatcctgtcaaaaatactcgacgccctattttgaatactattttgcaaagaattatcaatataatgacaaaatatatctattttcaccaattcctcaaattttttattaaataaaaaaggcaaaaacactatctaatcctcaaacaagatgaagttcttgtcctaaacctgaaaaaaaaaaaaaaccgataaagcacttcatcttattagttcaaacacactcatgccttatcaaaaacactcaacaccctgttttgaatactatgttgcaacgaattatcaaatataatgtcatttagcaaggtgaaataatcaaaatatatctattttcaccaattcctctaaaatttgcataagataaaaaggcaaaaatactatcttatccatgaaaaaacataccaaagatgaagttgtagtcctatacctgagcagtgcagatgttgctagtagccttgtccctcctgatatgctgctcccgagtctgcatagccatacgaagagcaggcttacccgaagaatcaacactaacaccaataattcttccgggcatcatcctcttgtactcttgagaagtagccaaaaaagcagcatgaggacctccataacccataggaacaccgaatcgttgagcagaaccaacaacaatatcggcccccaattcaccaggcggtttcaacacagtcaatgccaacaaatcagttgccatcacaaccttaaccccattagcatgagcattcttaataaactccccataatccaaaacctcaccctcagtacccggatactgaacaagaacaccacaaacatcccccgatttgtaatcaatatccttaagatcagcactaacaactttaagatcaaaaccatcagctctagtcttacaaatatcaaaagtctgaggatgacaattactagcaatgacaaaagtcttcttctttcctttaaaaatgttattacacatagccattgcctcagcagccgctgtaccttcatcgagcaatgaagcattcgacataggcaaaccggtaagatctgttataacggtttgaaaattaagcaaagactcaagacgaccttgggaaatctcagcttgataaggtgtgtattgagtataccaagctggattttccattatattcctcaaaataacaggaggaacataagtgttataataacccatcccaataaaagacttaaagatcttatttttagaagctaaactctgcatatgctcaagcatttgactctcagttaacccatcatcaaatttcgaaaatttcattgaatcaagtctaattgatttaggcacagtagcatcaatgagagattcaatgctatcaaacccacataactcagccattttagtttgttcatctggtgttgccgagttatgtcggcgagcaaaagtgtcactgggtttcaatgcttcaacagaaaccgatcgagtctgctgagtttgataagacccaaaagaggaatctgatctaaacccacttcgaacacgagatgaggaacaaggggacaacgatgaaacgtacctcgaaggtgtgtaggagataggagatggagcttcattttgacggtactttttggcctctgaaactaatcgtttcagcatagccctgttagccaatcgccgagctcgctccattgttgtgagcttcaacaaacaacaaagggcaaagcttttgattgaagaagaagaagaagaaggaggaggaggaaattgagagatgggttttggttggttttggaaaaagattgaatctttattatggttattccattggagtgagtgtagccactagccaatggaggttggtttggtaatacacttacccatatggctttttattctaaatatttataattaattaataaacaaattatagtgtttttttggtgcaccaatatatttttatttttaattacattttaatttttttaagactaattaagatttttatatgaactcttctaacagttaaattttttcttaaactattaaaattgtcggatttaaatatttttgtctaatttcatttaattttattaatttggtgattatctaaatactaaatcatgttccccacactttgatatctaagaactgatatgtctcgatctttgacatatgacaattaaattttcatttacgttagacatttttcattaaaattagacaaagttcttaaatttaataatctcaatagttcagagataattttttacggcttttaaagttcttgagcatgatttagtacatatcaaagtttagggagcaagaatcctaattaatttttttaaaattcaaaattaatatgacaatgtataacgtaattattttcagcaatggagatgaacacagataaattttaatttttacatcataaaattatgtgtgattatatttattaaaatttgctggttaaatatttgatagtaatcttttttttttctttaatttgtaggtattttattagtagaatggaaaggaaagtcacaagttaaaagtttttttttattattaaaaatttttgttctagtttttctgtagtatttttacaatgtccgtaagataaataatgaataaaactctcaaatttttgctatgtccttaagattaattaaa

SEQ ID NO: 379113 - DNA, 3812 bp, Cannabis indica
tttttttttttttaataaagtttgtatccttggatgttgtctttgacctgcttgctaaatataatgactcaacactgaacttaacaggggcatcttgtcgatttggttcaaagagaggtgaaattacttttgcaatctgctttggacgttgccctttctgtggtgcgtgcaaaccctactgttttggaggggcttggtgctcaattagaaggtaatgtactgctgtaaatgcaaattgcaattgttctgttttcaatccaatactagacaagaccaaagtgtgtgaaataaataaaataactaggtgtttttgcagaaaactaaagctagtgggctttattgtagtagatagtgaggttcgagcttaaaaagtgaatttaacattgtctagttatagattagtggaaggcagaaagagtgggaagtagtagaatggaggttgaaaaatctatgctatcttctgcttgaaagccaaagattgttcagactttgaagggacattaaaaaaaaagtaattttaatataaaattattattattattattattgttatttcaaaatgggcaaacccctattgtattttaagaatctgggcattgaaaagtaaccttcttatataaatgattaggaagcttctcttacaagtttgagtcttcattggtagaacttcttagaaggtcattagcctaactactctaccctaaagagttggtagacggttcgtagaatatcatagttgataagcattggatatcattattgttatggtttctaatttgtgtaagttacgtgcttttgggtaagtaatagtattaaggttttgttcacaacattacgtgtagaaaatgaattgttgacaaactttccatgtctatatctttccactctgctttggattagttaattctatagttgaaaattagtcagtacactaaaaagttcctcaggtaatggattatggatgttatcagtcaagtctagttgtatgctgtctttgccagatcattgattaagggctgggtgaattgagactaagatgtctgtaaaatgcttttcctgtctggctgtggttgtcaagtcatagtgttctgatagtgttttcttctgcagaaaaagagaaagtggaaggtgatgagctgcaacggtggttaaactcggtggtcgctcctacggagttgtcattattcattagaggcaagcaagagtctcttcttccctttcagagtgaaactgagattaagacaatttcgtagctgctccccagttttacatgaaacatggagcaactcaacagctctttctgtgtttgcggtgtcttcacaataggcatcaactcacccatacacctgtatatctcggtatagcgaattttggctttcatttcttaacataaaaaacctttgcttttcatctcacaatttcccagcccaaccaaaagagtggtgggaagaattcgaagattggcatttgcaaagctctctcaagtgtttgatactttgtaggttgtttttttttgaattatgatgtacattaactgttacggaactcagcagatggatccggatgtatacaattgtaattgttattcagttgtatactatattattatttgtgaaatatatgactagctttcggtacaattaattttatgcttatgcatattggtcagtctttctgctcatgtaagagaaactgttaattaaaagttatatgaccagagacattgaaataggtttgaaagttgttttgcaaaaaaataataaataaacaataataataaaataaaataaataaaataaaatatttttacaataataatattaattaaattgtagctgtaggtaagttacttgctcacaaagaaacagtacttgccgcaataaaatggaggaattaaaaattcactccagagaattataggtggtgtaaactcactcaagagaattataggtggtgtaaactgagaattttagaaactaaataagtgagagcttcaaaatttaaataaaaatttagaatgaaaaccaatagagcttcgactcaagtttcgtctcctttgcatgaaggggtagtaggatttatataggctagagtttgggttcgagcatacctgtgaccaattcgggttttattgtaaaagcgagcccgctaatggggtaaaatacatagatacatgactatgaggcctgctaaggatatcaagctcaggggacgacgattctatacagatgaggggatcgtttggtgcaggacacgtgttgcacgaaggtcacgcctggcaaacaaaggtgtcaggggagccatcgacaaaaggggtgtatgcagtggtggtgcgcacactaccatgatctgagataggggacaatatctgtgtcaaagaggtggacatgtcattttaagggagacatccgcttctcgtatcgcggtagacatccgactcctgtttcatggtaggcctttgagcgtcatcttgtggtaggtgtccaagagtatctcgcatggcctgtctccaggtgtgcccttatcttcattaggaggtcttcactcattttgtgtcccagaaggctagggaggctttcaagcccctcaacaacattatgtgcctgaggcgaagttctgggtcttcgttaggcttgggcttgttctaggtttggactagccttctaagagtgggatagcttaagtccaactttaagtggagattaccttcagattatgccacgtctatcttctggaaaaacaaataacatttaccccaagcttttgaacttaagagtggcagaagcttacaacattccttccggaagaccttggagtcatcaggcatgtggacaattctaaaagtagtagaagcatttttctctttttgacactcggcagttgaagagtcaagaatttgcttggagatcaactagcaccacatacgtgtctccacttcttgggttcgtgagtgccacatgctctgggaaggtgtgttttgcacgaaacgatggaatgacaaccatttaatgtcagtgtggaccccgaggtgagtattaatgatgaaaaaatatctcaattctcataaaggaatttaataccatcccctcaattctctatccgttggatcgcaatttgtgctttttctagggagatctttcccttgattttgaagcacgtggattgccacttttgcctatatataggcgcgagaaaattactctcaccatttttacatttttaaatttttgagcttttgccttcgaatttgaatgaaagctttttactagagaacgattcctagaaaaaatctcagaaaatttgagcttcatcctttggtgaatgaacgatctctttgacattcttatccacctcttactacgaatttgagcgagggagtttccaggagcgccgcccctgaatccttttgtgagccacccctagtcatctgaaacaactgacgttcaagtaggttatgactagattctttatggggctttcaatttctaggcccaccaccctcaccttcctctgtacccgcatcacattacgagtaagtatttctaaatcttggaactttttaactctataccgtgataggaatttatattcgaatattaatttgagaaaccactgtttgaatacgaaaactaggaggattgaataggtagtgtttggagctaggcccacatcttatgcggagcccataagctattgcaaacttaattcgccaatattttcgcaacaattcaaattgcacccttccaactcatcctgcagtcatataagctcctaaagggataaagataaaactgcaaaattacaaaaagtga

SEQ ID NO: 379114 - DNA, 5410 bp, Cannabis indica
  modified_base (8)..(8): a, c, t, g, unknown or other
tttttcgngttatggtgaacgaggggatgggacgatgccaatggtgtttattttgtgtctatggcactccatattatgctctgaagagaaaatttttgggcaatggctcacggacaaaggtgctgagtgtcatgagccatgggctttaatgggagatcttaacgtcattcttgacgattccaagaaggagcgaggcaaagctttacaaggcgcgaaggaaaattactttcgaatcttttgtttaactcaggtggagtggatcttgggtgcggaggaggggttagtacttggaaaaattctagaaatgaatgtagcagagttcagaaaaggctgaatagggttattgcagatgcaaattggagaacttaatttctaaaggcagtgaagaaatggaatcaagtttttttttttaggctttgtgatagaaaattaaaaattctttgaaggcaataggggctttcaaaatgagccgatctccaattctatggtggatttagaagctgaaatcatgttggaaatttttgatttagaaggaagaatgtatataatttggaaacaaaagtctcgtgaaaatttgcttcggtttggtgatggcaattcaaagttctttcatgcttcgactattatacgaagaagacgtaattttattgggagtgtgattgatacttctggtatatggttgagatagagagaggacattgggggctacttccaggagcattttcaatccctatattcctcctcttagccatgcattgatatgagttggagactctttttgttgaaaaagtttcggaggttgagaatgaaaacatatgcacaatccctgacaatgtcaagataagagatgtggtctttaaactccaccctctaaagtcattaggacttgacggttttttaggcattttctttagaaaatattggcacattgttggagatcaagtttgcaaaatggttaaggaactttttccctctgtggtcctcaacaagcatctaaaccacacttttatatgcgttattcctaaagtcttgaatacaactcgctatgaacatttcaggcctataagtctgtgtaatttttggtacaagatcatttcttgcttgataatggacctgttaaaatgggttttggctcagctagtctctccttttcaatcggtctttatcctaggatgttggattgttgaatgctctcttctggctcaagacgtgatgcattctttgaaaaacaagaaaggaaaagttggggttatggcgattaagatggacatgaacaaggtgtatgatcatttggaatgggatttcctttgagatttctgaaagcgaatggcttcattaatcatgtctgctagctgattacgcaatgtgtcacaacgattagttaattgatttgattcaatgcttctcccttggatcccttcaatcccaagcgcggacttcggcaaggagatccactatcgccttttctttttattccttgcactcatgtactatttaacttgttcttcatgatgaaaaagaaggtgatttagtaggtgtgcgtgtttcaaggaatgccagacctataactcatctcttctacgctgatgactcgatattcttttgccaagccatacccactaatgctgagagctaatcaaatgcctacagaaatatgagcattggtcgggtcaattggtgagtaatcagataggtgggtgtggtgttttcccctaatactattcgaatatgctgggaagagattaaggggatgattaattgtataaaacctacggagaagtatttgggcaaatccttctccttcacgactaacaaaagggaagattatcatttttttgaaggagaaatttctatgcaggttggagggttggaaggcaaagtatccgtcccaagctagtagaactactctggttagttcggtcctacaaagtatccctaactacttcacgtatactgttcaagttcccagtactctttgtgatgatcttgaatgtttgttagtgagattttggtgggttggaaatgtggaaaaaagaaactattgtgcttaatttgaagagttggaatgaaatctgccaacgtaaaagatgtggcgaacttggcatccgaaggttcaaagacatgaatttggcctttctgtctaagttgttctggatggtcttgaaggaggaagaaaaggtttgggtaaaaaattttaggctaaatactgtcatattagtaatgcatggctggctgaaaaacatggaaatgactcaaggtgttggcgaagcttactcgaagcaagaaatgtgtgtttggatggagtgggtattttgattgctgatgcagcgtgtgaaatttgggatagaccctagattccttggtaggactcagatgaaatcaaagctagcttcaatttcaaatgcaatcataccttttggaaggttaaaattttgtttttggatggaactcaggcttggaacgaaagattgatcttggagtgtttggatgaggagatagctgctgatattttgaagatcaaacctttactagagggatcgaatatccttttttggaaggctgcaaagttgggtaagttctcggtcaaaagtgcctattagatcagtcaacaacatcattttatggagccaaaaggtaatgtgggaaagactgtggaagacgagaattcatcctcgtctgaaattattttgctggaagctcttttctgacatccaacctaccaaaagcaagcttagttttatccattgtgactaacaattatgcggcttttgccatatggaactgaatcgcccttccatttattttgtcgatgctctttcagacgtggggtttggtttagaatggggattcgcattgacttcttaaacttgaacaatctcacagaatttggcatctagtcgtgtaatttggaggatgttcaacttctaatcttcacagcctgtacctttgaaagtttgttgaagtggcgcaatgatttgattttcaaagaaagacagtgtgataagaatctggggtataaggattgtatttcgagagctgcaaaatttttgagtaaccggttgtggttcgatttggatgaagttgatacaaagatgcaggtgcttgataatcattctgaggaggactactggtgttgtaatgtagatgcttctgttgttggcaaaacagcaggctttgctatttttcacaagcatgatcaggtcttagaggactcttgggtttctatggggttctcttctgttgacgacgtacttgaagcgaaactttgtggtatatctctggctttgcagacggctttggagaaagaagtaccaaaagttcgaattgaaactgacttgaagtcaattgctcttgccttcgcgggttgttctttaccgtatatatgattggaatgtttttcctttattctcgtattgtctgtacctcagtgagtcttttaacgaagttgttgtgtcttttgttcctcggacaaagaatgtgtttgctgataaactagcatgttgggctagagaggcaaaagtcaaaatctttagtttgttaagagaaggggtcccgtcttgtggctactagtgcgggttttcttaaataaaagtctttaatcatccccaaaaaaaaaggaccttccttatttatacctgtgttatttgcccagttatatatttcatgaatttttgtctttcaaaataataaagctagaaaagcatggttaaattgaccagccgagaatcgaacccgggtactaaggtactattccaccattagaccacactgctttttaagggaaatatatggcattgttctaaatataacatttatccactttttgtgtcaagtttaatattttatttgcgtagtcttagctaggaagtttgagacataacaaaaggtcttaattagcataaataaattcaacctacctataaatgtaccgtgtacgtacttagaagttaagtaactgattatatacaatgagaagaattttcattagcttgacaagttatacttgaacctcattttttcacgaatgagccaagtgacgtgtcttgctttttgtaaagttacgtaccccaccctaccccatatgatcatgcatggatacattgctttgcttcgatagtctcgattctattaaattatatttaataataatatagcatatagcctaggcaagggaatgcgttcatcaaaatgttattgtttacatactgtaaaagtttttttttatttatttgcatgtgcaaataggatagctatataggtactacttatataggtaaggtaccttattaggaggacaaaattattacatcaaaatgaagatgatgatctaatgattctccattgttgattttgtaaaacttactttccgaacattgcttttactggaaaaggaaggcagtacgcagagagattctcacacgtcaaaaataatgtatatatatagctaaggtcataataataataataataataataataataatagtaaaaataatattattgatgaacaaaagagtaccttatatatatgacttgtcctcaaagaacaccggcagatcaacaatgtaggggagatgcgtcagtggcttttttagaaaaaaaaaaaaaaattaagaattaagaattatattatatatatagttaggccatatagtatataaaaaaaataatatttatagacataatattaaatttagtgtaatagttaaactagactacatataaaatagaggtcaataatttaaattccataaaaagtatttttttttttttaagtatacttttactcctcgtgctttaaaaggaattatatccctccttattttaaattctaagcttgtggaataaagaagtttaaaaagaaaacaaatcagtacaactataccttagcattaggccatgtcatttgaatgcatctatgtccattgcaacaattcaaaaactatatttatcaataaataaataaataaataactatatatttctttattaagaaagtaataatgtaaagaaccatagacatgattacttaatgattttggaccccatgataatttttttgaacctgtatattactgatcatcaattcatgataactccaattattcgcttttttgtcccttaaaaatgtttaggagccatcacttcaccgtcaaatttccaccacccagtgttaaattctaatatacaatattctatgtctaaatttaatagttaacgtaccaatctacaacaaaaatatatcattaagctactaagtcattacctaccaaatttaattagtggtaaaaagtagcactttgctaccaaattttagtagctaaatattttagtaccaaatcgctacaagaaatgtcatttttacaagcacagttcgctactgcacacattttgcaaattgcgctggcaa

SEQ ID NO: 379115 - DNA, 2656 bp, Cannabis indica
tagtacactcttagttgtgtatctttttattttttatttttgtaaaattatttttacttttttaattaaaaattaaaaaattaaattaaaaaagtattacaagcaccaatttttttttaaaaaaaaaaatttaattaattttgcttcaccaactcactcttctttgccattggatttgggggtgtgagagacaaacagaggcggcaacaacaaacactcaacagaccaccaaaaatgggaggcttcaacaacttgtttcacacattctcattgcttacgaggacacaaagaaattctcttcgctccatatcatcatcatcatcgtctagatcattttgtactgacaatggggctgatggccttcagaactctagggttaaaatcttcgaccgggacctcaaacgcaaacaagtaatacatatcttatgtcaatttttctcattgtgttcttaatagttatcaaaaaagttgtgactttacagcgtgatcgagctacatggttgatgggtcagactcaaaatgactcctttgtagatgctgttgttgagaatgtattggatcgtttggaggtactgttaaaagcttcctttattgaatttgagactgatatctttcttgttttggattgacattgttgagttgtcattcatttgggttcacaggactgcaaaaaattatttcctactacattatgcttagggggttcaatactgcctatcaggcgtttgttacgtggccgaggtgagaaattagctttgtattcttaaaatgtgaacaaaagtactataggtctctattaattgtcttaatgtttcaattcaagtgacaatcaaggttgagaattaaaaaatacatgtagtattttgtattagcagatggaagaatgtcagattagtcaaagttattatctttaccatgataatttgtcaagatatgctgtattgaacctttcgaaattagctctcgccagtatggattcataatatttttgtttttttaggtggaattgagaagcttattatgatggatacatcgtatgacatggtgaaattgtgtaaagatgctgagcttgatgatgcacataatgaaaagattgagacctccttcattgttggtgatgaggaattttctacctgttaaagaaaagtaggcttaaaagttttagaatatttttttgaggaattttttattgtcaattgtaaagtcaactttctaattgtattttgtaaagctctctagatcttgtaataagttgcttgggccttcattggactaatgatcttccaggagctatgatacaggtatttacttctttataataagcagttagaaattatggtgttaatttcatttttatttttcatttttgaatcccgttacggagaacagatattttgtggatgcattttaaattttggtagaaacaaaagtcagaggttctgcttatctttatgcttgcaaataactaaaacataaaggagaattttgaatattgttagtgtacttggattacttgtaattttccctttataagaaatttctataattggttgaacttaattaacatgcagtgcaaattattatggaagcatccatgacacatgattatattttacagagtagattggcattgaagcctgatggcctgtttttgggagctattcttggaggagaaaccttaaagtcaggcattcttgaatcattggaggatcatttatctatttctgttatggaaagattatcaagaaatataattaagtatccattttaatattttaattgctgtttctttatggccagggagctgagaattgcttgcacagtggcacaaatggagcgtgaagggggcatcagtccaagaatttcacctttggcacaagtataaagtttgtcgcataacttgtctcaattttttcacagaatatgatggcaacaaaacccttttatctaagccctttcaaattggctctttcttggttttcaaagtataaactatagtttattattttagatgttttcttatatctctactttattatttttttctattaatgatattttcagttgcagtccaatagttttactgaaaaaaatgaatgttttgatgatgaaagtaggattttaagagtatcctttctccttcatcttatggtcactagtttgatcttacactacaacttgctgtcaatgatggattcatttgatgatacattgtatttaaatatctatgccatgactgaatacgaatcaacttaaagtttcttaagccaatctgtggatttttttttttttttgtggttgcattccaagattttatttatttgttgttcttgacatgcttgtataataaggctgttaaaatgtcagttttttttccttcttttgaaaagtaaatgaacttgtttctgtcctttttggttgagtgatgcattgatgtactggatgcaaaatagtttttgaacgttcggtgattggttattgagtcccctaaatggtttttttgtttaggtgcgagatgctggaaatcttttgactagagcaggttttactcttccaggtgttgatgtcgatgaatacgtagttaaatatgaaagtggtgagcatttctaattctgacctttccacataattatgcagtatgtgcttgctagatgag

SEQ ID NO: 379116 - DNA, 1788 bp, Cannabis indica
acccaacaataatatgactctttgtgttgtttaaatattttcttagcaaaaaatgtgagggtggacattggtgagtgcagtgtgtcaccaatttgtgcactaacatcctttaatttttcttattaatcaatttgttttttgtttataaagagtaaaacatctaaatgtcacaaaatcttaaacttaacaatgttataaaagtttaatttcttatttttttttctttcttttattgagtaatgatatgtgcactcaaaatatatgcataaatatcataccgcaccttttccaaatcaatcacacataaataggaacaactagttttttttttattgcatatttttaaaaatcaaaaccaagaaaactttatatgttttacacttttgataaattctctctccaaaagctatgaactctatcaacttatccaataatcaattagtccaagaaatgagattaattgatagcatatcaaagtagcttcatcaacatctccacccatataaaatccaaaaaacaattcttactcagatctttcatcaaacaattcttaacaactaaagggtattatagatcattggatattatagcatatacatatttcaatattctttatatatatatatatacactgcatatcacagccttctataaatgcaactcaaagctcaagtatatatttatacatataatctagaattttaacatgagagttggttttttcttagaagagttcctattttcttgatcaaatggcctaaaactttagcataacgactcaccattttcttcaaattcataccatcattctgattttgcactccaactatttgcaattgcatcttattctcttcttgtccttctctttctcttccttccatcactaagtgttcgccgagagaactcttccctctaccgccttcatcgccctcatgccctactttttctcatccccgtcgatgagttgcttcaagctctttcgatcattctcttctccatcgccgccaccaccaccacctatattcggagagatcattcccttaacatctctcacttgaaatggccttctagtcctccttgacatactaatatcataatgtcttttgtcatttcccattatgcaatcaaattttgtttggacaaaattaaagtttatagtatgtaatatttttaaaacatatgggaataattgaacactaatttgtataatgagaatttgttgttggagattgcttagtgaagaattgaaaaagggtagttaaaaagtatgtgaaaaggtgcaatgtcttgtttctaagtgtccatttcaactatatatatattcataataaagaaagaaagaaaggaataatgttatatatgttacttgttgcaaagtgtctaatttgagctggtgaagagaagaattaatagagttactaccaaccaacaacaatgcatggtgttacaagctttgtttggccattttcataggggttgtgtggtgtggtcactactatggtagatggtagtttcttttctttcatgctttcagttatggtagctagtaaaattccatgccactctactctctctcttctttctttaattcttttccttatatagattagattcttagccttttcaaattaaactcatgatttttaagtaatctttaataaattaactttcttcttctttcttcacatcttagatgtgacatttaattttaagttttaacaaagttatctctagggctgtacatcggtcggtttgggcggtttatcctatatattttctaacccaatc

SEQ ID NO: 379117 - DNA, 3393 bp, Cannabis indica
tacagtcaaaaccagttggcctttgacaggtcacacttgcagctctcatttttttctcaataccttgagcaatgtccatggcctcatgtattgttggagtcaatccattgaaaaaaaaaaaggtgctcatttgatcttccggggttatgttgccgagaggtgccaataaccttatgaaatttttcttgtattcagccatggtgtcctcttgtcgaataaataagaattgatcataaagagtcctcatttcagtatctcgaaaatatttcagcaccaatcatttcatctcctaccaactcaagatagccctcttcttactctcatatttgtaccacaataaaacgtcccgaaaatagaaatgaaggctgcctcaattttttcgtgttcatcgtagttctaacatgagaagtaacgttcagcttgcataatccatccatcgaaattctacccatcaaacagtggcatcttaagtattttaaatcgcttttcatggcaaaaattattgtcagcgtaccctctttcaaaggacgcccctagtgagaactgattagcatgcatttctccagttgcctgtagctttgctgttgtctggtggatttctgttgctatataagactcaagaagctcctgggcttttattttttgtcgtttcccgagtgttggagcgttgaagaacttcctcaacctgctcttggatgtttcttgagtgttcttggacacttcttgatcattctaggacaattcttgcgcatcgagaatgagttgtggctgatcttttgagttgtgcttgcaactgttgccccatctcaagaacagattcaataattgacaccttgacaatatcttggactgactctataaccgattccataatagataccttgacagacaccatctctggcttcaaagcctctaccttgtcttcaaggctgagatccatttggatcttctccgccggtttctttaacatgctccgcagctcaccacaccaaattgatagaattttcttagaatagaaacaatctatcagctattttccacgacaaaaccagcaataaaattcctcaaatgatctttattgtgaaattagtaacaaggttacaatatcaagctttcgaaaggttcgtctctcctattcatactttcgagaggattggtctctcttaaagagtctactcttctctaattccaaggaaccctcacaagagaaaccctctcctatttatagacattagttactataactaatgccaactagaatccactagagacaagatagctcagcctacttattaatatattgctaactgtataaaactcatcattgcttcggtctcctcttgtacacccgaatagtggcttatcatattcatcgagtaatcattggtcaaaagacctacacatgttaatttgttaagatataataaacaaagtacctgtgtattggatggcaaaaatggaagctccgattttccaggatacagcgataagttggccaagtagctctctacaagtacatttaaaatgtttgatgttaagatcaagaacctggtaccatgtagctgaaaaattgatgtacaatttcatctcccagtatactacttacgagctcctgatttcattacaccttgacaaagcgatccttgcatcaatttaccagcatccacagatacagcctttccattgtctttcaaatattcagctgcacagccaatttgaaggatacaactgccattgtaaaccacaacaagagacctgcagcaagtaacatctgaaaaagattcccatgtcctgttaattgcaagaagaagcaataatgaatcatcctatactcacaaagacctgccaataaaagcaaacaggttttcttctgtagggaacacatacatatcacattcaactttcctgcaacagatttttcattactctaataatactaacagaatgacaaaattctgacactatttacaaatagttcctgattgttgggtcactggatttcaagtttatttttgatgttaacaaaactaaaacaagtaattatataaatcaactagacttcagagtacaaactactaattgtgctaaacattaaattttgtggatgtttaacgtagtgaatcttaactgtatcagcattgagcaataaatgaaaaaagccacaaagatgaaacatataataatagtactctgcacattaccatagtaactctgaaactacagaatttgggagatccggattacctacacggcattcgattccatcaggatttacctgatattaaatgcacaaaaattaaagttgtgtgatcggaaaggaacaacaaaagacctaccaaattaaattggctcataataacatggaaaaagcaggaacagaccctcaccttaaaaacaggtttcggtctgatagagagccataccagaccagcaagaatattggttacagccaatccaagcgtcaataaatcagcccttgactgtgaactacatatataaccagtaaaaatttacaaaatcaattatagaaaataccttataatttttattttattttttttaaactcataactaattaaaaacgaaaaagttcgtaatgcacttaacatggaactgtaagttaatcctgcaaattttttgaactactggagtgaatataactagagtttggaagtgaaatatattagagcttagaattcctcgatccctatctacattcttgatccaaacaataaaaaatcaaagcatatacttaacttttaagttgagacttaacaaattttgaactactgaaatcactaacaacgaaatttgaagtaaaattaatcataagcaagcattactcttttcctcacctgctggcatcagcgactggagcaatccccgaaactgttcggttaagtagaacagccaagagagaaaatcctccggcgtaaatgggaaaactccgaacaacgtcgtcgttattggagacccactcggccacccagtcccttcccggctttggccctctataacgtccctctgaattcgcagaggtagaagaagccctaatgaagcgcgggaaagttctatggagacgatgagggagagggcgtttaggattaagactccattgaaatggaaggttggtttgaaggaatgttcccgcttccattgaaatttccttttaattaaaaagttgttgagcttgtactttttatgtatgactatcacatccacataatccatcaaaaaatatcatatccacaggttgtgattccatgcgctcacgagtataatttaccacgtggaaacttacaaaaatactgtttttttaccaagtgttttcaaaaatactgggacggtaaactttacatttttactgtctaaacccatttttatttcttttat

SEQ ID NO: 379118 - DNA, 2327 bp, Cannabis indica
tagctagaacccctaaacacagacaaaccaaacattgttataaaaaaatgaatccatgtttgaaagaaagaaagagtacttaaattaattcattctttttgtcaagtttatatttgactttgctttctttcgtagtttaataacctgaatgaaattttgtatcatattttttccataagagcaatattcaaataaacattacagaaaacaagttaagaaaatatataattgtgaattgtattcttacattactgaagacagttggagcaccaggtcatttattaaaatgacagaaaaaaaaactcattctatttttcctgttcaaatccattccactaatcataaaataaaagtcattatataatagacatatatacatatatagatccatacagaatcagatcagtttggtcacatcgttcattctttctttagcaacaagcagtccattcattcataccaacgtatacataactggttggagccgaggatgattggtcttcagagttattgatcctcaaacattattaaaaaaacaacctgagagaattctataaatgcaattagaaaagaagaaaataatatatacaaaaagtattgttgataatggaatttgtgacaaagaaaatcactcaaatataatagagtaagcattaatatgcaagttgaagctaaaatattacaaaaaataatcatattttaataaattgtacaatgaggtagtggagcagcatagtgggcggaccactctcccggcaaggacactacaactatgagcccatgatatattgcagcagagcagaccaaagcaaattcaggactgatttagtttcctaacctttatttgttctcccggccagaataatataatatagaaaccagaaatcatacatgacatctactagtatgaaatgcacaagtaccatacctcttggttgactgcaattggggatgcgtgcaaatagttgtgtagccattttctgatcctcatgtgttgcaatctaatgactgtgccactttctatagaatcaccttatttagtagaagtttcaggtattggcctaataatctgcgatacatatttactgtaatgagtatattgtttcacatgttctaacattcttacagattgcatcattaaaagccatcaagatataacaacgcctccaattatggacaagggagaatgaaagtagatttctcacataacaaaaccaatcaaattaaaagcagaatccatggagcatgctcagtaagcaacttaaggttactattcttccattttatacatcataaaaaatagaggaaatatgaaacataaatttagcacaaccagagaaagaaagaaaatgcccaatagctgttggcatcgtcaacgttgggaaaactagtaaccgattgttgcaaagaaccatatggggcacgtcatgcaaatgcaatctaaacttagtcttctcatgtatcagcttaatcttcgtcccataggtaatctaatcaagccagattagagcttaaacctatgttttacttatttgattttgattaaattatataaaaatgtagcagtagccgaggaaatgtagttgttattgagattgaggaaaaggaaaagagctagagcaaagaaacaatttgtaacttactgcattgacatgttcaatgacaggaatttttgctgataacttattgtattctaaatttaaattactcaattgtaccaaagtggtaaattgctgacccttgctacacgctgcagctgcaactgcaacaaaataataattaaagcaagtaaaataattaatctctttttcgaagaatgattagattcaaataatacaacacatatctccctatgctcaaattttctttaagctatattagttctatatcttccactctcgtgaccctggtatttgtagagaatggtgaatcgaattgtgtattgtattttataaaatagtatatatttatatacaaagttaggagactaaatagaaaactactaaatacaagctaccctaatttttttacaattaatattccaacactctcccttttaatcatacccagcttgatacaaagataatcaacttgcaccccattcaaaacctttgtaaatatatctcctaattgttttccgtcttcaccctaattgttttccgtcttcacatatcctgtggagatcagaccttgttgaattttctcacgaacaaaatgacaatcaatatcaatgtgcttatagtttgctcgtggaacacgggattcgaggcaatatgaagtgcagcttgattatcataccacaattttgctagaatagaagtcttaaa

SEQ ID NO: 379119 - DNA, 2161 bp, Cannabis indica
acacacagatacattgtcaacttatccagttcattaataaatatccacaattttttttcttgccaaaataattgtaaaggtgcatttttattgtaatgtaaagatgtttcttgagtcgcctgttggtgagtcctgtagatgctttggtttggaagtgaagtacattttttcagacacctatgacattggatactacggaagttttccttgtgcatggctctattttttcacagaaagtttacttttcttatgaaattacaaattcaataatcttgagtttacatcttcagtcaaataggagtgataaacctttgaatttaattgtggataaatattctgcatattttaggtatcacaatcaaattgatttaactctttcactatttggcagtataattagatgctgtaacatttttagttttacatataaacatcattgatcaactgacatgcagtcagtggagaagatcgtatccagtttcttcacaaccaaacaactgcaaattttgaatgtcttcgtgagggagaggtattcgatgggatgtattatttatttgatttcattcatagagttgtaagattttgaatttcagttttgttcttatattaatgcaaccatacaggcttaagtaataggatttctatttgaaatccatagggatgtgacactgtctttgttacaccaactgctcggacaatagatattgcacatgcatggatcatggtaatccttttcttggtgattgtcttttgtaattatttttcgtctatataaatcttctgttttataatcaagaatatgtcattgtgttgtgtgtacagaaaaatgctgtgactctattggtttcacccgagactggtgggagcattgctgaaatgctgaaaaagtaggttggttgtaagtttgagttctaggtcatttctttttttcttggtctacactactgttgattaggtagtgtttggatggaaaagtatattgatttgactgggaaaacgagatgccatttttattatcaattagaatgctataactatccagaaagtttatgttaggatctaatattagctaagtatgtgcttagtgagtgtcttaaaactacttggaaacccttctctaataggctactcatttgggattaggttgtagtaagtggttgtaacaatggtagcagaatcattaccctgtagcgagaccaacatcgcagaaagggggacctgggtaaagtcacatgtggagtcataaaaggcatggaatggaagaagttcaaagtggatcatcgtggatgttgactctaaaaggaaatgtattgttaggatccttcatcaactaagtatggtcatatttgctggattataaacactgaggcacctccctttctatcttagtcttttgggagtgagtcttacttaagtcgctataacagtctaaaaatagagttaggtagcattcaccatttcatcacattgtgtttaccaagagtttaattatgtttaatctcaatataagtttttatttcttgacataagaagtgcctattacaatgaatctaaatcttttgcattgccttttctttttccttatttttgtagatatattttttttgctgataaggtagagatccaagatataactaagcaaacagccttctttgttttggtgggacctaaaagcaatcaagtaagtggcatcacgagttttccaatatttgagtatttgttcgacttcctaagtttgatgtttttaaatgtcgactgagcacagcttatggaagagttgaatcttggtgatcttgttggaaaaccatacggagcacatcaacatttcagcgtaagcgactacaatatcaagagacttgccatcctgttaataggttacttgtgcaacttgaatacataaatgattcagaccctttttcactttacaggttaatgggatgcccataactgtgggggtgggaaatgtgatttctgaagaaggctcttcacttttaatgtcaccagctgcagctgagactgtctggaagacacttctttcccaaggtgctatcccaatgggctccaatgcttgggagaagctaagagtttttcaaggtgatatagttttatttattaattttttcttttttatcctcttgctcttgccaaaaatacttgagtt

SEQ ID NO: 379120 - DNA, 5573 bp, Cannabis indica
aacaaaaaaatacatacatataaacaaaaaattaacaaacaaagaaaactaaaatttactactaataaaaagtactagttattttatagtaaataaaatacaaaaaatacgtaaaaattattttaaaatccgttgaaaccgtttatttttgtttatttttttaattgtttttgtgcattttgtgaaaatttaaccctattttataatcaagcagacggtcaatttgtattttgagtttaatttttcgatgaaagacttatgtgtaaaacaaatcacatggagaattctatttcaattgattttcaattatttatctaaggtgttttttttttttttttactttatttgaaaaaaaatgtttttcatagttcgttgggtattttattcctctaatataaaatattatggtgggttggtaaaagaaaagagaaattgagacaccttatatcatatgcacacatgatcccttagttgatgggttatatttgtactaaagaacatttgtttatactttttatagaatatatgtaaagaactttttcaagagaatattttcaataaaatatggaaaaaaattaaaagagtaggatatcaacccactccactcatagtcataaggtaacataaatttactccattcattttgtcttaaaaaaattaaaatttactcaactcattatcatttatctcaaatgacacattgaataaacaaaaacacactagagaaaactagattctaaatatgagatactcccttgaacattacatattcacaaatcccttaatcgagttacaaaagacaacacaggaaatcaaacaaacaaagaccaatgaagtggggatttcaaagcaaaattaacaatacccaattgatcaatttcaataaaaaagaaaagagaaaagagtagcatggattgtaaatggagtcaagtcaattacacaccaactgcaattagctattatcaaataatcaaagcttagtcagcatgatggggccagaaaaagtgtcattctcgacgtcatcattggccagatgggaagaccacttccaatttcttgacccaaatacaaaccccaattatgctatatatgaaaatttattatcatagagacccacatcaatatgggtcttttttgaactataatatttttattaatcctcacgatctcattagttattttaatacaaagcaagcataatattataataccaccgataactcattttaatttatatataatgaataaaggagagtagtcatagtagtttctttctccgaagctgcaagcttttgataattatttattggatatcgaggacgtgtgtagaatcatcctttattttttaccttaaaaaaaaggaccttaagattaaaacataatctggtgggatgagatcacttacttctttatgctatcattatcataataaagacataaagtaaaagaatggtacatactactaaacactattccataagcgattcccgaaacttattctctttctctaatgtgaccaacgaaaaatgatactgtattaatcgcaacaatttgtttgggtaaaagcacagtacatgcacatgttttaactggtgaaaattgcttaaattaaaagttatccaatgatctcatcacatatcccataataagctattcctataacttattctctctctctctatatgaatatatatatatatatatcttcttttcctttaatgagattattgaagatattggaacggcaacatcaaccttatctatcatttttttttctttttttctccttttgctggcctttatttgttttgttctgagttgatattcgcgtgtaatttgcttgtttatttgactattctgctttcaacataaaaatagtatttccaagtgcacatggaaaaaccaagtatacatatcttatacaagataagatgattacacatccgaaattgttgaaaattttggattgcttatatcatataagctcttaattacaagattctctatacagactacgactggaaacttaagtagtgactaatttaccagaaatattaaaaaactaatgccaacagatgaatatgtaagcactgaaaaaaagtgtgaagtactactggataatagataagggattatgaaatgtgaaaaagctttttgaagggggcagatttcataatgccaagacaaggcctgcctttcgacactgtctccctccttcccacgcaaaggttaattcttttgaaaagcaacctcttgaggtagaactctatgcaataagagaaggatttcaggctgtgagattagataccaatgcttttattcttctacaaaagggttgatgagaatgagattaactgcgtcactaaacaacggggtgggttgttacatgaccaatcggagtgctccaatgatgtcatgctgattataaggagggcagataagtaatgaatagtgatctaaattgtattgttggcaatattaacttttctgtagtttcaaagcaatgaagttcatgtttagggctggctaatattatctaatggttcagcgaattcagctttgattactaataaagcttgtgctatgtagggatcttccttattgctcgctataagtccagcttccagaaaaatacgtgccaaaaaggaatctatacacaaacataatatttagcttgaccaatgcgccttgaacgatttcaggttttgcaaattacaatagttgatcacttgtttaagaatgcatgtgtaatgcttgcacaaaggagagttttatatttaaatgccggtaatgcacatgtgccccatacacatgaaaagatcacagggaaaaaacatttcatataatcaccaacgaacattatggattcatcaaaaatagaaaacgaacattgtggagaatataatgaaagcatgaacaaaaggcaagctactgaatctattcgactgtttttgtgctaaatcatcaactgcgttgactttaacctgtctaacatctacgataataaccatgtttcaatcctgaaaaaaactatattctccgacaagctaaggcacatcttttaccagctagtgttccatctagctttactcacctctggtttggttgactctcaaaattttacaagcatgataatactttaaatattagaaatctcacaaagaagaaaaacatacaactcatgtaacaaacccaaaattagctttttgtaggagcgacctcttgtattgtgctcttcctcttacctagctcctgcttttagcaacaaatagtaatgccctccaatctcataagagcaaacacatgttttaacttggataaaaatatccaaattttacctttgaaacactctttatggcccttcatcatgaatttatggtctctctcccattagaaaagaacaaacacaggttcatttagtttgataacattcccaacttttaccttcgaagataacattcccaactaaggtcttaaagtcaccaattgcaaaagaacaaatatatttatttagtttggcaagctcttatattgctctagttttgataggaattggaaagctctcatattactcgagtcttgatatcaacaaacactaattttgaaacccattagttgattattattttaaacaaacccaaaagttttcaattcctattgtatagtagaggtaaatatgaatctattttttggtttattataagtagatcatagagaaggtatcctagtccattcccatttttaccctcaatcacaacaaatgattacatgaaagaaataagaaacaagggcagatgggactctagagtgttcgattaaaggaaaacctgtgtgcttcaaaacattttaacatgtgaaattgtaaatgaaatatctaatcaatggaaagtgcatacaaacggtgctttatttatttccaaagtacatgtttaagctaaaaggcaacgttgcaaaagttgaaatcttcattagacagcaagactttcttaaatgttataagtcagaactattactatcatagtaccatttcgccattagagagatgcacagcataatgcaatgcccttaatgaacctcaaaagagttcataaagaaaaacagaaagttaagtcagcaaaaaagcccaaattttctgcaatgtcatcacaattaattatatatagaacaaatattcacttccagattctttacttatttccaaattgggtgctcatgaaatcacagatgaagttctctaaaaattggaggaaaacattatgaaagcacaaaagccattcagcattgactttggaatccaaaaaccacaatttaacctcagaaagtacaagaatgatccgttgttcagcaaacaaaaaagcaaaagctttaattcgagaacaacattctggttattgaccacaaataatatcaagcaaagaaactaaaaataagaaaaccctaaaacatgtgaaattagattttctcatttgtggtaacgagctacctcatggtcgttggggaaaaaacccatgagtctgccagcagagttctgatacgcgtacatgaatccacccataagcccaattaaacctccagttaccatagatggtccctttatccctggctttattcctacacagaaaaattaataactaaataaatagtccattatctacaattacaggaattcaagagaatacacaacttcgtgagaaaaatcgaacaagattataaagagaaagacctgaaaggtagccgacggtgacggagacgccggtgatggtgacgaaacgaaaataatcaagagtgctgaagtttccaacgactttggtaaaaggaggattccgatctacaaccgggtactctggtttcgcggaggctgtgatgtctgtgttcatctttgctctacactctccaagtccaacctagaactggcttctcagctttccttcgttccgtcgatggagttgaaggactttcttctttctttctctcgctcgcactatctccatcaccatgggcctctttagtattgggtctgggctcaaatatccttgggctctggtataattggactcttgggctctacttagtggagaaattttctgatatcatttttattaaaatgtgctgaaatataatcacaaaactaaatgtaacaaaagcaaaagatacgaatgtgttcacacagtcaattaactgacaaataattaactttaaaaggtcaaaatgaccttgtcatgtcacttttagccaacgtcacttactttttggacatctacaatcagaattttccaattttccaattttttgtctagttgttataattgttgctgattagttataacagttagcttaactaactgattgtgtaggttttgtaaataattctttgtaaggttctctctataaataaacttcaaagtttactattgaaagctaagatagtttttactttttaaaattgtgtttttaaaagtgagaatagaaaatagttttttgtcattttaaaattttaataatgtttgacacaagttttttaaaactatttttaaattttttcttactaaaaaaaaatgaatattttaacacta

SEQ ID NO: 379121 - DNA, 3378 bp, Cannabis indica
aaaagaaaccattaatgtggctttcctatgagctttccactgccttgtatgctgaagtacaaaatcatccagcaaaggcaccctgttctgagtggggatttcaaattagacaaatggggatggcgagtcttctccgttatcatagtacatttggttttggacggcttttacagctgcgactctcgctgcatttgcagctctattagctgcagctactgctctgctcactctctcatcaatttttgcaacgttctgcgccctctcagctgctcgctgtgcttcctgttcacaaagaagcttttggttaggagatatcattccttgaaacaaataaaataatatatgaacagctttagctcatagatacatataatttcgaaaagataacaagaccgggaaccctatatcatggttaatgttcttgaattattgtatcccatttgagaaataggaagcaaagaatgtttatattgctataaatgatatctagttaaaccatcaagggtaaagcatttcattttcagcaacaacttaaagggattaatgacttgattagagtgcaaagtatggagcatatgtctaatagtttgtggtgatatacatgagaagtgactgaaacataagcttaaattccaaaaccataaagtaaagctaagctatgaatcatgggggatgaaaagttttgcactgcaaaatcacaaatcataattacctgcactgcattgagaaccctggcgtgactgatggttcgaggagagtcgggatgtgtattttgaatgctagtaacatcaagaaatccattttgccaatggccagattgtttttcaccgtttctgaatgtgtacataccaaggccctgccttcggccttcatgccaggcaccttcataccgatgcccatttgcaaattggtacactccaaaaccatgcattttgtctgcaaaatattcaccagcatatgtatccccatttctgcattatcataaatgcaactatgtcagaaacatgaaagcatgttcttttcttgttcttctttttctttttatcagaaagaagcaaagagagaaaaacataaagatgcatatttgttcatgttatgggcactgggcagcattgattagttcaatgcaagacaagtcttcattcattggcattcccaaatttaagaacagcaaagtgatgacatacaaagctatacacaaatatatgcacctgacacctgtataccaaaattttcttatatgtattgtatttgtgaaaattacttccacagcattgaataagatgtgctgacacagtattttcataactgttttatgtgacacaaatgtccaacttctaatagacgattaataaatgcatatcaatatatagtgtaagaaattattacagtaaaataaaacaagaaactcatgattgaaagaaataaattcatggcaagagaactgagtttgacccatactgtccggccatttcaataagttcacttccattatatagttttcccatactcattattatttctactgccgctgaatagatagtcctatataacttgaagtgaacacagaataagatcattagctaatatatgcttaacaagtagtatccatttctatggctgtataaccagaacaccaaaatgagcttaaagaaagaagcttttgttaattctcaaaataaccaaaatgagaattcaatctcaatttcatcagagccaatcgaacaacaacaatgaattgattattgagccttaattacatcatcaatcaatgaggtttaggctactacaaaaaaacaacatattatatagaatgaacaaagtacctgaaatgataatgaccaagtccatgctttacaccccacttgaattccccgatgtatttactaccgtcctcacaagtatgaactccacagccatgacactgcccattagaccattctccagcataaacatctcctgtgtagaatctataaaccccaattccatgccttaaaccttgcctatactgacccctataacgactacctttagcccaagtctcaactccataaccatcatacttctcatcaatccaatccccttcatatctcccactcaagttgtaatagtaaaccccactaccagagcatttacccttatgaaactcaccttcgtaaacatcaccattagtgtatactttgacccaagatcctgaatttatcctcttctccgatttgggtttcgacccaattgaccatagaaccggttgaggtgggtttgagccacaagaaggcggaaatgactttgttggcaataaagagcgagtgaggaacaatcgaatcgagagaagacgcgggagagcgagatttagagaaacaaaaagggcagcagacaaagcaaggaggaaaataaaatcgaggaggaaagagcggcgaggattggaaatgatgaagtaaagtgaaggcaaagaaaggagtataagcaagcgaaagtgtaatcgaagcaattgggcacaacggaaatggcgaacgattctcaaagccagtgatcttgtagcgaaaggaattactccaaacgatgaacagcataaacagaaaggcgaagaagaagaagaagaagaaggagtctgggccgccatcataggccttgttgttgggtttcgtgagatgggttgttcatgaagaagatgagaaggggtatggttatggttatggttatggtgggttgtgatgagctttgatggtgggtttggtgatttagagtgatgggtttgcttggaaagcaagtatggagagatttgttgagtttggtaatgggttcggatgtgtttttgaggtttagaagagaaaagaagaaggggttgggttgaaatcggaagaaatgcctctgctttctttgctgatctgagtttcggatttcttctgatgcatttacataacaaaatccactcttgttcttcttgttctcgtagttgatgatatttgtaatatatttatgttttttttttgagtaattttaattaatggattgcaaaaatcagaatagccaaagaaatttagatagaaagatagaaagattttggtgtgtgtgagtgtttgaattggtatttttgttcaactggtatggtatggtatttaatctctggttttgtattgtattctcttgtagggacgaaaccagattcaaaggtcggtttttgttgtcttttcataactaaccctcatatttccttttatttacgttcttgccactttgtttgtttatttttctttttaaacaaatgggtgataatgcataaaaatactattagtgtgatttgtcatttacttcaatgttaaaaaaatatctccttgttattgtaagatccatccatctgtaaggttttttttttttttt

SEQ ID NO: 379122 - DNA, 7040 bp, Cannabis indica
atgcctttatttatttatacagacaatgatggcatttgctttgcttggtgtttggttttgtactacttacttggtataacaagaaaaaataaacactaaagaaaaaaaccaatactaaaatcagcagtatatgctttcttttgtagcaataaacaacttcattgaaaataatcataatatcatacattgtcaaaagatacattcttggaaaaatgagggatagatctatctaaacaagttctctatccaacatttatctaaacaagtactctatccatctaaagagcatgcacactaatccacgaacaacatagattaagaatactcctgaaaaatcggacgagaaacttgtaataagctttaacaaagagcaaggtcagtgaaaatggtagctatataagaaaaagatgacacaactgctagaaaatagtggaaatatgttgaaaaaacatgaaatgaagcaaaagggcataataataatataatgtcatcattagaaataagatttattttctctacaagacactatatatttgtataaacaaagagggcattttctttgcttggtgtttgatttggtactactttggtatgtatatatggttatggcttttccataacaggaaaaataaacactaaaaaaagactccaatactaaaatcagcagtatatgtgtttcttttgttttgtagcaaaaatgaacacctttcttcaaaataatcataatcctaaaaaagataaattcttaaagaaataagtgaaagtatctatctaaacaagttctctatccatctaaagagaaagcaaactagaaaattggatgacaaacttgtaataacctttaagaaagaccaaaaaggccatagtaataaaaaaaataataatgtcatcattagaaataaaaatcaatttgttgagcacaaagcaaggcaagagagaatttacctttttactttggatttatttgaaaataatcctaatatcatatatctaaaatcatacattcttaaaaaaatgagggatatctaaactaattctctatccatctaaagactatgaacaacatagagttaggatacttcttagaaacttgtaataaacttttaacaaagatcaaggcaaagaaaaaacagacacaactaaaaaatagtgggcaacatgttgaaaataatcacaaaagggcataataatatcatgtaagattacaatgccatggcattttcaataacaagaaaaataaacactaaaaaagaaaacccaatactaaaatcagagaaatgaagcaaaggggcataataataataatgtcatcattagaaataaaaatcaaatttttaagtacaaagcaaagcaaaagaagagtaattttaatcaggtagaagagaagaagaagaagaagaaggaatggactttttctgcaaccatgggaagcgtttttcagatttaagtgagatgaaagtttctctagcattgggattattttcaaataaatccaaagcaaaaaagtaaattttctgatcaagaccttgcatctcatcatccaaaacattgatgcatttggtaattgagaaagggtcttcttcattgttcttcatgattgcagctgctctcatcttcgaagctgaagctatttgaagcatagcatcgacaatggcatctccagcggctttgcgacttctcttccgacgacctccgggttgaagacgtttgcttgagtcgtctccggacccacctgaagaagcatcctcatccatgaaagcaccacgaggatcagcagacatgggtaagattcactcaactctctctctctttgattcaagaatttttagtgttgataatgaattgaggtgttgaaatgagaaacccagaaatcaaaatcagttatgtgatagaaagtttgaaactttgaactgaaaagagggtaaattaagaaagaaagaacaaactccaattatgagttgtggtttagggttttacttttttttaaaaaaataatttattattttattgtatttttttttgtctagtctatctatgtaattgtatgtaagaggaaaatcataagggtttctaacataaattaataacaaaataatatatatatatatatatttttaaaaataaataaatagaatttgtctcgccatgtaaagttttgctctttaagaactcgtttggtaagtcgtattatattgtattgtattatatattattgtgttctagtaatattatataatacaatactatatttgatattgacttgtattaataatttgtgtaaaattatattatctttaccattaactcgaccccaactccgatcccgtctaggttagaggtccgggtgtagggtctaggttcagattcgaggtcccggtctaggtctggggttcaaggccgaagccgggtttggggcctggatttaggtctatggctaggactggggccggtgttagggcaaggtctgggtctggggtcttggtccaagtttggagtctgatatggagttcgagaccgaggcggagtaaatttatggtcgtaataattatgatataatgtgtaatttggtgcacaataatttagtgtatatttgaagatctacactaaattggtgaaatattacactcttaaagagatgctctaacaaaagtgacttcaataattttgaggccattttaagccgaagtaccttactcataataataatataaaaatatatatatagttgctaatatcttattttttaaacactagctcaaatagaaagagagtaagaaagatttgaatgttcattcacaacaacctccattgagttatttttgcttgttggttttgatttgattttgttgcatcaaaatgttggtttaatctttcctcccaaattgatatccccaactcaagtttttgtttctctgttataagttaaatcacccaaagaaaggaagataaaccaagttcctctatcgccttgagtaagagatgaacaccacaaaaacaaatagctattctttcaatatctttcactgaaaaaatgacatctcaattcgattcaattaaagcattattattatctacaaaatgtaatataagagaaattagatgagaagctaagtaagcatatgatgaaatcattcaatttgtttgttcattcattccaatgacttgagaagcctaaacaatgctgctgcttctctaatcctcgagaactcgatacaaaatgcttgaacttcgatgaacagatccttaactgtaaccatacatcataaacaaacaaaattattacctatccaatcactctcaatagtaatattaataccaaaacaaaactcaccattgatgatattatttctgataaggctctgcaaaaaaacgcatacgagcctcacaagtctgttttgcatgtatttatcctgataccaaaaaaaaaggcataaaacatatgataaaataacataaccatgacaacattactacatgcatgaacacctgcaaatattttggattcttcacatcttggcattcaaacattacgaaaacaaacacaagggcatgggtgaagtaccttgatgttctcgcaggatgatatacagttagttatgtacatccgaataaactcagaaggaagttctactgcagttgttagcctgttcacaacctccattgagtgaagactcatgtccatattgacaagcactgtaaagtaactatgtttatgaaagacatgtcagaataagcaaatctataacaattgcacctaaagtaaataaataaactaaagtatcaaatacgtactccgctatttcaggggagtttatcaacttagtaagaacttcaacagcaataagaggattattttccaccagttcctgaaagaaatacgtgtttggcttgtgataaataaataccaatgatgcaaatcaacaattatgttcagaatcacatactggtagctttcttggtgtgagtccacagtgatatacaagtttagggtcatttgccaattccaataaaacttgctggaaaaagaaaagggaatatattgggttagctaaaaataaacactccgaaatacgccattaacatgaacatgacttgtaattatgtatatgtagtgatttttttttttgaaactggaatccaagcaggtatactcttgagtgatatgcatggtctaacttcaaaaagatataaaaggatgaaaacacacactcatgtactcagaaatatatcataacatgtacatcagcacctcttgttggttaggaacaagtggccctttcaaagctttggtgatcaagtctcttactgctgttcctctgctagtatcaacacacataccatagtcccataatagttcatgattatcaccagggttcagccataccaactgaaagacagtatgcatatatcaataaaagaaaaactcaagtgagctctaaaataagttacttttaactttaaagtatcttacttcaccatcctggagtggaagtcttggtggaacaggccggctccaatgaggacctaacccttccattgataaacttgacaggaaccccagaactgtctcatctctatcaccagatccaatcttaggtttgtctctccattgcaaatcaaacctagaacatgatcatcaatgtcaatatatgcatgaaatttactgagaaaaatagcttaaagtaaaacaaacgggcaaaaggaaagcagaaatactctgatgaattaggatcgcaaccatcgggaacatcagggtctgaaatgatatttctaactgagccatctttaaataggcagttataaggctctggattagctttgtcacagtattgttgctccaactgcgcttgctgagggaatgcctgatacaaacgaatattaaccgaaaaatcaacaggactgtccagtgacataaccacattattacatattgtgcattgtaaaaagaaacaatctacatacattcattgacgagggatcaaaaccgttgatgtagtctgtagcagattgtttaagaaactgcaatgtaaatccgaaatctatattaaagtctgtaaataacaaaagaaatgcaacaaattatagagtgacataaagaacaagtacattgtgattcgtataaaattcacaatccatccctaaccaatttctttcttcaacctaacacttagctgcctaattacctctaaacagcctcctaatcattcattacatattgttcaattttggctgaaagaattaatcaatgaaatgttggtatccaaatttaaaagagataaaaatgaagaatgaaaacctctttgccattactggaagtatctgagcttaaaagcagaagaagaaatgccctctcatacttttcagcatcatcattgcaagcagcctaataataacaagaaatgaatacgagactgtaaaaaatatgcagcaaaccatttcatcaccaatttcataagatcaaacagaaaaaaaaatcagaaacatacagtgatgaaaagagtaatgaatggattcgcagaagaagtctgagaagaataagactgatgaagaagcgcaaacgcaatcaaccgttgagtagagttaagcatcttcttatcctgaaataaggtgaaacaacaacaaaaaaaaaacctaaattgtaaccctaaaaaaccgaaaaaactgaaaatgaagatgagaaagaaagaaaagttacctgtaagagagtggaaagagagaagcaagcgatgtagtgaggaagagaggttgtggggaaaactgagttgaaatcggagatgatgtgattgagaggtcgttggtcggctctgagaaaagtgtaaagcgttttcgattcgtcggcggtgagaaccatcatcttcttcttccgattgaaattgaagttggaattcatggctgatttcttctgcaacaaatccgaaatccctaatcgaaattcccaaattcccaaatctcaaatctttatgaactccaacaggaactggtcttttcaattttttccccctttatttattttgatccaaattcccaaattaatttaattaaattaaataaagtttttcttttatttattttttgaagaaaaataaaggttggttttttatgaaacaaaatcaaagataattaatatcaatatcaccttttgtagattatataaaatctaaatattaattaattgccttttaacatatattctttaaattttgttgttagatacagtatcatatcatatacacctttttatttttatttttttggaagaaaaattaataatatatgttcgaaaaagaaaaaggtttttaatactataaaaactacaaattgtatatgttagtgtataattttttttggttaagaaaataaatgaggcacaattaaattataagatgtatttttttttttttgaaagaaattataagatgtattatattttaatttctgttatatatccacatagaaaaaggtgtttttttcttaagaaaagaaaaaagggttagaataatatgaatttaaataatgactaaatgagagaataattgtggtaagatttaattattaaatactttagttatcttatataattttttgagttaattattaaaatattttgatattaaacactaataaaatatttttacctataaatataatgtttattctgattttcagtaattctatctaaaagagtaactgagaatttagaaacttgagtactcatttctaatttcaaatctaaagttgtattataattaatagttaaaggtatttcgattcatttcatcaattttatatatatgtttaatataaattttaatttgatttatctattcttataattttttaacaaaagagttttgattttgatgaggttaataatgagtatagtcatagtaatttagtaaattagttaaagtgttcaactcaactcaagaatcactacatagtgagttgagttcacttgtgttgtaagagaatgttatatattgtaaagtcaactaattttttcttttttttttaaaaaaaaaaaacaataataattatat

SEQ ID NO: 379123 - DNA, 1597 bp, Cannabis indica
aaaattacaaacatacggttttacgggattttaaatattttttatgattttcttaattttatttatgtactcttgatagccaaggtatttaaggtgaaattttgagtgcaagaaaagtttaaatggagagccatctttgtcattattgttggtaattattatgctatcgacataaattaagagggctaggaaaacattaagagatgaccttatgaatagagaatgatcattaggtgactatttgaatctaatgctaaggagaatggagcttagcttggcaaactattgcttagaaagactgttttaaaccatacagactcttgttgagtttacaaactgtatttgggggtagctccccatcatccacataatctttggcaaatggacatatagacatgttcgtgtaaatcgtcattaaaaaagtgttgttgatgtccattttgtgtaaattccagttgtttacaatagctagagcaaagaaaagttttaagacattacattttacagctagttcaaaagtttcaccaaagactgttgttccactattaatagttctctcaggtccacatatttctttatcaaatcttgtattgataatgtcaacttcagcaatcaccaattttgatttaaatgagtataccaagaggtttgtgattgaatgcatgaaagatattcttcatttgttatcttctcatttaataacataagacatttcaaaaaattgtgctgacgtgaacatgaaactcggcatattgagtaccatttgtgagaattataaatgtggcttaacagaggttatatggtttactgactctgtcaatgattcgtttaaagtaaaagaaaaatttgtcgcttactcaaattgttgaaagtgtctttaatcttgatgaatctcttatcagtgacttttttcgtcgtgatgagaataattcgacaactacaaatcgtgtgtctatatccatctcaaacaagacaaaggcctttgaaaatttgaagacaaaggaggcaaatattattggagcggaactggccatacaacaacaagaagctaggtttgaatatgaaaggcatcatttgaagaaaatctttctagttttaatttctctttgaagaaatagcaatgtcttgctaagaagataaatcaatcaaaggactaagctggtgttcaaaaattctatgaagctgaaagagcgaaaaacgacactcaaggtttaagaagaagaatttcagagaaaacttggcgctttgactttatttctcaagattgactgaagatcccattattttgcctctaaaaaatttagttttagtttttagttctgttaatttttttgtttattggctttgagaacaaatagtattttatcatttagacattttagaattttgatttccttgtaggaggaatatatattttatttttgtggttgcatccaattttgttcagattctcaacgtacccttttaagggatcaagtcattcgtagttctttacaatttttttaggagataattttttttgtgtgtgcttggacctagttataaactagattgcctacgtaccaagaatgagatcaagccttacgtagttcattgc

SEQ ID NO: 379124 - DNA, 1884 bp, Cannabis indica
aaaactgtaaaaatatttaaattgtaattcattttgtaaaactgtaaaaatatatttgtgcgtaagctacactgttgaaaatggcccatttccacgtcatacatttctaatatataataacataaacacacaaacgccaacttcatcccaaaaatatatcaacttaaaaatggctcagaaaaccgaagaagaagcaacaatagatggagacatcttagaaaccgtcctatcgcgagtaccactcaccgatctagttgccgcgtctagagtttccagggattggaacacagccgtctactcctctctccgccacgtcaacagaatcaaaccatggctccttgttcacgttcagaccagacgacacccctacgcgactacctcatacgcgtacgacccacgctccgccgtctggatccatctccaccaactaccaaacctcaaatacatctccgccctccgctcctcccactcaaatttcctctacatgctttctccttcccacttcgccttcacctccgacccactccgcctcacctggaccaaagccaacgcgccgccgcgcgtctggcgaaccgagccgatcgtcgctttagtcaacgacagcgttgtcgtagccggcggcgcgtgtgatttcgaggacgatcccctcgctgtcgagatttacgacctgagaactcgcacgtgggacacgtgcgagtccatgccttcaactcttaataactccgccgcctcgacctggatatcgatcgccgttcgcggcggcgatttgtacgtgtgtgagaaatcctccggactgacctactcgtttgatcctgtaaccaagtcgtggcgtgggccgtacgatcttcgtcccgatcagaaagttttcagctccgccatcggattggccgacgggaatttgatcgtggtcgggttattgggtagctccgagagtgttgaaggcgtgaaattatggaaagtgaggagtgacgaatctatggagtgcgaagaaatgggagagatgccgatggagatggtggagaagttcgtcggagaaagctactgcgtttcgtcagttacggtggcggcgatgggcaaaatcgtctttttacataacccgactgacccgggggtagtgatccagtgcgagatattggatggggagtgtaggtggggatgcgtacggaacacggtgttgaacgacggaagtcggatgcaattggttgtgattggttgttgtgatgtggacattagtgatttgatgagaatggctataaaaagtgacgtggaattgggcccatctgaaactgcttacgtggcttcgcatgttgtggattaatatatttttctcagaacactgcgcgatctactagaatttattggtctggcatttatggagttaacacaatttcaattatgtttttttttttttataaattattattttttttctattatttctctttatattttcatattaaaaacatgtggaatttaataaaattatgataagtgattaaatttgtgtttaaaatatatttttgtgttatttttttaaatataaaataatattttggtgtgagtggtgaccaacattacataaatattttataccccacgtgaagatattatatgtatttattgttgtaatttaataatgagtctaatatattttagtttctattgatttatgtagtgtttgatatttctattatctataatctttattgttctagttctgtttgtggattctcttttctcccgttaattgtttgattttgatagagaaagagaaacgatttctcattagcttttctcttaaaaaaaaattctcattagcttagaatgggaacttcataaatatcaattaatttttatatctcttattcatttatcttttttaga

SEQ ID NO: 379125 - DNA, 1418 bp, Cannabis indica
taataaaaaaagttctttttttttctcgatcactcttcttcttttactatcatgtgtatactaaaatatttgaatctactctataaattatttagaattctttttaaaaaaaagttacaataattttaaataactataattaaacaattataaaaataaattatactaaaaaacttatattagattttaaatataagaagtgtataaaattattttttattttctaggtgtgcactacacacttaaaacataaatattacatataatatatatattcagccttcattagaaacaaatatatctatatatataatttattcttgcaaacaacattacaaacacttatatcatcttatcgtacaaactcagctattgtgaaatttatatttaaagaaaaaagaagaaaaaatctattttcacttctatttaaattttatccccaatgggggagggaaaagaaaaagagaggataaaatgtgataaggaattttaccaagtcaattagagtatggaaatgattggccaatagggagtgatgacttggagtggagtcaaaattgttgactcgtgaaacttacggacaacgagatctggcgtcggcattatggggaggccgctaaagctgttagccaaaatgaacacattccttccttggagtatcagattttgtctttatgcttacgtggcatcttaaggacttgccaccaaaataagggtccacgtggatgcttgccacgtgttcaatcagaagagagccgtgcgacgcttgtaggggaacaactgagttgtccgtaaactcccaacaaaagtgggcccttttgtaacagaaccctttaacagattctattaattctgtttttctttttattatttatttatttatttaatttttacaaaaatggtttgttgtgtttctgctttggagattagtttcttcttttgtttagactactagagaagcattattcagtttctattaatggagcccaccttattaattcatggcctctagaaacctcttaaagcaatgatattaatttcttttcacatgtcttcatctcaattataaaaacataacttcttaatctatataacttaattaataatcccttgcttttgcaaaacttgttcgtttcgattattcgaatgagtttattaccaatatatatggtcccctttcatggctataccattcttgcaccttaagatgaaacattaattggctcgtctttcttctataattggacttcatatttttatttcgtttagaaaatacaatgtaattttctaaaatttgttttacgtagctaataatttattaatttaattagtgtaaatttgattttattttcaaattatatttaatcaatcaaaaaaataaactcatcattttgtaaattgcactcaataaataacct

SEQ ID NO: 379126 - DNA, 4934 bp, Cannabis indica
ctctctctctctctctctctctctctctctctctctctctctctctcatgaagtattcttttcttactgacttaaataatgatacagattgttagaagataaggattagagtttgtaagatgtgattaagctaagtcaagtgggcacatgagatctgcttctgctgtggtcttgccccaacatacacaatggcttcgcgagcaatcttgctaaggaagcgctactaccctttcaattccttgaatcagcttacattcttgattcgaggttcctctagtgttgagcgcgaagaattatcccattctaatgactttcgattgttttcgagtcaagtgttggtaactactgatcatagagatgatgaggttgaaacttcatttcttaagaatgtaccttctactcttagagaagttggatttttcaggcataacttctttttgagcaatggaattggaagggaacactttggttcctcaatgggagttatgcagactttgcagtctatacgatattattccacagggatggctggtcaaccagaattcgagaatggtaggcatggaaatgaacagcaggtttctggacagaaaaaggaagcttcaccggaggagtgtgatgaagctgttgaaggtttgagcacggtgaaagccaaagccaaggctaagcagatacaggactctccaaagagtgataaaactgttatgatgagaatgtggactgtgcttttggggattggaccagctctgaaagctgtggcttccatgagcaggtttatgacttttcgatttttgtaaggttgtgcttggtttagtttgatgcatctagtaattatctcattttttagggaggattgggcgaagaaattaattcattggaaggatgaatttaagtcaactatgcaacactattggttaggtacaaaactcctctgggctgatgttagaattagctcaaggctgttgttgaagcttgctagtggaaagagcctttctcgaagggagaggcaacaactcacacgtaccactgctgacattttcagactagttccttttgctgttttcattatagttccattcatggaattcttgctgccagtattccttaaattgttccctaacatgttaccatcaaccttcaaggacaagatgaaagaacaggtaaacattctcaacaaaatcttttcggtttatcattgctgcactgcatccctttgtgatatctgtttttgctttccaagttttatttgtctaagaaggtttgtgtcaaaattcaaaatgtaggaggaattgaaaagaaagctaaatgcaagaatagaatatgcaaagtttcttcaagacacagtaaaagaaatggcaaaggaaataaaaacctcgcgaagtggagaagttaagcagacagcagaagatcttgatgaatttatgaacaaggtagggatttaactcttgatcttttatctctcctttataagaaaagaaagcttttatgctgtttttggctttactgttttgcatttggttgtattgtaccatccaacaggttagaacaggcgagcgtgttgctaatgacgagattttaggctttgccaagttgttcaatgatgaactcacattagacaacattagcaggttgaattatttttaataagattaacttatttgggaatttgtttgctcatttataggtcaagattatcttatgtgatgttattgatttgataatttacaatttggatgctttatacagacctcgtttagtaaatatgtgcaaatatatgggtattagcccctttggaaccgatgcatacttgcgttatatgcttcgaaaaagactacagcagtaagataattttatcattatccattcataggtatatgtttagtttctaaatttttatgtaatgcatatattcatcataattggacaggatcaaggaagatgataagatgattcaagctgagggggtcgagtccctttcagaaagagaacttattttagcctgtagagaacgaggcatacttggaacacgttcggtagaggaaatgagagaagaggtttgagcttaactaatttcacctcatttgttactgtcagtgatgtcaacaagccattttaagctttgactcgctgcaatctcttctaaacagtcacagttatatcgtcagcttgaagtacactatagtgaacaaaatacatcgtaacatattatatatgccgatagcctgatatggatctattttagtatttgaaactcttcttcattttccatttccctcttttctgataggaattccctatcaatttaattttagtaactggtatattgattaatagaacgtaagagtacaaggttgctgagaggctcagttctctccgaagtgttgttgctcacttaactaattcattgtctgtcccaaaacccttcactactcactcatatgtatagcataaacttctccttttacaattaccctccttatttatcctaaggcctatcattttcatctaagattgaacaggtttttgcataaaatcagaagaaaataataatagtaaaagcttgttcatcaggcatgtaactttctgtctttgcagttgcacgactggttggatttgtctctgaattactcggtaccatcttccctcttgatactttcaaggtacttacaaagcatgtttgttttaaactatttcaaggcgaaactgtgtgcaactttttctccttttggctggtaaactatgcagagctttctcggtgcatggtaaagtcaagccagaggaagctgttcaagctacgctctcctctcttcctgatgaggttgtggatacggttggggtgactactttgccttctgaagactctgtttcagaaaggagaagaaagttggagtacttagaaatgcaggaagaattgatcaaggttggttgattcattatgctataacttttgatatttgttgctctataactgtgttatgctacagttgcgtttacttcggttagtgggtctaatttgattgtttgtgaaggaggaggaagagaaagaggaagaagaacaagccaaactaaaggaatccgctagtaaacaaacagatgtggctctagaagagatgactattccaacagctagagaagcacaggaacaagcaaaagcaaaagctttagagaaacaagggcaactttgtgagctcagtcgtgcattggctgttttggcttcggcatctgtaagaactataagtaattttacttgttgtgagttgaccaagtgattttcttttgttaagtaacaaaattcacattgactttaaaattttctttgtctaccactctcagtcagtcaggctggagcgcgaaaagtttttgaaacttgtgaaaaaggaggtatgcctaataattgatttgtgagaaaaatctgctctttggaaaattcatcaaaatgacattgttatatttgtatggcaattttccaggttgatctttataatcatatggtagagaaggaaggaactgatggggaagaagaagcaaagaaggcatacaaagcagccaggaaggacagtaatcttgctgccgagacggctctcggtgacaaggcttcttcagcacttatagacagggtaaatagaactatccaaaacaatcttaagctttcttttaacataaattacaactaaactcgtcagctatatggtgttgtgctatgagtaattagcttatgttcatatgaacaaacaggttgatgctatgcttcaaaagcttgaaaaggaaattgatgatgttgatgcgaaaatcggggatcgctggcagttgcttgacaggtttctcttgttgcattttcttgatgccaaaataataatgatgaaagagtttcttatctacttttttgtttgtgcagagattatgatggaaaagtaactcctgaggaggttgcttctgctgctatgtaccttaaagacactttgggcaaagagggcatacaagaacttattagcaacctatccaaggatcaaggttagtatataaatctgaatagaaacatctaacagatgcaagagtcgagagtcgagcttcgttttctctttttaatcgttatacattgttcgaacagagggaaaaatactagtcgaagacattatcagattaggcggtttaacggaagacactgacacaattgaggaaaagaaagcataggagatgagatgaaatcaaatctcaattgtggctctgctgctgatcatgtcttgcattttactatatgcttatatgatgaagcattgattagtttcttgaaggaagcatttttcacagaccaataatgggaaggagattcattggtaaaacatcttgatcttgcgaacataccatgtaatctagatgtagtgtaatgtcaaatgtgttatcattctaatttaatatttgaagtgatactttacaatggattatcaagacaaacgaaacaagattcaccaaagaacttgagtgagtaataatgcacgagtatagaagaattagaaaacgattattgttaatcatgataataaagaatagttacttattatgatcaaatattaatagtacattttggtggattgaataaataattttttgttaattgagaattattattaaagtttagggaaaaaaatgaatccgaattccaaattcaataatgttttttaattacaatttcacacacgtgcgtttgaaaataactgtgtaattactaggtagggtaattacgcaatgtagtaattacactatattttaaaatgcaaggtatgtttggatatgaggtggtaattacatataaatttctaatatcttgtttagtaaaatagttagtaattacatgggaaaataatattttttagtagctaatgtttaatatggaaaaattttagtaattacacagtataattacatcaattctcatgggg

SEQ ID NO: 379127 - DNA, 962 bp, Cannabis indica
gagagaagaaagttgctttgaagtgattaagttggcatggtaccattctcgtgatgttggagatccgggggacattgtgagaagactccaaaaggtgcaacagaaagttctaacctggagtaagagaaatttgggggactgtaacgagaaattgaaattacttgagtctaaactgatggatcatcagagcagagaagagacagtgacgatgtctcaagaagaagaaataattgagaaggagatcgctgaaatttggcttcgtcaggaatcgatttggcgccaaagatcaagggaaacttggatgctcagggggatagaaatacaaactttttccatgcctccactcagatcaggagaaaacgtaattacatatggtctcttctggatgatcatggaaaccacgtgtttaaagagagggagaagggagttattcttaacaattacttccaacaactttttgaaagctcaaatgtgagtctgaacatagaacttcaagagttaatcagcccaacggtgactgctgtggagaatgcaatgctcacaggtatcccgtcctatgatgaaataactatgcatgtgttccagatgcaccctctaaagtctccaggaccagatggattctcgggatgcttctacagaaatttctggggagatatcggtcttgaagtcacggagtgcattcagagtttctttcgatcaggtcatctaagtccttccctgaatcatacttttctgtgcttaatccctaaatgtgataatgctgatctggtcgagaaatacagtcctattgctctgtgtaattttatttacaagatcataacaagaattatttctcaaaggctccgtttgactatggatcgcatcgtatctccgctccaatcggcttttatcccggggagatggatagctgaatcctctatcctatctcaagaattggttcaagtcataaaaagaaaaaggga

SEQ ID NO: 379128 - DNA, 8587 bp, Cannabis indica
gtttttctattaactacatatgatgtgtttcagagcgttggattccggagtcttatcttcagaagccagccaggctgtgaagcaacgtacttttaaattttgtacggtcattgtcaactgtgctagcatttgcttattgtctgtcaaggtaggatgtagttgctacacttctcagaacaagttactacaactttgtggatattcaaattatgttcaaattaagctacctttattgtgttaattaaattttctgcgaatatcttttgttctagttttctggcatgattttttttaccactatttttgcttgcttcacgtgggtggggtgtaaaactggacagtatgctatcattatctttgttcttgttaggtgtttagaattccaatatatgtgtttgctcaatcttattgattattctgttattcagtataatgcatcttgtgttagggtctgacaactgttgtcttcccagcttgattcaacaggcacaaaagctctttgtggaaacacatgattcaagtgctgcaagaaacgtaatttttattttaatttctttttttttcccattatttcaaattactttgaataatacgatgatagttttatgctaatgctatgtttacaattgtggtgctacattagtatctcctttaaaaatcatcattattattgtcattattttactttcacggctccatatttccaaagggaaattatgcattttaatagggcatatctatatttataaaatgagtcaccatttgtgtttctttataaaataaggcatagtttggttttgtttgcatttcctttagatttgaaaatctgcaaaattttgaaggaagtgataccccatgaaaacttgatttttgacgtcaacaaacaatggacttgcgatgatctcatgaaaacttgatttttgacgtaaaacatgatgctaatgcgatgctcccatggaaacttgatatttgaggtcaaaacgatgcacttgtgattatcccttgaaaagttgattataagggaaaaacatgctcctgctatagtcttttgaaaacttgatttttgagttctaaatgatgcacctgcgatgctagtgatagtcccacaaaaatttgatttttgaacaaaacaatacccctgcgatgctatagtgattgtcgcacaaaaacttgattttagcatcgttttgtgcctcaaaaattaagttttctaatataagatcattgttgctacatcacaggagcatcgctagagcattgtttttggcctcaaaaatcatgttttaatgggagcattgcaaaagcattgtttttttcataattttgtagattttttagatcttaaaaataaaaatcagatgcgttaaattattttaaagtgcatatagaaatgtattgtttccagttccacgaaggcaccctttagaagctgttacctttttgatcaagcattagaaaactagattatgatcagtgtcctagtgtgcttcttgatgcttgacataatttagtgtttgcctttttagagtactagataaccattacaatttgttctgtttctcacttctgtttcttccttttcctagatggggtttgattttgctgggaaaactgtctatactgcagtatgggttgctgcagtgtcgttatttatggagttgctggggttctctacccagaaatggctaactgcggggggtcttggtacggtgttgctcacccttgctggccgtgaggtgcaattcttcttcccccttcaatttttccatttccttgcattggcatttgaagtagtttatttatttttataaattgttggggctttctaccaagtgtatacagctatttatttattttcttaattcagatatttacaaacttcctttcaagtgtaatgatccatgcgacaaggccatttgttgtgaatgagtggattcaaactaagattgaaggctatgaagtttctggtactgttgaggtttgtatatatttttctttattctgaagcttagaaagctgaatattagttataaaactaataattggaaattggtaatgttcactcagcactagttactagttagattgatcaagtttgttcttaaacaactaaaatgattttctcacttggcttattttttatttcgtatatgtgctgtattattccagcatgtgggttggtggtcacctactattatacgaggtgatgaccgtgaagcagttcatattccgaatcacaagtttactgtaaatgttgtgaggaatctcagccagaagactcattggcgcatcaagacttacctagccatcagtcacttagatgtcaataaaattaatgtgagaacacaaatctgttgacttcttgtcaaactggcgcatgtttcatcttttttttttttgtgctggaatgtttcatcttatatgaatttggttcatttcttttttgtgtgcagaatattgtggctgatatgcgcaaggttttagccaaaaatcctcaagtagagcaacaaaagttgcacaggagagtttttttagaagatataaattcagaaaatcaggctcttaaggtacatttatatacgtttaggtttaatttgttaatatttataaaagaagtcctgaaaaggcttgtgtcataatgtcttgtgtacattctataattgctaatatcctctatttaacaatggttttgcagattttgatatcttgctttgttaaaacctcacattttgaagagtatttatgtgtcaaggtaatgattacgtgcctgctttgccagaaatggatttttttttttcttctagtgattgtaataaaactgaaaataatttcttaaatgatacaggaagcaattctcttggatcttcttagagtgatcagccatcatagggccaggctcgcaacacctatacgtacagttcagaaaatatatggtgagcctgactttgacttggaaaatgtaccatttgctgacagcatttttactcagtcgaggggaactgccaatcggccatatttgctcatcgaaccatcgtataaagtaaatggtgatgataaaactaaggcctcaaatcgttcggctcgtaccaatgaagataaggaagctcaggcagagacagcctcaacctccgactccaaaacagatgccaaggtagctgcagggaaggatacagctgcagtcgattccaaaaagacatctcccctagaggaagcattaaaaaatccttcaactactacatctgtacctggcagtggaaaaactgactctcctttgactagtttacaagcaaagcaaaatggcgagagacctaatgcctcttcatcaataaccacacctccgttggaagagaatattgttcttggtgttgctctggagggctcaaagcgaacactacccattgaggaagacatgactgtgtctcctgctgaatcaaaagaattgtctgctcgcagtagtaacagttccccacctgctaccaaagatacgaaagatagtggagttcctagagctgcacaataatttgcagcaacaaagaaaagcaatagtttatagttcattgctgaagtatgtatctattccctcatgatgttcttatccgagtgagaaatgaatgcagctgtgtttttaaagctgctattacattgtctttggttgtaaataaccattcaattagattaatgaagaattagcgagccttccttggaaaggttcttattatttctgtaacttttcggggaaggtgaaaaagttgacataacatcctctacaatggcatttaaatatggaacgcaaattcactaaaattctaattggcttgtccactttcattgaaaattacagaaattttttttttcttaaaaaagagcaaacacagattcaaaaaaaaaaatagacatcacaatcattacagataatatttttcgaaatcctagattaaactggactccacttatggtaaaaaaaaattgacacttattaataattaaggttgttttttttagttgttatgaatttttttattatatttaaatttattttcgaaataaaaataattactcatattattacaaaaatatcaaaaaaaaattaatatttaatatctcactagttttataaatatgtgtggattggattgaatcggttatcacacaagtgcacattatgaatttttctattctttggattggatgactatttgaggaacaccccctaaaacaccatcaaaccatctatcgactcaaaatttgagagactagtggtaaggtcttgattcattgtacaaatgagctcttgggccttcattttctttcagtttgggatgatctgctcaatttctataaagggaattcaagaagtctaagggttattttctggcaaggagcagcccaaatataacgtcagttttcaatccaagtttcctttgctctgttttctagtaccactaatgacgttctctgttgcattatagtatacggagagagagggttatgcaatgtattgagtattcactctttgcgcctaagggctcgcatagcttgtaattgtttttttctcatatatttagtttctactgtttggctactactttgctattgttttttttttctgaaacgttgctattgttttattggtgttcttgagtttagattactcgggtcttatcatatagttataaggtcatgcacatatatgaaattaggatatgaatcttttgattagtcattctaataaacagttctttaaactttaatccatttgaatcagaaaacagaaatattcagtattcaattttttttaattaaaaatcaaatcaaatcaaatcaaattagtattacgtttatttaagtcatatttcaatatcacagttttttcagcttctaaatttataatttaccaaattggcaataattttatattacagtagtttttttcttagaaaaggttagttataaaattgtgtttcacatgcagaaaacaaaacacaacctcgtttcgtctttgaattcactaagatggacacatgcagtcaggagcaggatatgtataaatagattgcttctcttttcttaacctgatctgcccttgtctacttttatgcccatttagaacagcctgttgaaactcagaccactccatgcttttattcaagaaaagttggcttaacaatcccatgttgggtcttatagtcttcaagttcagaagagctcgatgtcccacctgataatagtgatacaaaggcaaattcatcgaaagtcagaatactaaaatgttgttaagtaaatattctctggttttcaaagttggattctaaactgtcagttccatgttcctctaattatcttatttcttatgaaccatatcagaatgaagttgatcacattttccgtaccagagcattgtgcatatttcctggagaagcagatatgaagatatcactgtgcatgctcacaaagtaatcaactgcagctaacaatgaagctttgccttcaaccctctctcgctcctcagatgaggaaagacccttcttatcttccattagtggaaacaattttcgcaaagctgatatccgtgcttctccaccgtaaacctaaaaatattaaatgaaagagaaatttattcttctatttctcaaaaccttcatcttaaactcaactaacagctctatatgagtttaaaaggaaccactttgctggaaggtttaattttatgacataggaaaaccttgtgggaagccagatagagacgagtactattgctgaatcccagagctgctaatagaagtcctatctcttccggtgtcaatggacaacggccctgatttcttaactcattatctgtgaactgagaatttaggacccttccttgccaaagcacctgtcgatatttcgcaagagccaacttctcagctttaccaccaccaaaatcacaagcagaatgagcagccatatcctgcatgagtaagaacaggtgaagagatattagaaagattctagttaaaaccacctttcatcgcgatgtaaaattctttagtaaaaaactgttagggaggacaatgtttccaaaactaaagactaaagtcttgtgacttaaaatttatcatccttagaatacttaaagcagagatgatcatactttatcaaagcgaagatgcaatacaacatacttcccagctccctgcattttgacttcattatttccttcttgcacgtgctcggtacctaaaatttgattttcgctagaagggaagcgtaaccgatgaacaagggtttctcccaattccttgatatgaggaacaaagtccaaagcttgaaagttaactttacaacgaagacgctggatgtttaaaggcaagttgttgaaagtcaaacgatgcgagaatggggcaatagcaacaaccccataactgtgtaaaagaaaggctttcggaattagttaatcatttctgaacattactaatacctaaacagtatgcagatcatgattactttttatagataaatatgtgtctgtgcctgagcttgcatgtactttgtgaaagaatgtttttactatttgagtttttcaacatgatactagttaaaacatacaagatctgccacagtgacacgataaaataggcaagaattcataagcaataaatgtatttcaaaaaaaaataagcaataatgagttctttttctgttcttcatctcagcctccatttaaactagtaaggcaacaataattctatgactacactatacatgtttatgtaacttccagatctccaagataatggcactataaagatcaagacctttataagagcaatttgggcgagacactacacagctctgacccaatttgtttcgttgacacgaattacaaacaaacatatataaacaaggacttaaaagtcagatctagatagctaataacacatttagtttactgacctctgcaagacaggcaggacattttccaggtaccagtcagctgaagcatgaacaggtgctgttttgattctagttgctcgtatgcctgtagcataatactctcttgtgctccaggacagttcaccaggtagctctttaactatggaaacttcatcacgaaggactgatataaagtgatccacatcaaaaatttctgcaaatgaactgcactcgcagtagaagtcttcagattagtggctctaactaggaccgacaatgtgttacaaatattgcaggaaaaggctacttagctcagtgaaataccttgaatcttgccacacaggatttacatcaaggtgtgggatgactagtgttgcatttaagatttttgcaacagcaactgcatcacaaatcttattttttttttttgtcaaagcaacatcaattttgattagatcatctacttttaatcagctatacttcaacgacaaagaaaaatacaaatcagccaaatgggcaatttttttaccatttgaaattgctacacaaaaacagacaccctcaaaatctcattggttgtatattagtaccttattactcattattaatattacctacccccatcttttgctggtttaagcctccatcaaggaatacctggatataacccttagattttttcaatgatactgcaaaagattgacgaattttgaagattagagtaagaagtactcttcattacaaacatgaacatataagggagaaaaagaagaagaagaagagaatgataacataaagccccatgttcacaactcacaactaggtacatctttaggctcttcaacgtcaagacaaggtctccatccttggtgagccaaaggagaccagaggcttctctgttgctgaacagactaaatcaacaaatacgaatcaaattaatcatattcagcagcaaacccacttaaaatgaaataaataaataaacagtactcacgattgggtgttgtaaagcggctttgaagagatggaaatgcatggatttcggagcgttccattcctgcaatttgactagtttatcagtacatacagtacaatgttgaaaatgataaaatgtggaaagcagagcgagaaacttacggagaagatggaagggaaagctcggccgagaggggcgaagagattgggggagaaagcaggcaaaagaagcagcaaagccgcggccaaagcgactctgtgggagtggttaggccaatactcgtggaagtgatgaaccttcattcaacaatattagctttttccgatcgaatcgaatcgaatctaatgactcttaaagttaaaagtcttaatattgcattttcaccatcttcttaacggtgatgcaaaacaaatcttatgcctctgcgttttctaacatttgtattttttttatttttaaatcaagaaatcagagtagaattttgtttttttttgtaagggtcgcgtttggaaagccacttgagaattggaattgaatgtaattggaggtaattacacagtttgacgtgtttgtgtggccacgtaattacataataactgtgtaattagaggtaattgggaggcctcaattactctttccaattctcacaccccatgagaattgggtgtaattacactgtgtaattccataccaaaa

SEQ ID NO: 379129 - DNA, 1923 bp, Cannabis indica
aataattattaaattaatttttacaatagtagtatacacaaacaaaaggaattgcatttttattattatttttttttttggtgagaaaagataaaataaacattgaaagggtagctttatagggcggatgaatagataaatatggagaatgctgatctctcaactatctttaaaacttatccattccatctactattgattgacacattatctcaagctctatcttaaatcatcatttttaatgcacctaatttatgcaaagcaaatagataaagtgaacaaaactaattaaactaaattcatagtatattatataaatatatatatatatatattatatttttaggtcaaagctacaatgtgatagagttagttttttttttttgaaccaaagttcgaatgtgatagagtacttaatgagtagtaaaagaggcttttcctttttccaataaggtaagaagcaaagccacaagcaatcaatgaagcaaatagcgatcctctaaaagctattatattaaattatatagaacccttaaagaatatcatcattggagatgctctaaaagatgcttaaaatgtccacataataatctcaaaatatattttattttctctttcatctcgtatcatttttagcaacctttattttaaaaatattctaatcgtaagcatttctaaaaattattaaaaaaaatattataattttaattgttattcgcgtttttgccaagggatacgtggaatccaggtcagcatcaaaggcccacaagtgggttccaaagaagataatttaggccaagtccgagttatataggaccttccaagaacgtaccttgggtctgtgattagaggatctattgtcggtgacagctcgtatctagaaggagctctactatcgtgagtttggaagagttagagctcttggaagacaagtccagtttctctttttattcccgcgcataaataagaaaataaatacttcccagatcttgacagaagattgtatcaagctaaaaggaaaaacttcttgaacaaagattaaacaattaattcatgattaattgccacaattatatgacataattttgactaattcaatcgtatctaatttgcctagtcagcatatcctctcattcgtgggctggacttcacaagacagcctaagttatgtaatttagtgtgaattcccaacagagggaaaatagaaactaagtgtaattcatactaaaaatacccaatgaatccttcacatgaagggttgaactctcttacaatatttgcttatgcaaacttgagaatttatgctcactgtattctcaaaggcttttctagcttaaagttacataataacatcgactcatggactaaggtttgttagcgccccaaccacgtaaaaattgtttatgttgttcatactctttctcttttaattatttatttcttcagttctaattatttataattcattttctgaaaatctcagtaaatattttggtacttttattgagagctgaagaaagcagtgataccatctagagattacgttcagtaatcatggtactcactcataacaaatttggtgttcattttaatgatcctaatgtcaaagcaggggataaagaagatcagaataaggtaactagccatcacaaagatcaagttggcaaagatgcagacctagacgctcttgtatttgaagatgacgaatcagaagagaataattttgatgatgttgaagatgatctacaagccaactcaaaggatgatcctcaagatgcaacgagggatgatcgccaggacaaggccactaacaatgttgttggaggaaaagacaaacctgatgagacagatcctgtaaagcccgcttagttaatttggaaattagcagttgtttatgattcattatgaaattatttatagcta

SEQ ID NO: 379130 - DNA, 5836 bp, Cannabis indica
ttaataattttgacaatttataatagagaaatatcaaagggttgatcataccgcctaaatgtataatattattgcatgtccgatttactattgggtttaacatatattatgttaggagaatttttatttttatctttgtttgttataaaaataaaatactttgcggaaaagataagttaaaaaaatatggaaggaaaagtttagggtcaccatttatcttagggtaagaaaagggttaagtttaactaagttatctagtaagaggtagtattctccctatattttttaaacttttttaaaaaaaaaaaaattaacaacaagttaacttctttttgttttagaaaaaaaattatatttttgtataaattgtataaaaactcataaaatacataattttcacattaaatttaaactaataactagtataaaaatcattaagatatcacctcatggtgtgagactcatcactggtgaataaaataaatgttcactaagttggtttgtaggtaattttttgtttttttttttttttttgtaggaaatattcatttctcttccttcaaaacccactttaataataataagaaaacatatgtaactgaatacttcaaagaggttaagttgggtggaagaggcaaaatatgtgtggctagtttgatggaaatggaattatattggtcttgtgtgtcatgtcacatttcttttaatagtggttgatatgtatatattaataatgttttctttaattaaaaaaaatatatatatacaaattagagaataatgacctatatgataatttaatattataaaatttatccatattactaagtagaattaaaagtgactaaagctagtttagtggtaaaaagaaaatataaaaaagcaagaggttataaatttaaatttaagatttttaagctattaaattattaattgattgtaaaatattattgcgcgacactacaaacatattaaaagcgtatataagataaaattgaataagttatacttgtgtcgttttcatcttatcatatgcaccaatgaaacaaaaatggtttaaaactacggaaatttcacaaattggtcactttcaagactactatagtaaatattgtttggttcttagttacaaaactttatgagcttagctttaattatttggagtaacgatcgtgaataaattttatgtactttaaagcacataaattgaagggacacatacggtaattttttttttatttattgattgtagttaattatttatgtaaagaaattaatagcaaaattacttatgcagggaattttgttgcaattagctatttatagtaaaaaaaaaaaatggacagcaaaaatgcctaagtagatttgttttttggaaataaatacttatgtgaaaatagtttaaactaaaaattaattaaaagcctaatactatggttattttaaaatttaaaatattttaaataagtagttaattgcaacaaaatctattacgtacttcagtatttttgtagtcaaagattttaggtacctaattaactgcaataaataaaattatataaaaagttatgttgtcaaattttttacataattaacaacaacaaatgaaaagttaagtaacaatttttcaaaaattgaataattaaacttatttgctaatatggttgcataaataaaattgtcattttttaaaacttattgataggaagaaagaattcgtgaggctatagaagatgctggatttgaagcaacgacaatcaaacaagatgataatatagcaaacgacaagtcaattcaagtgtgcagaattcgcatcaatggaatgacttgtacatcttgttcttccacaattgaatcagctctcaaagcactttatggggttcaaactgctcaagtggccttagcaacagaagaagcagaagtttattatgatccaaactttctaagctataatcagcttcttcaaaccattgaagatactggttttgaagccatacttttaagtttaggagaagacattagcaagatagatatccaaattgatggctttaaaactgaccattccttgaaaatcatagccaagtcacttcagtctatagatggagtacaagaaattgaaacatacccagaacttaaaaagatctcaatctcatataaatcacagttgactggatcaagaactttcattgaagtgattgagtcatctggatcaggtcatttcaaggccatgatataccctgaagatcaaggagatagggatagtcatagacaacatgagattaagcagtactacaaatggtttttatggagtttggttttcactatacctgtttttttaacttcaatggttttcatgtatgtacctgtgataatgaaagttttggatatcaaaatagtcaacatgttgactattggtgagcttttgaggtgggaattggctactcctgttcagttcatcattggttggcgattctatgtgggttcgtataaggcgcttcgccatggctctcctaacatggatgttttgattgctttaggaacaaatgcagcctacttttattctgtctacattgtgttgagagcagctaactcaaaagatttcaaggggactgatttttttgagactagttcaatgctcattactttcattctattggggaagtatttggaggttttggctaagggaaagacatctgaggccattgcaaagcttatgaatttggctcctgaaacagcaacactattgactcttgatggggaaggaaatgtggtaaatgagcaagaaatcgatagtcgtttggtacagaagaatgatgtgatcaagatcattcccggggctaaggtagcttctgatggtttggtcttatgggggcagagccatgtcaatgagagcatgataacaggtgaagctcgacctgtgtcaaaacgaaaaggtgatgcagtcattggaggcactctaaacgaaaatggagttatgcatatcagagctacaagagttggatcagagagtgctctttctcaaattgtaagacttgttgagtcagcccagatggccaaggctccagtacaaaaattcgcggatcgaatttcgaaatactttgttccattggtaagtgaacattgaaatgaaactactttggctctcactactagttttgactgctcttttcttgatttgttttgcaggttataacactttcgtttgcaacatggcttgcttggtttttggcaggaaagttccatagttacccacattcatggataccatcttcaatggacagttttgagcttgcccttcagtttggaatctcagttgtggtcatagcttgtccttgtgccttaggcttagccactcctactgctgttatggttggaactggtgttggtgcttcccagggggtgctcattaaaggaggccaagcattagaaagtgcacacaaggtgcgcataaaacattccctacacaaattttctattagttcaaaatttaatcacttgttttaactttaccttgtaggttagctgcattgtgtttgacaagacaggcactctcacaattggaaaaccagtagttgtcaacacaagaatccttaacagcatggttattcgcgaattctacgaactggttgctgcaactgaggtaattaaaagaacatatcttcagtataaatttacatggcaatagacacaaaacttataaaagcacttgtatttaataggtgaacagtgaacatccactagccaaggccactgttgagtatgcaaaaaagatgaaagaagatgaagagaacatcatttggccggaagcagagaactttgtctctatcacagggcaaggagttaaggccattgttaagaacaagaaaatcatagttggaaacaagagcttaatgcgtgaaaacaacatagaaatcccagtggaagctcaagaagcacttgaggaagctgaaggaatggctcatactgggatcatagtatccatagatgaagaagttgctggaattatatccatatctgatccactcaaacccggggctcgacaagctatttcgatcttgaaagccatgaaaattgagagcataatggtgacaggtgacaattggggtacagccaaatctattgccaaggaagttgggattgatactgtggttgctgaagccaaacccgagatgaaagctgaaaaagtaaaggaattgcaggttagtatttatggttcaaactgaaagagataatcataatttggttaaaaatttctcactcactaaacagatttcaaaatcagacaataacaaaaagcaaaaacctcataactgaaatcaattaacttcatgattagcaagagtccaatagcaagtttttcttaatgcagtcgtcagggcacattgtagcaatggtgggagatggaatcaatgactcgccggcattggtggcggcggatgtaggaatggctatcggtgcaggcacagacatagccattgaggcagctgacatagttttgatgaagagcaacttggaggatgtgataacagccattgatctttctaggacaaccttcactagaattcgactcaattacatttgggcaatgggttataatatacttggtataccgatagctgctggagttctcttccccttcaccggatttcggttgccaccctggattgccggagcagccatggcagcatcctcagtcagtgtggtttgctgctctttgttgttgaagaactaccgaagacccaagaagttggatgaacttgaaatagggggaataaccattgaatagttatgtgtataaaattaagaaacaagaaatcttttagtttacagtcttttatttgaataaagtaaatgttttttttgtatctgtgattatcttaataaaaaataattgtaagaaaagtaattttgttaatgtgatatatactataagaaaaatatttgaggaattacataattttataacctttcgtttacttgtagctacagtaaaatcaattgtattacataaagacaacctgatgctattttgtcatatgtgtggtgtttcatccctcaaaaaatatttgagaataatttgccttctttttaaaacgtgtatgtaaattctactttttacatccacacccacacccacacccacacccacacccacacccatgagttggtgaacaaatactctttattcttaatttaattgggaaatttaaaattgtatgcatagggattaaaattggtctattaatttaaaactatacagaatttgtaaaatgggataatttttactaaaactcatttttaccttcctcattctaaactgactctctctctcttcctctctgtcttttgaattcccaccactcacgaaccgaacccattcccccccccctcgaccgataaacccaccgccccacggaccgaacccatcacccacggaccgaacccatttccccacggtgctcccccaccgacccacggcgcaccccaaccaaatcggacacaatgtcaaaggtgagttcgtattccgttttttagaatcttagagctgggcaaggtctgatagggtccgatggggttaatgaatctgtaagtttgcgaggtaggagacgtaggtctgatagggggtccaatgggtccgacggggggtccgatgggaggtccgatgagtggtctgataggtccgatatggggtccgattgtgtctgatgtggagtccgatggggttagattgtgtaaatggggatgatgtaaatagagagtattttagagatatcataaaagttgtcccctacaaatattagttattaggctaattagcaatttttctccccgaact

SEQ ID NO: 379131 - DNA, 2391 bp, Cannabis indica
tatttttttttttttttttggaacaatgaattttcattgaaaatactcaaaaatttatacatagagaaaagatgaagatattacaacattttttttatttgtttgtttttataatttttgaataaaaatatagttatttttttcaaaaaattattttacaaaaaaaagtggaaaatatggaaaaattaaataaaagtaaccaagtacttttagaataaccatatggattaccttatagtgttttttctatagttttttttaactttgtttcaaaaaagaaaatcttataaaataagttttttttaaaagaaaaggttatatatttacaaacttatacctagctttaaaatcataaaaataaaaatattgaaggttcctgtaaaaagtcattgtatgataaaaatttaatgtagtttggagtaattataagatttgacatatttatttaattagataattatgcactaatcatgtaaatgaagttaattgaaggatcacaatcacaatttccaaccgagaattgggtgtagttttagataattaatgttattttttctatatagttaatgttattttttctatatagttattaatttatatttatatgtaattttttttaatggaaatataaagaaaatcagcctttacaatgtctaataattttaaaggagaattatgatgataaaaaatacgaacttgcatgaataacaagcactatgtgcaaggaagtgcgcaaccttgttagcagaatacttaacaaattttaaagaaatattttccaactcaacaataagttgtttacagtcccatacaatcgtcccaaatgcagatgacatttgcacattactatatatgccttgtactgccactaaacagtcggtttcaatcaacacaatttgccaagttttgccttttaaccaactaagggcttttttgataccacaagcttcagctacctcaggagagacatggccaatgctgcatttttagacaacttccaaaattttgccatcacaatctctagctatgaaaccaacaccaaaagagctagttgctgcaaatatagccccatcaacattaaccttaaccatgttagccacgggtttagtccagtgctctatgtccaatcttgatcattttgaacaagaataggttccatttaatttttttttagcacacaaccattggttaagatgcaatcttgcttctagaactacactagctgctgttttgtttcttcctttccaaaggacatcattccgtgcattctaaattttccaagctaccattaagatttctatagaagtattggcagtattgccgcgagtaccatcctcaaacgagtctttgaacacacctgttgttgctggattgaaattaacggctgatctatgccaacatgaaagagcaaatgggcagaggactagaacatgaagaattgattctgctgcattagaacaaacaggacatgaactagtgacatgtatatgctttgtttggagttgggttcgagttggtaagcagcctgtaatagctctccaaccaaaatgcagcactttcggtggtaccttatcttccaataattcttccaaaaattaccatgtaatcgaacatcatcttcattctgctgcataaatctataggcactctagactgagtagtgtcctgaagtttcatatatccaactccaccgatcagttgtatttgaattagggagagggatcccaagataagagcataatccctgtcattgaatagatcaacaactatttcagcttcccatctgttctggtcgatttgcattaaactagcgacacgacttccagccaaagttggatgtgaagagctaacatagggttgatgtatgtctggcagctagggatcagtggcaatctgtgtactcaggtcattaccaatttgaattctcacactagcactaattaaattctttatttcaaatatgctcttccaaatgaatgacgggttatttctaagggaggccgagagaaaagaaccatcagaaaaatatcttgccttgtaaactttgcaaactagggaagaatcttctgttaataacctccaggcttgtgccccctagtaatgctaagttatactccctaaaatctctaaaacctaaatcaccaactgtttcatgcttccagagttttttttttccaactgatctagataactccatgcttgtttttaaaagattgccaccaaaaattactcataatgctttcaagacttcgacaagtttccaatggtagcaagaatacagacatagcatagcttgggaaggcttgtgctactgttttgaggagagtctctttccctactttggacagaaaacgacatttccagtgtttgtatgaattcatgttttacgtt

SEQ ID NO: 379132 - DNA, 1778 bp, Cannabis indica
catttcgtcacatgcagttatagtcacagctcagtggtcattttagtaagaattgtaattttatgtcataataataatgtgccaatttattgctgagctctatattgacaccaaacctacctgtgtagtgtagatatcgtggatacgtaagaagtgtaaactagttttctgattagtggtcctgcttttctatggttcatttgaactaaataataataacatggttaagaattatgatatgctacttatacttgtgtgtgttttcttatgtagttttttttttttattctttgtcaacagtgactgaggttcatggtagaacattcggtgtgtggactcttctcacttgcactctctgctacctgtgcgcatttaaccttgaaaacaagccactttacttggccaccttcttatcatttgtttatgcacttggtcatttcttaactgaatacattatctaccacaccatggctattgctaatctctcaaccgtctgttttttcgcaggtataaattattttcttaccttattcattgtttatttcttatgtatttttaacacaaagtggggactaatttaatcccatttaatgattgctccgttgcttattgcttaatcttgaaacaaaaggatccccaacatgtacacttgccttgcctcatcctagttgagctggattaaagttgactaaatttgatgtctatgatttgatcaggcacatctatagtatggatgcttcttcagtggaactcccatcaaccccaagtttcctcgaaagcagactaaattgtttgaccacattgaagacaaagcttcttgttcctttgtttacatgtaatcacatgatgctttgttctcctcttaagccttagttttgtttcttctgattaaccctttagatgaattttcttggttctttcttctcactttcgaagtattgttggaaactcctcccttccattgttgcaaggacagcacgtcgatggtccaagtgggctctcccctttggttgttgtgggactgaactctgaccagctcttgttgtccttgtgaaccccaggacatatgaaaccgacaaaaacctcattatgggttcagccctgttggctcattgagtctgagctcttccattccacatgcatctgaccaattctgaagtttgtagaataaaccttttcttttgtttgcttattttaccggaagaaaaaataaattgatatttgatgtttattgtagggtagtaaagatagataatggagagaatttattgtttggaagaagtcgggagtgataataaaatactcaatttaatctaatttgtacgattcaatttaatttaaattgaaaagtttggatatgtgtacagattggataggattgaaaaatttaagatttgcacttggttcaattatttttatccaatttaaatgagacatatttatatatataattaacattttaaagtaaaaaaattgtaatttgaaagtctaagacatataatataaatatattttaaattttattatatcaaatgtatattatatttttatatataagaaaaatataatctcataaaataaaaccgaacatttttttttgtatacaatttaatttaggtggtatttggttggaggaaataaaaacataggaataagaatgagaatgaaaataagaataggaataaaatagaatcaaacttaaaatatataaaaacaattgataaaaaaacgtaaaaacttaaatactagggcttgaatccgactagtcaaactttgaa

SEQ ID NO: 379133 - DNA, 1209 bp, Cannabis indica
tttttatgcggccctggttgtaacagctgcacttgtacttgtattccacttcatcccactttacggccagacacacattatggtttacattggagtttgttcccttgttggttcattgtcggtatgtctcactatataatgttaactgtttatttgtttgctttgctttgctcgtcttatcacttatctaagtgattttatattaaagctatcctttggcaggtcatgagtgtaaaagcgctaggaattgctctgaagttgacattgtcaggaactaatcagcttatatatccccaaacatgggccttcactttagttgtagttttttgtgttatcactcaaatgaattatttgaacaaggtaatttgctctttgctttttttagggggacttctttatttcctttgaactagatagtgtatgcttgagttgtttctggaactaattcatttaatttgtatgagttcatctgtcatggtggttaatgattttctacttaaaagtcccaataatattaaagtagatacttcaatttcaattttaagcataatattttatatttgtttcattttatttcatatggtgcccatatatactgcctttcacttttttatttttggattcttttcataatcttgtttatgttattggtctataacagtatatctatcttatggcttttgattgcaggctcttgatactttcaacacagccgttgtctctcccatatattataccatgttcacatcattaactattttggctagtgttatcatgtttaaggtaagtttttccttttgattgcaacaaaacctatttttttatcgctttattggtatgatttgattagtttattgaaaccgaaaaacgaaaaatttctgctgttgataccttctgataattcctaccactgtgctcactacccttttgttcaatacttctaattttggtaggtatttaagtgctagtatatattagagaatattttacttcttatttgtacttgaagttgagattttggatcaaataaatgaaatcatggagaatgtcaagcgagagaataaggtagcgtttggttggaagtaatgaaatggaatggaaaagaaacaatttttattccatacctttgtttagttgcattttaaagtactgggatatcatttcaatggaatgagttttccattatttggtggaatgactatttcattt

SEQ ID NO: 379134 - DNA, 2254 bp, Cannabis indica
ctctctctctctctctctctctctctcctctctctctctctctctccttagaacacaacattagagtaactaaagtagctaatagctaaataattttaactaagaggtaaaaattaatgaaaatattactctaccgagctattttagctaaaaaatttagctcatgaatagtgcttaactatatgtagagaaacactatttattgagctataaatattatattaatattttaaatatttttgtagtatacatatgtgtgtgatattattatatttatttatttaatttttacagtaaataaaatatattaaataaataatttataaatgaaataaagaagatatagataagttgatatattatgtaatgtaaatgtatgagttaaaattaaaaaaataaaattttgatgaagtattttaaaagataatatggaaaagttgatgtgagttctcttactctctcttttcttattttttttttttaatatttattactttctaaaaatatcaaatatttttttttagatttttttaagttactatatattacaaatgcatgcacccattttaagaattcttccttggaagaaaaaaaaattattacatttgactttttcaaaatgacagtttctttttgattttgaaatgcatttttcttgctttcatactaattttattttaatttttattaatgatgaactttattttatttgtattgtataagttacataatattatggaggctattattgttataggatgaagaagtgtttaatcttttctcagtttttttaaatttaaagtgaattttgtccgagttattttttaatgatcgtttttatttaaattgaattcgatttcgcgccaatataagtatgatttgctttttaatttacctaaaattggcacacttaatgaattgttagatagttttagtgaagtttggagatttatcaattttgttgtttaataaatttatttttaaatttatgtaaaaatcgcacatttaataagttattttgtaatttaagtgaagttttaagattaccgaattcattatttaataaatttgttataaatttaagtgaaactctccttgttacaccacacttcaaattgtggtacaaaacatgtaactctaagcttaattttatgaaacacaacaattaggattatctattaaattttgattgctaaatatataactaaaaatatttcaataaataaaatatttgagaattaaaaaaaatgcttattataaattcagaatgttgaaaagtagaactaaatattataaaagaaatggaaaaatgaaaataaataaaagtgtcatggtctataatagttataatatatatttttttgatttagaaaatcatattttagtttttttttattcaattgcttttttattttggtcaccatttttttttttgtgaaatcacattttatcaatttaaactttatactttgttgccttttttattttgatcatggtaatttttttacattagcaatttataatatattaataaaataagaaggttgaaaactaatttgccaactcactcataggataaggaccaaactatacttaatgctatttgtataaatttgtgaccaaatatacataaaagccttttatcattttgagaaataattcaatgaaatgttataccttattaagccttttcttttattttctcatttacttctttctatctataatggtaaagcttacattttcaaaattattctatttttcaaataaataaatgataataatagtgaatagaaatttaaatttaggattctctctttacgaggtttaacatataacagttatttttctgtctatacattagcattctcttattcacacctggcgacactgcacgagtttcctttattgtctttgtctcatttatttctatttattatttttcttataacatttcttttaagaaatgaatttaaagtcttcttattccaactttcataatttttttttttattttgacctactctacgttacaatatgtacccatttctctttatggtaaaaacaataactattttcaaaattcttacatcttaagggtgtgtttggaaagacacaatgtaattagatttgtgtgtacttagaggtaattatacaatttgacatatttgtctgaccgtgtaattacactgtaactgtgtaattagaagtaattgagaggttccaattacactctccaattctcatagccccc

SEQ ID NO: 379135 - DNA, 1022 bp, Cannabis indica
ggggtaacaaaccctttgtcaaatctgtaatggcacacagcagcagtgtgaccaagtttatgacagacttgacagattaatcatggtgttgtggaggcacctctaccaaaggttctgggtggagcttgattattattgtattgttggtttgatcctcttcctgatgcaagataatgatttggaacaccatttccaggtcttgcagggccaacaacaagatttgctgagattttattgctggagtcaacaatagtgtaatatctttctaatctgctctcatgagttagtaacaaagattgaatagattcaaaggaaacatcatcaacaagagtatatgcacaactacaaggtcgaatttagggcctagcccattgagtatatgcatgattaaatcattttcgtccataggagtgccaacaacagaaagagaatcagcaagaatctttaccttgtcaaggtagtcagaaatggaaagattgccattctgaattgtggagagttgagatttaatctgtagaatgcgagctttcgattgactggcacatctctgtaccagtgcgcgccaagcagagtacgagctttgaaattgtgctagagatccaagaacagattctgacattgacgagcgaagccaactgagtaggagctgatctttacgcttccagatggtgaattcaagattggtttggccattaagcaatccctcaagtggagatacacctccaagaagtatatcatcgagaccatggctgattacggtgggtattacttgagatttccacgcaaagaaattggatcgatccaatttaacagtgagagacgagtgaagagaattttggaacggattccatggaggattggccggagcaggggcagcggtggtgggtgcttgagctgaagagcgtggtggatttttagggtgatggggatccatgagagacggtagtcaagggtaatccgataccatgtaaggcttatctatgctaaagaatctgacagaattcaatctatgagattgcaat

SEQ ID NO: 379136 - DNA, 6472 bp, Cannabis indica
ttttttttttattcaaatagagctaatcaaggctttttagtattatacaatatccaaaacgacaatatgtaaacaaagctatatgggcatgacatggacatgtgaataaaaaagaccaaccgaccaaaagagcatttagttttagaaattacataataattttgacttatgattatattttgaaacaaggccacatgaattattatttcatggtaattgaattataaaacatttataagccaatgaaaatgctaaagacaaaaacaagaaaggaaagaaatactatttcactatagatgcgcagaagaagaaacattagaagttaaggaacaaaatgatgttaaatgtcagagatcagaaagatatttaatatcattgttttcggttggtttgaattgcctaaaaaataggtaatttgtgacacatattggctcatttttcagatgttttagaatgaccaactcttacctcttcgaaagagtattctattggcagttgatcagagatatgaccagtcaaaacacaaggcgttttggcctccagcatggaaactgaggacactgtcgttggagtgttgggcataggaatcggcattgtcgttggggttctattgtttccctcacaaccaacgaggatagcatgcttaggaggagtagatgctagcttaccctgataatcatcttcggggcggtcattcacaatgttgacatttgatgatgctcttgaagagaagactggagagaggggtttccttacaacaggagaccccatttcacgagtcttagcataacctttggaatatttagtttctgaatattgaccaggaaataagtccctctttcctgcaataaaaaatagcataaagtttactaaaatggtcttccgaaatattgtaagcagatgtatagcctgtgattctgtgaatggtccaataatattctttataataagaattttctgcttagaatagaatgctcttctacaataagtttgctaatatcctagaatcaatttgccaatattatattgcatcattgaatacttagcgcacaataaacaagaggaacaataaaagatcaacaacattatagaaaataattaccagaaggagcaccgtttttagtagggtgcctactgagagttgcctttcggggttctgaattctgaagcactactccaccgagagagagttttctatcgtttgaaactcctgttattctgtaacccttgacgctagcgggactggggctgtgacccataacgtgcttccttctctgctataagctgtccaagacgtttcttctggtacctgcataacaaaaacgtataggtgtcaaaaaagcatgtttcataagctcttattcaatctaagactgaagtccttactctctgcctttgcttgtcctgctctttttcttccctcgagatcttgtactggtcaagcatggaaagaagtcgttcctacaaaacacagaagttataacgacaagtttggatgaaaagcctaaacaattttatgaggctccagctaataaataaaaaactcgcgtgaacaaatgtattgagagaacttcttacagtatcatagaagaattccactcccctctctacttcccaagctgcggttttcgaaatcaatgtgtctaccattgctgctccaattaccaaaatattttcatttatttaaaaacaatcataaaaattataattatcataatttcaatggtgttacattaaataactaaattaaagacagcttggggctaactaagaagtaataatgaaatgaaagttttatccaagtcaacttgaacacctgaagtggtaaatgacgaaggcatagttcaaatgtcaagttgtgttggaatcaaaataacttagcacttactaggaattttgtttatcacggcgcgagctttttcagcacgtttcaaagcgagatgagcaccccttccagcatgatagcgcctatcatcctgaacaaccacaatacttaggaatactgaagggaaaaaaaaatcaaatcctcccacactaacccccttctgaatcactatattacttggaagtggaaataaataaaaacgttatatttggttgagagagaaaatggatgtaatgaaaaaagaaaaattcattttcattctatttgtttgttttgttactcttcatctcattggaaaagtgactccagtgactatttttctagtattttggtggaaagtattcctcccaaaaatgagaggataacagacacaaatttatattcctattcttattatcttatttccattgctcccaatcagatggggcaaaagtgaaagccataatgaataccacttgggaaagtgacatttatatgttttaaccgataagaatgaatagataaaataatgatcaaactaaattgctgcagggtaattggatcacaaatacttaaaagcatgcatgaatatacaagatttaaaccttattgtaatcgtctagccagcactcttcttgacaggctgcctgccacttctcaactttttctaatatttcctttctgcttaaaacttctgctttagcccgagcaatttcaatttcagtctgttccaacaggtactctggatccatagttcctgcaaaatgataatattatcgagcaaagtaaactgtctacatagaaacagtttgaaaacaaaaatagttgtaatttaaatcttggaacttgttaattcaatgcatgttactaacacatcatgaaaagaatcatagtggaaaaatattttttgatttaaatatcaaaatttataaaaatctcttgctaattttaatgaatgcgtggaattcaccaatgtgtcatatgtgtataaattaccacaagaatgaatggtaaatagaaagaattttctcaatttcattcgaattatgaattaatagacaacagccaattatgaactaatatacatggccttattttccagttctttctagcatcgataagttacataagccataggattgcagtcaataaaatttccatagcaaaagaaacttaactagattggagatattgcttttaatcaaagaagaagactatacaataaaagaacagatgtatgtttaccagaagctacagcttcaaatgagaattcagtggcaccatgtgcttctggaaccatgtgtgcttctctgcatatttcatcaagttccgacctcttttttttcagaatttctttcaatttacttgatttcaactgttccaaccgtgatatttctgcttcaacctgagggttgaagaataattatagtcaaacaagtgcacattctacagttcttagaggaaactggaataaatatttcctggtcagtcaaacaaattagcatactcacaaggtcaaggaagtcaatagagaggatgttggcttcagtaacttcagtgactgatgcagcacttttactggtaacattgtgaaatgccttttgctcctccgttggtgtatccatcaaattccataactccaacaaggaagttgcaaacttttgaagctggtacaccacacaacccaaaggaagaaaggttaagcacaataaaagcttctcaaagggaactcaaatgaattttaaacaaagatactaacacagctaacataaaaatatcacctcctcccatctcttcatcttgagatttctcattcttaataatgcaccagacaaaccctcaagcgtactattacttatgtcctttacacctttggaattgctcagagtgggatgaatctcataaattgtgtttttgaaatccacaccaagaaccaaacacagtaaactcagatcggtaagctggtcctccaccagtgtctgccgggcttgctgtggacaaagtataaaataatcagtacccttgttacaaattgaaaatcatcaaaaatttaaaaatatatgcaactttccaatcaaatttaacataacacaataaagatgaaattactaaaagaacaatccatactggataaaactcgccataaatctacaaaatagcatatgctgttctttcattttaatgtttcctgttcgagaaacgtgtcaatttctttccgtcaatcctaaattaatactaaatttaaccacaccattaattaataattaccctagatgtccactctaaaaaatattagaataacaagatcaaataccttctcattttgacaaataagtaactgtgctcgtagatcctctagtcttttcagggacaagtcagtttcattcaccaccattttggaaaggccatcttccatcgatatgcctaactcatttgaaatatcctttaattgatttagaacttcaaagaattggttcttcctatcatttttccgcttttgcatttcctttagtagtggaagaaagttatcaagctctcttttcaagcctccagtagcacttttatcaaactgcagtcgcaaacaacaataagagttcccaaaaattgaaaagaccccaatgtactgtcccaaatcaaaaactaccaactaagaaattcatgtgatcaccaatgtagacaaggcttacttacatgaggtagttgctcacccagagcaaaacaaatatctgaaatctgtgcttgagtccttgaaatttctgcctgcaactgagctttacacttaattgcttcgtccacttttcttctgtatacttccacacaagcttgctcaatctcaaacagcattgtatccctttctgcatcaggctctcccagttcatcccatacttcctgattcaacaataaagggtactatataataaactgatggtttctgattatcgtttcacaaagctattgaatattttttttactggagaaaaatgaaaacctgcaattcctgtagcattgatccacaaattgtgactgtatgcacgggaggaacattatgcctattggacatagttacaactgcaattgtagataaatgaagttaataaggagtttagaatatatatatcacctaataggctaataagaataaatactaaccacccttatgaattctcctcttgttattcaagagaatcctgcaataccatagccaaaattaggattttctttttcttttcttcatgggttaccatgatcctcataaaatcccaaaaaagagttcttgatactataaacaagaacatcacagcgtttaatgaaagaaagtaaaatataaatacacaataggaaaattttttaataaagaaacaagaaggttgttgaattgtaagagcttctaactcccttaagataaaacaaaaatttactagttcatatcggagaggaaagagaaaagaacaataaacaaggcaatggaaagtaaacccttttcctcagtgagaaattaaccatctgatgcatacaacgtaaactgaaacgaaatatggattttccattctattttccaggcaaccaaacaaataacgaacctgatgatagtgtaaccctcgggttgagaattgggaatggcgttcggaaattttgttaagagtaatttttggtttggatttgtatgactttaaatttggtgggaagaagaaatgcagagtaagacgttacagtgtggaaaaataagcgagaacactagtctactatcaatacggtgctgacacgtcagcaatgtctgggatcctaatgctacgtggtgttatttgaagtatgctgtattgtttttgacggtagagatggtttgcgctggagttaagtttttttttttttttgaaagggtaagaattatttgtaattcgaattcagttttaacttttttttttgggggaagttccaattcggattcttcgttgctaattaagttgcttatttagaaattataatttgcattaactactgaatgaaaacgttcattctcattaatggtggattttctaatatgtaattaatttcacattttgggacttttatttctttttgaaaggagagaaattcattccacgaaacaggtacaagtcttcttataatggactaaaaaaaggttttaagttggcaataaaatatggaattcgaatttttcattcattgctacaactttataaataacactgaaagaccacacaacagtatagaattaggatacaccagaatccaagatcaaaatttattatttttaattttttattttgaaagaaagaattatttttaattaattaatcatgtaacaaataaatctctatctaaataataaattatattgtttaccacatccatccatatccctaataatcacccataaaactaaatttacatgtttcacccttatgtattattattatagcaggtatattgtattaaataaagagatttattttaaatggatacactgatttactcactattttgatatttaataagcatatgaaatatattgttccaacattgtttactattttgtaaattatttctaatttttaaaattttacagaataccttaaataactataa

SEQ ID NO: 379137 - DNA, 1931 bp, Cannabis indica
aaaaaaaaaaaaaaacgttttagatatgtaaaaataaaaaaatctccttgtttttacctctcaaataaaggaaaataaactactcttcctttcgttttcttctcctttttaacatatcaaataactataataattttatcacattttctattcttttattcattttccttctcttatatatttatttcccattctaccaaataacctaaggaataaggatgggcgcatctaactatattattacttggtcttcaatttgcagaagctatattatccccatagattaaaaaaaataatctatataaatacatcatcatctcatatttgttctatatatattagattttaaatgagcacaatttttatataaaaaacaataagggacttaatttatatattatgtgaattgctatgtagattttagttgcgatttaagtttctctgttagttgctatgtaggttattacgtgaattttcgtaaaaatatataaaaaaaattattttgaagtataaaaataaaaaaaatccaaaataataagcttagccaccttgttcattaaaaactaaaagttataaatttgaatttttcataatgagttaaagcaaattaatacaatgtcaagtacaaatttatgaaattaataaaaaagttccataaacttattttcatattatataatttttctaatgagtttttatttttaaaatttagttaaagatctaaagactcattttaatttcttttaaaagagtttcactctattataaataacctaaaatttataagtataatcacagatttaaatagaatgtatatttttctcgttatatataattaaggataaatagataataaaaattgtaaatgtggtccttaaatgaatttcttttcaaatttatcctttttaaatcccattattaaaagttgagctaacatgatctttttgtataagttcaactgcttattaaatgatttagccttatcctttaatcccaaattgtttagtactaatatattgtttcatattataaattattcattaccttctaattctattaagtacacgttttgcattttatttcttttatggtatatttccttcatggtataatcaaaataattagcgacaacaaactgaaaagaaagataaaaagtttcttaattatttatttttaaagtaaatattgataattaaagcaagacaataattagacaactccatccctttatatgcaatatttttttttattattaattaaccttaattagtatactttttgttcaccctataatatgaccccaaacccacatgaaacttaacctaacgaagaccatctttttcaattacatatatgtagatatatatccttttgatccattcaattttctgaaaatatatataaataaaatatttatataaaacctccatcactcactcgatcagtcacacaaatacaccaacataactttaattcatgtttcattttcagtcctctttttcaattgatggatacaaaagaggctaggacaggaaaaaattgaaaagttgggttgttagatctatttacatatattgactttacactctatctcttctgtcagtttcacttttaagaagttattatgtactgtatacatctctctatataaatatatatattataaaggaatattttgtatcatttatttaaaaaaaaaataaaaattaattctacatatatgaataaattgtaattcaatctttcatatgaaattgtgcattgtattataaattcagagttcaaacatgctacgtttgtatttttaattatttattatttttaaaaatttagtgagactaaatattataactatattaatctacactataagggaataggtttcaatggttacatttttattgtaaccatcatggttacatttttttaag

SEQ ID NO: 379138 - DNA, 986 bp, Cannabis indica
tttttttttaaaaaaaataagtgggttggggtccgaccagggtcgatagcaaaggttaggtctaagttacgggtttagagtatgggcccgagattcgtggttcgagtggtcagagttagagttcggatctaggtcgccctagatttgggtctagggttagagtagtccgggtcgggatccaaatcagggttgggagtagggtccagagtctggggtccaaggtcggggttcgcctaatcctactcttccatttttccaaccaccatagtccgtcacgagatcgcaagaacagaccatcaccgacattaaccaccatagtttgttgcttgaccaactttcctctaacggttactcccacaactaataacattacgtctcttttcatcacagcaagttttcactcatgatctattttgttatgtatatttctattattgatgaaatgcatttaattttgtgtgtttgttcttttctaaatatttttaaacatagttaaacaaaatcagaggattggattcatgtaagaattagttaactttggattaatgttatttatttagttttggcatttgttgaacattggtgctgagataagctattactatgttctagttgaagaattttagattgaattcttaaataaaaataacctagtaatgttaataataccgtttatctttgctagccagaaattataaaactaattaaaaataaggagcactaaatgattagtattggcatatgaaattttcatttacattaaagtttaaacattttcataatccccactaatgaaagaagtatattcttataaaaattatattttcaattttatggtttaaagagggaaattttacaatccatacttaaaaaaatacctatttattaaaataacactcactaattatactgatcattttatcctaatgatttctactcatatccaaactatccttcccatttaattttttcaaaaatctcaaaaa

SEQ ID NO: 379139 - DNA, 1989 bp, Cannabis indica
aaaaaaaaaaaaaaaatctacttgatctgttgatcgtcaccaagttatcatattatctttctcatgatactgtaaaattaattaataaaattaatttgcttcaatattctactaggaacttttgaccaaaatttatgcgtatacaagtgtaaaataatacaaaaattgccagctaagcagcatgtgatatgatataaatatataatatatatttaaagtgttcgtgtcattcaaaaggtagtcaataaatctatatataattgttccataaactatattttatatgcatagattataagtagtaaaataacataatgatggattttatagcagtgtcatcacataaaagttattgggtcaaccaaatatgcataatactagagattcaaatcaaataagttccagaagtatttgaaagtcttcaaattttaaaattttattttcacacatgactttggtcaaaagtttctatataatatatggttgtttggtgtggtgtggggttggaacggatatccttcttttactatatgtaatgtaattatatgatatgagaacattccaatttaagtactcaattactataattttttaccaacaaattattcagtgggtttttattaattagaataagtattatataatattcatgcattgctctatatattcattttaattactatatgcatgcataacgtgaatgatttgtttatgagtttcaattaccatcacatattttttggacatgtcaccagcagcctcctccacaaatattattattgtttcccctactgggacctagtatgaccctaatattatctatacatccaaaattctgaagactaaataactattattatattctgtgagagtttattaatacagatttttaccattactcactctatgagaaagtaattcaaagatctagcctttgtgaggaattttatttatttagagagattataaaagatgaaactagataattatagtttgtaacaaaatttacaacttttaaacggtttaactaacaatactaactcaaaacaataagtaactgaattaggtactctatcatcttccctgaaacgaaaaagtgttgtacacacttaaagcttatactgcttgagatagctaaatcgatcagtagatagcagttttgtaagaatatgaaatgtttgatcaaaggatggaacatatcttacttcaatttgtttggccagtatttgatcacgagtgaagtgaaaattaatctctatgtgcttggaacaagcattaaagactagattgacagctaatgaagcagctctttggttgtcaacgtaaataattacaggagatggcagagtgatgtttagttcaacaagaacaaaacatataaccattttacttctgcaactgtgtttgcaagggctcggaactcactttcagtactagatcttacaactacctgttatttttttgcagaccaagataccaaatttcttccaaatcactgcatatccacctattgatcgtttgtcatctgggcaacttacccaatcagtatcttagtaagcttagaggtagaatcatttggcaggactgatgtgaatcccttcatttatggtacctttgatgtaacgccctaagatttaggcacgctacccaatatgattaagaaaccctaatcccctaaacgggattggtttaaaaataagcgcggaaattaaactttaaacgaaaacgaaatgaaaataaacttgtaataattttaaccttacaaataaaagttacatgtttcgggatcccaaaaatcattttacaaaatatcacaagtcttttctccttagccgacctaagcggcaaaatagagttacaaaagtttcaacgctggtagaccccaacctgcttggtctagtgtggcccgaacatgtacatacatcgcccaactcccatactcatggctgatcagagatagatttaccctttcctgcacagtagagcacc

SEQ ID NO: 379140 - DNA, 2839 bp, Cannabis indica
cactattctactcatgtttattggtgtaatgagtttttatgattgtgttttttttttttttaaattctttttgagacatcattctttttcaaaaatatatatgtaatgggtacctaatgagaattctttccctatagagcaatcacagtcctatccccgcattaatttaaacaagtattgaagcgggtatggtgtgaatttagaaagtgggtatgggagtggggagcaatcaccacacctagcccgtcccgcctcgccttgtttacatccctatttggaaaaatactttagttatttttttttcatttatgtatttttatgaaataattgttaattgtagtaggaccagagtgagactataatgcttgaaataatacatattgttaattgtagtatttcaactattaacatttaccaatacatgtccttttctttttgaatgagcattttgtggtttgatgagtgaaatatatacaattagtgatgaataatatatagaatttcttttgaaaatttacaagtcaagccgatcatttatgaggtacgataggtaaccatcaaacattgtgatgaattggttagtcactcttgagtaatttaacacatcgatagcagcagctatcttggcataaatttatcaccttgttgcatcttgcttacgtgattggatttggatgcataagatacaatgaaaatcattacaataaatgatgaggatatgccaaattattaacaagttctacaacaacatatcgatttattatcagtaattagtggtaatttttttttaattttaatttttatacacttaattttaattttttttgtgataaaaaattatttttctttataaatttggagtgataaataaatatcacaattacataccaacttaataatcattctatatacttatttataaagtaaaacctcaaaataatctagttgatatataactagtgaaaataaatctaaagagattttgacgcctaaaagaaataaggggctaagtattattaatcataaatatgcaagctttgtgaaccataactctaatatttgaacatacgacacctacatgtatgtcgtttcatgtgatcttacttctttattctccaccacttctgcttttgacgtatgatcagtcctaccaagttcaactccaacgccggcaacatattccagggacttcttataatcttcactcattgtctccactcggaacttcttatagatatcaccctgataaaacttcctcgttctcgccactaaaatgagcgaaacgacagcaccaaaaaccgtaacgacagtaataatgataaacgacaatttaaagcactctcctcctaaacaattcaaggcctccccgggcttcctcacaactcccgaagctgccatttgtttccttgcttctttatcgtaataataacccgtgacccttacgttcaacaaataaagcccgattgggcttgtcataccaccaaaattgtacagagttgagaagtattttaatccaaaaagctccgatatgatggtgaaaatcaatggccaaaaagctccaaagcaaaacccaacaacaatggaagccacgtagagaccattcgggacgttgaaggcgactaaaagataaccaacagaagataataacaatagcatagttaagaacagggtacgaggaaatttgtactttgtgatcaagaattcggagagaatcccaactgttatttggccaaggtagttccaaatgcttgtgagagacacaaagtttgtgattttcttcaaagggtatccgaaagaagtaccaatttggcccaagttgtccatcatcgtcattgatccacctagaccacaaacagtggccaataatagagtgatcatttcaatgctgaaaagtgcttgtagtatggtgtagtcctctccaatttctggtggcttgaaagagtctttccaccaagaaacgacttcttttcgaggagtcaatcgtcgagggggtgaaacgacaaatgtatcgtcgtgttgggaaactagcttgctcttaaggatcttgtcttcttctctaaaaacgacaataattgggagaaagaggaggaacaacacacccgcggcgcttaagccgtactctgtcttgttgaaactgaatgttttttctaaaattattatgatgaacaagatcccagctagacacatcgataggtaaaggaatttatagaagactttggcttcgtttcgtggcctattcactgtcttgatgattcgaatggttcggataaaagcaaaggacagagcagttggaagccaagccacgaacagagtgaaaaacaacgtgtcatcaccgtacaaagcacggtacaattgagcgatcaccgccgcacttatcccggtatacccattcaacaggcccaaaacgacgccgcgattctccgggaaattcttgacgcacgtgacaagagctccgttgttggtgaaagtgtgtgaattggctcctgttggataaattcccatactattgtcccataaataaagttacaaggaaaataatttagacctctttataaagcctcaacagaccattataactcatagagttgtcggttctgttttcctaggcttaagtcttttatttcttaacaataaaaggaagcaaataaatatctcaagactctaacaactttcagctattcaagggaaaatatctcaacagattacaacaaactttctcagatcagaaacaaacacaacaacaacaacaacattataaataagtggttcaaccttccactttgagcaagagaccatttcggccagcagaggaaaaatacaaggcagcccttgtttgttt

SEQ ID NO: 379141 - DNA, 3238 bp, Cannabis indica
ggcttgttttgtagtagtgaatccaaataaagtaataacaagctaaaataaataataactttaactattgcatcgaagcaaacttaataattaaaacacaacttcacaatataaataatgtaacataaattgctactaaacaaggccatgatgaactgccacaaaactcggcactatataagtccattaactaacacatatcctataatggtcatgtgtatatatatgtttgaattaatcacgacaccactaataaactatatagataaacacaatattctcttttatattattaggaaatacactcatcaaattttttaatttaaggatctaataatttaaaatgaataatgatacatttcatttacttaaaatacattttcacaaagagcaagtcttcaagggaacatcttcaatgggcaacttatcttgaggatatgggcaatcaatattcttggagttatgaggcaacaaatcccaagtctcaactttgaatgaagttttgaaatctgggaacaatgtcatggttgtgttggagatgcaaataccagtgaaggtgtttccggggagcacttcgtactcggccgggaccgtaacgttttcggccaccatatcacggcagttgatgttggaaacatccgacaagagagtggggtcataaccctctgcatgtgtcttgtaaaattcattcactcggaacacatattgcatggttttaaggataaatcttcgtgtgaagatgtccttgatgtagccaccacgacccggtgccgttttgatcctcagtgcagcttgagtgtcgatggcagtgacatcttcagctctaacgtctttgattccacctgacatttcactgcccaaagctatggttgcactatctggagaaatgcatgtcagccgtcggattatgatgtgctcgcttggcattgccatcttaattccgtgttgatcaaaaccactctttatagctatgcaatcatcacccgacacaataaagcaatcctcaattcgagtgttggtacatgagtcttcatcggcaacatatgaaatgttgttaatattttgaatattatgtgggaaataataatttaagatatttgtgttaatacgaatttgagtttctcaccagggttgattccatctgtgttgggaacatcgactggagcaagaattgttagcccttggactattatattgctgcaaacacagtcactcataaatgtgaattattattgttgttattattaattaagaaaattaaaaaagaagggatcgtattttcaaaccttgagtatacaggatgaacgaaccaagaaggtgaattaagcaaagttaggttgaagatttggatatcacgagagaacaagatctcaattaacaatggcctaactgcatttaattcatgagccttgaacttggtccaccaagatttaccttgtccatctatggtgccattgttccctattatttttcaattaaacaaattagaaacaaaatccagtataccatgtacatttttttggcatatatatttatataaaattgttaattgaaaaacttgtttacctgtaattacaacatcagtgagatttgttcccataattagactgctgaaccttcctgtggaatttttctctaatccataagaaggtagtggctgtagaattggaaattctgattcttcctatccaagtaaattaacaaacaaagagcaattaaatggattaatattttatttcatcaaaaaaaaaatacactattttaattttgtaaaaaattttttacaaaatttaaataacctataaaaactgtttgaaattgaaatgtatgccatgagcatacatatttacatacctgggagcaagaataacagcatctttatgaaggaagagagtgaaattgctggtgagattaaagcttccagttaaccattttccgggaggaacgatgagttgtgctccaccgtccgatgcgaggggcctgagatgatcaacggccgccttgaaggccttagtattggaagtaactccatcgccaacgccaccaaactcagtcaaaaccgcgctgtgttttcgagaacatttcactgttgttgttgctgttttcaaaccttgggctatacatgttctactttcatccaaaatcaacactgaaagtattagtattcccactaacaaacgaaatgattgcattgtagtattaattgttatgtgttcttgttatgtttttaagatttttaagacaattaacaattcaatttataaataagtttcttgattttttttagtaattaagtctatttatatttgggacttatttagaaattagctaaattaagtacaaactataaggttggcaaagataattcaaatttgattgatttcctctaccacaaaaattattcctaattttagcagaattgactacatgataagtcattttattagactataataaggcttgacaaacgtaattcaaatatataatttacttttccacagaagttatttctaattatagagtttatgatatcaattttcttgagtagttcttctgatggcttcattttctccacaagattttgttcatggagacactacagtatttatctaaaataaaacataaaaaggtctttttggatacactgaattaaattgtattatattgcttaatattatacaattatgttgaattcgaaacaaaataaaaatatataaaagtaattttaaatacgtgacatttaaaataattttatatatattgttttttttttaatcgagaaaagaaaattttcattaatcacaaccaattaaaaaatcacacagccaaaataaaaaactcaaacacatgccattacaccacacatgatctttgtcaaaaaattcctctccttcattttcctgtgtataagacaatagaccctatatcgtatatctctttttatcatatttacaatatacttcacgagtaacaatcaaatatacaagtatgttccaattatgccaaaaatgatatattactgttgttattattacaaccacaaatagtcacttttttgatctccttctttaagccttcaagccactcagtccacaaacctttgagaccaaccacaaccataacaaagccaactttgaatctgtttaagaaacagcgggcagaaagagaagcagaaaaatagatgaccaagatcctccttgttaattctatttttggcatatttaattgacaaaaatat

SEQ ID NO: 379142 - DNA, 1096 bp, Cannabis indica
ttagttttttttgagtaaatttccctaaaacctatttttttttattttatttcatttttatttatttattttattttttttgttgtaaaaataccagtgccttattaggaaatgtaattttaaaaaagttcatacgaaaaaagaaaaaaaaaaaaaaattctcctagacataattttctcttcccttaataataccccgtatttgcaaaacaatatatgcaatatgatgttcttttttttatatcaacgatatcttttttgcactgttttttctcataaggttttctctacgaagtttactctaaaaattttaatgaggctaatttttctaaaaaaagtactaaaataatcagttattagttatataactaattatcttattaattaattttgtaaaaaaatcccatgtatttagttaaattatatactaatatattaaattgcaggtgtacaagtaaaaccacatgacgcaacaagtgtaatgtgttatgctggaacacactaatcaatacaaggatcatgacccatccatcacagaatcccaagacctaaattacaaaaaaatgaacaacaaaatagacataattatcttcaaagctgcacaatgttcttgttgccggctgctatacacgtatgtatatatttatttatagtagtgttacgtacgtgggaacgattgtatatattataaatattgtagtatgagcagagagcataattttcagagccaagagataacaaaacggcaaaaacccaactcaaactctgaaactagagcttctgtctgtgagatcgattatcaagtatgggtttcacatgcattttgctcctcctcacctaaacaaaatcaccaatttcctgccaccatgagaatcctaagcctatctatctacatatatgtacatatatatattttaattaagtttgaattgggatatattttaattaggttaattaggatgtttgtccctgaattttgacatgtattaaattatgtttcatgaacttttaaggtcgttaaaaatgcctcttgaactattgaaattgttagatttaaaattttttgtttaattacattcaattttactatttcagt

SEQ ID NO: 379143 - DNA, 5055 bp, Cannabis indica
tttgataattatagattaaaatatagtagaaaagtttttacaaaattaaataaatttagtaataataattataatataagtataaatattttttatgataaataagctcacaaaataaaaattgttaatccatcagtgattataactataaaatgaccacggaaccatttcataacgggacaaaattcactataaatataatgtacacagtagatgtggccattatatatatagcatataatttattaaaaaatttgcaaattgaagtaatatatagtatttatgtaaaagttctaaggtctaattttctttttttattattatattgccataattgatgagctaaagcatgaaaaaagaaaaaagaacattaagtatattaagatacaaaacttgatgtcacctgtttgaaccggttgattagtataaccatatccatatcattaaaaaacaccaatcgaagtagctatccaagttgctgaatttacatatacataaaatggaagaaatgttcttcataatgtacaagattagtacatatggtacgtacggaagacttcatcaaaactaatcagcaagattagaataaataattactaattactaattgtctactactcagatagcagcataatagttaaataatatcttggcaaacataaaatgtggaagttgtaaatggttcgagtaattaagaagttggtcggcccctgtcactagctagatttatataaatacatatatttatataattaatcttaatcatatcatcatcatgaatttatcaggccactttgatttagtaagtatgagatccaattgggtgtatttatatataatttcaaacattaattatatatattaataaatatgcatgtttgataagtacatatatatatttattatgatatattagactccaaatatcaagtataaaagcagtgcttaatccatgatcggcgtgccttgttttttgtgagagctaattaagacattatgatgttctctaaacattttcttgttgcaatatttcaagttgcattggtcactctatcaattattgttcaagctcaggatcataaaggtttaaccttatttttccttcctttcctttcttcaaatatatgctaagcattttagaatacttaattagtctaaattatctacacatttatagaaaaaattatactaaatttttactatagaaatttctgttcttcaaaaatatatgtagattcgtatattaatatatatatcattaaaaaaaaatgatttttagtcacaacaaaatttataactaaagctaaaaaattgtgactaattataaattactattcctatgttgtgattaaaaattccgcggctaagatattagtaacaaaaatcataatttgttataattaaatgtatttttaatcatatataatatatatttgttatgattaaaactatattagtgataacttttatctaaatactataattagtcaatgaagattttatccatccttatacctatgatccatacctatgatcctttctatttctatcaaatgtagaatatttggttgcacacccaacaactctccccttaaacaaaggaccaccttacctccccttaaataattccccatcagtcaactctttactaactattctctctaatgtgttggggtgcacgccttacatggagtatcacccctacttcgagagtcgagagttcttactctttctcagaatcgaggctcatctcctttgtttgacaccatctatctcgatatcgataaaatattgtttgctttggacttaaactcttatagttttatttttaggcaccttccaaacactactacaaatatcagaattcacgactgtcctaaaaatgattttttttggaccgtcgctaaaagagattaactatttaaatatgtcaggaaaaatttaatattcctgacggtttaaaatcgtagtaaacaaaatagatgatgtttttttttaataaaatgtgaattttcacgagagccttatacccgatggtttaaaaccgtcagatataagggccattaaaaaatcgtcacctacttctccccacatttcccacgtgcccacctacttcttttcaatttcccacatgcccacctatttcttctccatttcccacaccctaaaacaaaaatcttaactctccaaaacccaaggccgacccaaatattttgggggtcttatgcaaaaaattaaaattggactttttgtaaaaaaaaaaattgaggaaattacattgtatacccattttactttatttgttttaatttttatctctacttttatattctttaatatatactcacttttatagatgatatccccattagacctcttaagttaatgtaaattatatggtagacgtaaatatagaatgaaggtatattgggcaacctactcaaaaaagtagatatattttaatataagggtatttttgattaatagatacaaaaatgaggtatttttctttatgttcattaagacctccattgctaatttttttatttcttttcttttttttagatatgtttctaaacttttaaatattaattttttaatgtatatttataataataatgataaaaatgggcctttaaaaatggggctcttgtgcaatggcccaagctgcccaaagcttgggccgaccttgccaaaatcccacccacgcctctgcactatcgccctcctctctcgatctccctttcctctcgtctttctcgtccatcgatctccattcacccctcctcccgtcggtctccctctcttctccatcgcatatgtaagaccaaccaccacctcccgtcggtgtccctctcatctccgtctcatacgtcggactaccaccacctcccgtccatctccctctctctctttctctctccccagctcggtataaatacatttatttatttttatatttttttatttattatatatatttattttattattgtattaatttaatgtgttttaaagttagttgttattataataaaattaattagttgttatattttaatttaggtataattataaaactaatgtagaaaaaaataggggaaaatacaaattatttgaaaagtctgtatttttttttatttttttttacattcttgacagtttaaaaccgtcgcctataacagggtatacacaacgattttaaaccgtggcatatactataggcgacgggtccacattagcgacggtttttaaccgtcgtgtattttgcccgtttcgtgacggtcgtataggcgacggttatagaaaccaacaggaatactttaaacgactgtttaaaaacgtcggaaaaaactatttttgtactagtgaaaaatgtctcatagatattgttcatctttataaagcagtgatccttttcatttttagccaaaatataggactttcgttgcactgacacttctctaaataaccgcacgtattacctgttaaaaaaacatatattacctgttaaagcgctgtaaacttgatattcgatcacaaacggagcgtgttgagcatctaaaatttagaatttttcactgcttttatcgtagaactccaaattccatgataattcatcatattcatctcattgaagatatttcttctcattatcaattcacaaaataaaataatcaattataacatacctctaaaatgttacatatatctatgctactctccattctccaacacactctacttccatacactcatattatcatttattctctgtaaagcaaactaacacaaaaaattaatatcgcaactcatttaccatcattaaactattaaatatttgcatattcatattattatcagtttctgtaagttaatatcttaattttcaggtttcattagtatagattgtgggatatcagattcaagctacacagatgaaaaaacaagtatctcttactcttcagacgaaaagttcatcgaaagtggggaaaacaatgagatatcagccgcttacaaagtgacaatccatgatcaacaactctggaatctaaggtattttcctgaagaaaaaagaaactgttacaccttgaaacctgaactaggcaaaggtcacaagtatttgatccgagcaaggttcttgtatggaaactatgatgacaaaaacgaaatcccaaaatttgatttacacatcggagttaatctgtgggaaacagtgaaaattgaagatgcaagtagtacattgaatttggaaatgatacacgtttctctttcagatcacatctatgtttgtctagtaaacacaggagacggaactccattcatatcagccttagaactaaggcctataaataatgaagttaattatattcctgaaattggttcatcactcctactccatggtcgttatgctttctcttcattccctgcaggccaaatcaggaggttcaattatttatactttattatctattaattaaatatgtttagtctaatttattttagatataatataaatatataatatgcagattcaaagatgatgtgtatgatcgtttatggagacaacttggttgggaaccatatattaaaggtccctctacagatgaaagctctataaaaaagaacaaattcggattacccttctcagtaatgaacactgcacatgtggttgataaagattatcgttctttgggtatcacttgggaaagcttagagggcggcaaatacaaattctactttcactatacggaactagaaaatctccaaccaaatcaatctagacagttcaacaccttcctcaatggaaaactattggattcacttttctctcccctttacttatccgatttcactatatacagctatgccgaggaaattcaaccaggaaaacagaaaatttctctttacagcacccccaattcaacttcaccaccccttataaatgccctcgagatttatagggtacataatctattgggacaagaaacaaatcaaaatgatggtatgatcatatatatatatatatgtatatttttgttataatttattttt

SEQ ID NO: 379144 - DNA, 1413 bp, Cannabis indica
tatgatttttgttttgtttttttccttttggatatgtgccactgtaatttgtctcttgtatatatcttggtctggttctttctctctttttctctctcttaaagagttggcaaaccaacagaacggcataaactaaagcctcgagaaattggacatttctttttcttgtaagaattaattaatggtgggaactattttttatgttaaatcatataggttgttttttcacaatcacaaaagtcgtcttccacttgtcatgtattacatatatatatttcataatttatatatagtgcctacatagcatatatatataatatatatattaatataattatccaatagaatagaaattattataatataattaatttcagagatccatcttacaagttcagctgatagttcctgctataatatttgaattaattaaatatgtaatgttgaggataaagttttgtgccaagttgttggcaaatgaattgacataggaacctcataggacaatgaaccagaaaatgtgagattatgctattcatctggattagacattatttattattgtttatgtacaactatacttcccaaattaaagaaatatattaaattattttttttaaaaaaaagatattttaatcattaatccaaaaaaaaagagtttaataatttttacatgcatgatgaaatgggaagaaattatttgaactaccatgcatgatcatatataatagaaaaagggaaaatatcctaacaaatttaaatccactgctaggtgaatattacaggaccacaaaggagaatattgaatattgtagaaatgactctacaatgtgttgggctgacatggctgatcatatcatttctttatagtaagcacatataaatataaaataataattgaaaaataagatttttaccttgacacttataacattttgtcctctaaattattattattattattattattattattattattattattattattattattattattattaaattttccttcaaactatggcaatatataattacaaatttatcttttcagttgtattttgcacatcttaattttgaaataatttattgatgtagtcatcatgtgtataattatagtaagaaatttattaactaatttaaattagtataatcttaaacattctaaaattacgaacatacactatcaaagtttatcattataacacttaggtggcgtttggtaatgaaatggaatagaatggaaaagaaacaattttcattttattcctttgtttggttgcattttagggcgcttggtatgaggtgttcaaatattttgattataggaatattatgaaggagaatatgattatagaaaaatgtgtaaactgtgtttggttgtgtagggtaatatgtaatcatatt

SEQ ID NO: 379145 - DNA, 7212 bp, Cannabis indica
tttttttttttttttattttatcaagtttaattttgaaatttagattttatagttgtttattttatttgactacaaaaaatcttacttttagtcacaacaaagcttgtgactaaaagtgaaaaagttgtgactaattataaattatcattcttatgttgtgactaaaaagtccgtggctaaaagtattagtcacaaaaattacaatttattatgactaaatatatttttaaccacaatacttgttatgactaaaattaaattagtgacaatttgtgtctaaataatatgtttagtcacaagtaatttttttgttgtgactaaaagtcacttttagacttttagccacaaaaaaattttgttgtgactaaaaagatgtcactaaaaaaagtatttttttttatagatattatatatttagatattaaagttgaaattttctattttataaataaatgtttgtttcgtattttaatgttaacaattaatgtttgtttcatttttaaggttttaaattgcaatttctaagcttaaataataaaaactaataataatcggttttgacaaatagggttacatttttttatttctataattattagatatttgtaacacggtatatactatatggagaaatgtttaaaggtatttatggtgcctagtattcttctaaggtaaaaaattaatattggtgtaacttaatatcggatctcacttgttttactttaataaatattatagaaatcgctaactaattatagagcgacacttatagcaatgctctatttacattatatcggttaaaatatgtaataactcgatcgatggacagcctactattgaagacaatgaaaaaagactaaacctttattgttaacttcatcaatggcttttttcagggtctgctccactcactgcagttcaaatgctttgggtgaatttgataatggacactcttggtgctctagctttggctactgaaccaccaaatgatggtttaatgaaaaggccaccaattggaagaaatgtaaatttcattactccaataatgtggagaaacataattgggcaaagcatttaccagattgtggtccttttagctcttaaattttatggcaaacaactcttaaatctcactgattcagattctacttcagttctcaacacagttatattcaactcctttgtattttgccaggtatataaaacttattatttatgattatctttttcaaaaaagtattacaaagatcaatagtgattcagaaatgatattatttttaagacgattacaacaggaatatcacttttgtctttactataaagacatttgtgttttcagtatttgaataaattataaccaatttttttttttttatacaacggtctacattatatttatagtaggtattctacccatttttgaatttttttgaataatttatgttaaaagcaaacattcaagttaaaagaagtgcttatttctttttacaaatgtataattctgaatatttgggctataaattattctaaaattttcgaaaatagatgaaatgtttgctatgactacaatatacacagttatataaaaaaaaatctaagttataatttatctaaatactaacgttactagtaggaacaaaaatgatatccctgctacaaaatttttcattaattttattgggttttttgcaaaccagatattcaatgaagtcaacagcagagacatggagaaaatcaatgttttcaaaggcatgtttgagagttggccatttatgatggttatggtctccacagtagttttccaagtcattatagttgaacttttggggacttttgctggaactgtacctctaagttgggaattttggctacttagcatcttgatcggagcggttagtttaccggtagctgttgtcttcaagttcattccagttaaaatcaaaaccaagaatcatcatcatcatcatgatggttatgaagctctaccaagtggaccagaattggtataaaataacaagctaatatagcaaataaatcagtggattattcaattttcagcacattaattttaattttcatgacaattttgattgattaatttaattaattgtttccaatttgttgattctcctaagttggttggttacgttcaaccttagtttattctattgttatgttaaatgtacatttctgactcgaagtagaaaagaacaatggtcctgctgattgtactcttttttttttagttattttaaattttcccgaactattacaactgccaaattgtgtcccttcatttgaaattcgagacaacaattatgtaatggtaaggataaaactcaacaatttaacaataatttagagatatttgatcctttatttgctataaccagggaagtagagtatcccacatcccacatcaatgtgagaatccgatatagagaacaataaattgcaggacaattaaaaatggaaactgtacacaaaaactaccaaaactgtattgactactttcaatccaatagtacttgtttaaagttgtaaattctactttaacaatctcattaactaaaaccattgtagaatgcaattgctacatagcttttacattctactagtctcttaacaagttgagattcgttcatgaaatgtgttattatccaaacactagactacaatcattgttggttaccacctacttcgatgaaggttccacttgctttttgacaaaaagcttgtttatgtcttctgtaacaacgttgctcctgttatgataccaacccaacaaaatatcaacaatggtggtgtggataagcagaacaaaactgaatatgcaaaattgtgattcgatatagattcttaaatcatggcaaaatttcggtttcaaaatgaagcaagggtgaatttctgacatattgagcactgatccaaatagcaattggtcttaaaacaataaaaatctctcaactatttaggttaagaccaaattctacaaacaaaatattttcaaagtgaaatccacaattgacaatgcaaattcactatagtatacaactcttatccttcttcttcatagaaaatctttcaattctacaaacagctattctacttctcatcgtacataaactaaaattagctcaaatcagtccattagttggttatatgttaggctcccagatagtaaaatataatttaagagattaacgactcgtttggttactttaatacgctgtattagatcatattgtattgtattatattaaattggattatatatcatatttttatagaataccatgttaaattttaatttgtactaaaatattatatatgtatatgccaataaaagttaattaataccacatatagttttacataaaattattacataaaatacaattcaataatactatacaatacaatatggtgtaccaaacgaactctaagtgaaaagggcatatgagtcaatgtattgagtgctgcttttgggagtgacaatagaatagtataaataggtgagtatatggagtgagagtttatgcaagaattaacaggttatcatggagagactagacctctcaaattgtctagaattgtcactgtaattccctgcttactgcaatataatttcagttagtgttcctttggttctctactagttttcgctgctgttaattcctacatttcctaagtgtaatcaatcgggctacatcatcataccaccataccattcagaagtaaagtctcccacactaactcttggcctaatccacagattgcccctttcacgacgtcactctcacttgaaggtgcatgactctaataccacttaatacaaccactaagataaaacttactcccaaaagctaatctaagagaggaggatgcccaaatagttatatactactaacatggtcaatatgggatcaattaccaaaatgaaatccaatgttgtcactgcaaattcactttcacaaactgcagtttacaactccaccattttgactcatacaaaaccttccaattccataaacagctattctcaaagtattttgtagaaatagtcactatgaaatttaacttctaagaaaaaaataagcaaactaaccatgatcgcacaagcgactaaaaattacactaggcgaccacaaaaagagcattatggtcgttttgcaaccataaatttacattgtgtgtgaccatacaatgttgttattttgctaatttaatattttcatgttatttgttcgacaaatttccctattctcatcattcataaactaaactaaaattagctcaaaccattccattggaaataccattcagaagcaaagtctcccatattaacacataaagcaatgacaaaaccatgaaattgcagagaaatcatttaaacaaagaactgaccttccacgaagttggggaggaacaagaatgccaccaacagtatctggaacactcttggaatgactcaaaatcccttttggaactttactgcgcggcagagacgaagctaaaccaactgggtctctcttccttgatgatgatgatgatgatgcactttgaccactcaaagaactatatgaaaattcagaagagttcaacagttctgaagcatcaggaagtttcacaatttcaggttcaggcttctcacttggttcagtactatccataaacaaagaaaaaactccattaagggttttagaaaacaaaacaaaaaagccccaaaacatttctgcccagattttctaaccaaaattgtagctttatctcagtaactgatcatgattgtatagaatttattgccagaacagttgaaattttaagaaattgaaaaatgcagaaatggaataatgaaacctaataataaagttaaaagtctatcaatgattctgtgtgtgaaaatgaaagagggagaagattacagctggttgtggtttgggcgaggttgaggaccttgaggttgagccttgtcgtcttctccgacgggatcaaccggaacgacgtcgtcgtcgtcgtcggacgaggcgtaatctaccaacgacatctccgcgagtctctccttctcacgtgtgtataattcttgttcatatacaaaaccataacgaaaacggtgtcgtacaataagtgtctattgttttccaaatttaccctcctataggaataaaagtttttctttaaagattcaaatttttgctcataaaaatactatagtcaactcgcaaattttttctgatgacatggacattaatgtttaacacgtggcaagaaaaataatatcacagagttaagtcaacctgagtcatagcagttgacttgggaagtgaccctaaccctacgcccaactactatctttcactattatctaccatgaaggcatagagcaatcaaatccaagcactgagaattgaaattacacgaacatgcacctcggaatccaacttgggcacctagggtttcatctagcacccaagttgacattcccaactatgatttcaattttcgagaccgtcttagtggaaatgggtcaaactttgcattgggacatcaattaggcatatcacggacatatttaaggcatcaaaatcagattcaaaataagttcatttttgagcacccagagcactcagtgcttgggcaccccgtgccttgtaaacctaggcgccttccaagtatcagatcgatgatccgacctttgcatctttttaatcttcatcgaaaacaatgaataggtactttcaagaaacaacactttctgggtgccaaaagcaaggctcaacacctaggttgatattttgttaacccgggccgtaactaatgatgtttttcgagaactctttcgagtatcttctccgttttcaaaaaagattaaaattaactattttcaggaccaaacagaacttttgaagggccataactgggacccagcgcccaggttaacatgctatttccaatcaagttctcgaaaaaatatttcgggcatttttttgtcatcaaatgaagattcaagcaaactcgaggagaaaaccacaaacccgataccttggaaacagggcccaacacgcaggttaaattggtgttgggcccgatgcccaagttgacaatcaacttggtgcgctagtttcgatcattcaaatgccaaatatgacctacaagtaatatttgacaatgattgttggaaattatttgcaacacacgcctttagcaatgtggagttggatgatgcatgtccagaactaaagaaaatcggtagtgaaattgttgcgaaataatgtaagggacttcctttagcaataaaatcacttgctggtcttttgcaaactcaatttaatcaagaggaatggagaaagattctgagaaatgatatatgggatttgcattggcaagaaaatgggagtgttgaggttattccagctttatggatgagctaccaatgtttgccttcacatctaaaacaatgttttgcttattgttcaattttccccaaaggttttaaatatgagaagagacaactaatcttgttgtggatggcagaaggaatcctacatcaatataagtctgcaaaaagaatggaagatgttggtgaggaatgcatcaatgctctaatatcaagatcattgtttcaacaatcaagttggaacgaatcaacaatttttatgcatgatcttgtccatgatttagccaattttgtatcaggtgagttttgtgtaagattggatgacaatagtaacttaaacaaccttacagggaagactagacatttgtcatatgttgggggaaagtttgagttcaataagcttgagaagttatcatctttacgcacctttctctcattccactcttcaccactgcatggaattacatcattgccagatcacataacaatggatgagatattgttaagtataggaagattgttaaaaacactctctttatccgggtcttttatcaaagagttgcccaattccgttgccaatatgaaatacttaaggtatttggacttgtcttcaactgaaattactgaactgcctgatacagtttgtgccttgtacaatttgcagactttactattagcatactgtacgaatctcattcgtttgtcaatgaagataggaaatctaatcaagttgcgccatcttgacattagtaattgttaaaaaataatcctccacttaaactgatattcagaccagatacaaaggacagaaaag

SEQ ID NO: 379146 - DNA, 3360 bp, Cannabis indica
aaaaaaagttaaaaaaataggttgtttttatctttcacccaaacaagttttttaattttagaagctattagcatattcaaaaaaaagaagaaagaagcattatacaaacaagttaaaaatttaggacaaaagtaatatatagaaataattggaggacccaaaaacaaccgagaaataaaagagaaacgacacgtcgtttgttctctaaaactcttgaaaatctcgaatcgaaatagaagagaaacgacacgtcgtttagaactgttgaaggtttcgaatgagtcgaatcgatagatcctcgccttctaaattagagagcgaagaaaggttgggaactaacgagttgagcagagaactcactgagttgaatttcaatctcaaaacacacagagagagagagagagagagaatgaaccagagccagcaatcgagcgatgggaggcacgaagacgatacatccctcaccgagttcttggcatcgttaatggactataccccaactgttcgtctctctattatccaatctttgttcaattctctctctctctctctctgtcttttctttctttgtgtctgttcattttcttcgtttatttgtagatacctgacgagcttgtggagcattaccttgccaagagtgggtttcagtgtcccgaccttcgattgtaggtacttctttgcttaaattatcttttagggtttcttttttcttttccggaaggattcaattttgtttgatttttagctgtgaatatctctccctgtttgataaattaggggaattcagtggaggaggagaattttagggcaagtacaattacggtttttatatatgtaggaataagtttgtatggaactaatgtttgaattggggattattcttatagtatgaatagggcaagatgacttgattcttctatttaggtgaaaaatctgtaagaggatgattattctcagtgtattaatttgtcctgagccataattagagattattgttatccttattgttttaaaatttcacaattatgtaaaagcaaaaaagaaaaaaatttgacaatttttagtattcactatagaaatttgttgatacttgatagcaaaatgagtattcaccgacggcttatgaaagtttgcattgaaatcttggtaattcttgaacggaattttacaagttttgatggtaaactttttgggttgttttgtagaaatcagcttatttgagagctgtgcttgttttttttccctttatttgttttgaaagctactattatacttagagaaccagcaatcagtatgagtaatagaaagcctggtcgtaatcgaacagaaattcatgttgttattgtgctaggagaagctttatctctatgtcttaattttctgcacatgttctttgagttaggaggttttaggttttcgtatgtgggtttcaaatgtgatgtaggagatatatttgccaagcttatacagaatggtctagaactttgatttgttatattttgtcattttatgatttactttgaatcccatttgctgcatcataaagtaattaacaaaatgatagaatataacagattacagatctagactaagcttggtaaatatatctcttacatcaaaatgtccacaaaatgttggcatacattaacagtgatacagaatatatgtatgcatttgcgtgtgttttattggtttttataaagactttcgtagaaatagtattccgaacacattatggtttctgtatcttaatgtggcagaactctagtaatttttaaggagttttgtagaaaatagtattctgaacacatcatggtttctgtatctcgttctgttaaacttctaataatctcgtttctcttagtacaagttacattctactagatgaataacactgtttttattattttggcagaatcaggctggtggccgttgccacacaaaaatttgtcgcagaggttgctactgatgctctacggtaagtcaatgctgccatatgatatgggcttgttttataagctcaacaaatacatgcaatcttgtttatttaagaattttgtggtgagctggaaacataccgaagaaagtggtgtagtttgtttataaactacgtacgctaaaaatagtacaacggtggattttatctcaaaattgaacttcttttttggtggattgtatctgtgactgcatttaatgtagacatttaaaagatattctcttactgggttattacaggcaatgccaagcaagacaggcatcagtcgtcaaggacaaacgggataaacagcaaaaggtactactactatttactccagttaatccgtgaagcttttcctttcctgtttaaatttggctggtctattaactctttgtggaaacaggagaagcgccttacattgacaatggaggacttgtcgaaagcattgcgagaggtattataaacttatattcttactttcatggctccagtttctagacttaggacactttgatttagggaaaacaatacagttagcaaaccatatagaatcattaagtaataacagatcttagattataccgagtcttgagcttattctacttttgtcaagatcaagtttatatcttgttaactattgttgctgtaaataacagttttcttgtaatatcaccacctgtatttgtgcatcgacggagtctgatatattgtatgaacataatatgatgctgataaaaagggtttgttttttagttttggtggctagcatgatctgattcaagtaacgatttatttaccttaaaattgttgaatgaacagcatggtgtaaatgtgaagcaccaagaatattttgccgacaatccttcgaccgggatggatcccgcttcaagagatgaatgaatgaattaatgcatgtatgttgtggctggatcaacattcaacagtccatttagttactctttgtggctttggagaaaagtcactgctattaaaactaaaatgtgcccaactcacttattagtaatgtttgaattttgtacaattgtgtttcatattgtggataatatatatttgatttcttagatcacttcttgtatttccagagcttagcataacagatcaagatctctatggcctcctcctttaaaatatttttcgagtgatgaatcatcaaattagagacccaaaaactatgttaggttgatcaatctaacacttgccagtttcagtatgttctattatctttttagggcacatttgataaggagattgtattgtattcaatagtaaaataatgtaaacaaactagttgcactattcaatacatgataatggtcaatattagtttgtattgtaatatttttgaacttatattttattat

SEQ ID NO: 379147 - DNA, 4075 bp, Cannabis indica
tttttggtgacatccatgttttcaaagacttcaaagccaagtttagagactttatcaatgttccaacctacaataaagaacaaacttttttcactcttgtttcaattataaaaaagtaacgtttctttctttctaaaaggataatgtgtaacagcactgacaacttcttgtctttactactattttatatcaattatatgtatatatatatatacctcatctctgaaagcctcattataatgctttcccaagtcttgtttaagagcattcataatatcagcctcattttcctcaagaaaagtaagcaatcctttcagctgtgactttctccaagatatttccttagttgctccacttctgtagaaaaccctcatagactcaagatcaccctgcagatttttttgacactccatagctgaaatgcacctaaaaagaataacagaggaaaagttcttagcttgatcaatgatatcagcactgtttatactctcatataattcaagtttcaacaacctctttggtttcacagttgggtttcattaaagcatatgcatgagtttgagtacctaacctagaacaatataataatgtgggacacaatgagttttcatttcaaaaacttacctctctaattaagcgatgtgaatatagtataaacatgtgcatatcactgatatcattattgttgtagatgatgtctattgtggcatggtccagaaatttaatgtttgatacaaatgagagcttgaagaagtaacatatgatcctaaaacatgaattttcatttataaatatatatttataatgtatttatattattttttctttttgctaacgatttttatactatgatgaaattagatagtgattcttttccaaaataatggactgaatatgaaccagggtaggtagtaggtaccactagaaagcattgcaataaatgcagtaaagcaatataatgttccaaatttcatcatgtattgtcataaacttagtgggtgccctaatttaaccactcttaataatattaagaccttctagtcttcagcattttttttttttaaatttaagcgttaattatattatagaatgtataatttgggactcgaactcagacctccaacacacgatttatgactacttgagctatcctcaattcctttaacatgtaactaatacaagtataaatatctccttcataataaatacttaaattttcttcctaaaaaaacaattaagaaaagaaaaaaaaaaataaagaaaactttaacttttattaaaaaaaaaatgggggacaagtcattctagattttaataagaacttctatgtgtagagatgagagtaaatgctcacatccatatttttatcaaacttcagcaacattaatggaacaaaaaataattgcaaggagacacatttatatatatgaagtaaagataagtctatcaaatatatatatatagaatgtaggtctcaagagaaaaactccactagtagtctagtagggcctcttttagaaaaacgactttaccacgtcagcatatgcatatttttaattttaggtgagaaacaccggattatgctcatttttattacaccacagcagctgcccaagctcactagactccacggtggacggctgccggcgctgggcaatggcagtgcattgagaatctggcgacggaatctggaagatcactacgagaggaacattttctgaaactcgtttggcccgttgggagtcgacgtggccggagcgaagccaagaagctttgactctaatgaagtgtttcattggcacgatcaccggagatgggtcaggggccacgatcttggggtttcttgttgctgacattgagatataaaacaaaggaaaaaaaaacacaaaaagagatgatgattaataagatgagtttaggaaagcacacgagtattcccaaatgagattgtgcaaaccataagtccaaacatagtcaagaatccatattgtcagagaggcgattctgaggattactggtggcgtacccatggaagtagaaaaaatgagtgactatatacagagagtcatggatagagcacaccacaaggatgcttcattcctcccaatatcattatcatgaaaaacaggcatccatttcacagagttccggtcccctcttaatacaatttgaagagattagcctctttgttattagattatgaggcataaagagttgggtagggcactttatacatgcctcataaaagatttaaacaaaaataaaatgaccatttaattaatttaataaaaattgaagaagcaaaagaaaaataaaaattgaaaaatgaacttacttcttgcgagctttgccgacttgaaaacctatacagaaaattaagaaagcagtatgaaacaagaacaatagcgacataatcgtactctttagcaagattgtcagcggtaaagtttgaaacccacaaccgtaatctctatcttgtttgattgtataaggaaaatgggacatttgtgtaaaaattgtttctttatttcgtatctcatgcaaacttttactgggtcaaatgggtcaatttgttttttttttggttcattgatctttatcagaccctagcaatggttaacttgaggtgtttattttatgtcaaatacctccatctggtcttacggcgatcggaattagccctttttggccttgccgtgagaaacgagagggggagggttgagtcaggtttgaataaaaaaattaaaaaagtcaccagaatgtgtaaaattcagatgtttaccaccttaaaagaattgctgacgtagcaatttttattggctgaaaaaggccctataggtggaggctttttctggtcctaccataaaaaaaattctatatataaatattttttctagcgaaaggattgtgccatcctgccaccacgcaccaattcattaaacttaagaaaaaagggttaagaaccaattcaacttacacgaactcacacacaacaaagtcattaaagctagcttagtggtgagagagggatggaaaaaagatggagattataggttcgaacccaagacctttaaactattaaaactattaattgattataaaatataattacgctacactcaaaaaacacacacacaccgaaatcgaataacacttagacaaaagaaagaaattttcgactttattattctgtgtatctcattataagtgattagtctttacacatgagttcaggcctaattaataatttctggagtgaataataggtgagcatgatctccacctacttttcgataaaatataggacctttttcattcgacataatacgttgttatgatacttgggcaaggagagtatcttatacaaaataccataatagatcaaaatttgtatgtatgtatgatttataatgataatttataataaaaaaatttacctccgatgctaaaaaaaatatttaggccaagggaggaacgtgttcgccgcatccttaacatagcgtaacccttggattagtactgggtgtaatgatctcatacttaagatatgaaattagtagacaattaatattaattattttcacattacgattatatgagtattttgtcatataagatctatttgctaaactatcacatagattataagctatccataaacacattaaaaattaatcattgctcataactattaaatccaagatcaatactttttttagaacatccaaaataatacacacatacctcccattgagccatccatgtgagccatttgaatccaagaatcaccaacaaaacaacacaaacttaagattagagaagagcacaatgtggagctatcccctcttctcttcctattaccattaacccttttcatttaagacacacatatatatatatgtcacacttctctaaccctaatggtttatttactaattgggcttaagtggttcaataatggtatactataatttaatgggccaattatagttatgagaacgctctcatgtgcctctaacataataaataattattaaccatcccattatggttgttgacaaatattgagcacata

SEQ ID NO: 379148 - DNA, 3278 bp, Cannabis indica
ttttggcgcagaaaaatctttgattccgtagatgtacatattgatatagatgtgttttgtagtttgaattgggaaatttttctcccgttcttttttcttgaaattagcgacttctgaaagtttggattagctggatcgggaaatgaaaattgcttgacatttagggttttgagaatttgcggggttgaaatttcggtgatttggttcgattgggatcggggaatctattcggacgaggtgttgttatttctttctttctttttttttttttactattgaaaatggttttactgggttaggaactggaatagctctgagtacctatatgtattggagctctttttgacaaaggtctttggaatttggattgactcatctgctatagattttgggttttccttcatcgatttggcttgaactattgcttatggtaatgaaaggtgggttttgtggttaagagaacgaagaataggttagtcaactggagtaggattattgtttgaaagaagggtttgcaaaatgagcttagaaaatgaagacctacagttaccagatcagcctcctactggaatgaaagatgaaacccaaaagtaatatgttatgcttttttattttttggttgttgacttagtttgtagataactggatatcattattgaatattttgttattggtgcttgaatattccaggaagttaaagatctcatatacgagggattttctgttgtcattaagtgatttagaggtttgcaagaaattgccaagtgggttcgaccggtcacttttaaggtaagttctatcttttaatgattctaacatggatacatttagattgttttccttcatgtagttgggattgggtgctgtatggttcttccttttcttgttttttttcttggtgggttggcgaaccaggttacaccttgttggtcctaatgcgtatcttctatcagtgaacttgaggatgcttcccaagaccggcaaagaactgctggtggattatcactgaatagtttcaggcgtaatgagtttgggtcatccccacccactaaaggggattcaactggctataatcgaggagttcagggaagatgggaaagtcgttcctctggaagaagtgacaaagatagtgactcgcaatctgattgggattcaggtgaaattttgattaataatttgttttcaaagtgatagaatccctccatgcgtatgtggactatttcaagataattatctatgctttttaagttcttaatcatgtttgatattctatttaattccaaacatataatggatatcattcttataagagttcctcttaggcctttttggtagtactgctacatttggtggtcagtgtattgcccttagaattacaacaatacaaccaagtaatattttagctgttttaaaggatcatgtgttaactttgttgctaactaatgtacagtcgtgtgagctgttggcatttgataaaatattaaccaattaatgcaagagttgtttttttttttgtccttttatttatttattgatgtttgtatgagagtaatgttttgaaaggcctgaaaaaggtaccaaggtgtaatgtatgaggcactcatactcctctatgtagactaagtaatactaaataaaacttgtgttaattaacatttcataattgtcgtgtcgccatcccctaaaaaaagtaaaacactataggctacagttatttggaagtttgaatagtgtataacaccataactaggctaagtaaacaaatcatagattatataatatagtgatatttgtggcctttatacctctccaaaccataacactgccgcttctatagttgctatctaatctgtatttaagtaatttgatcccatggcttatattaggtgtagaatgaaaaaagatagatgtacgcaattttgattgagctagacatgtaaagctcatgcctcatatgctcaaggtgtgccccttaaagatttaaggcttaagcctctccctgcaatcctgaggtgtgcctgaaggctagcattaataatggcccgtagaacacaatgaacataggactcctcactttcattaacttgtgtatcatgaacagtagtatgatgttgtaatttggaagtgattgatttgatcacaatcaaattaactttgtactgtttctatagagcaattgatccatgaaaatttatgctcaacctgttgcatttatcatattgctatgcagaatctggaaagcgatacggcaaccaatccaggcggccgtggcagcaacctgagcatgatggacttctaggaagtggttcctttccaagaccatctggatatgctgctggagcatcagcatccaaggttagacagaatgaaagccacctgctaaacagaactactgaaccgtatcaacctccccgtccatacaaggtttgtttacttttggtgtgttaaatttgttagaaaattctgacaaggaagttttacaatttcaaactataattgctcgtttataatcagaatagtcaaccacggtttcattcatgacaaatggtgcttaactttttatctaattatcttcaggctgtacctcacttacgtagggagggtactgactctttgaatgatgaaacatttggttcttccgactccacaagtgaagatagggcagaagaggaaagaaagagaagaggtatgtgtactttgatcctagagttttcctgtagacatcagttccatgtacttctccatttggcccttaattgttttgcccccaattgaagttgaattgacatgttacaacttatccctcagcttcttttgaaacaatgaggaaggaacaacataaatcattacaagacaaacagaagtttaatatagataagagtagagttgattttgacatttctaccctgcgggaggattccaaagaagagaagagaagcactggatcagatgatgttgcaatacctctgggttcaaataatggttctgaaaaaatgtctgttccttcacaagctcctgcatccagaccacttgtacctccaggttttaagagtacagctatagataaaagtcttggagcaaaatctaaccattcccatccagcagtggtaagttatgaatctctagttttagttttcacttcttatacattatcgaaattctgcaaatttggtttgttggcttgaaattatttggaagtgagctgttataggcctttagatttttaaccatttgtgtggcaattttcgcgacattagatatttaatgattgattcatt

SEQ ID NO: 379149 - DNA, 2236 bp, Cannabis indica
gccggatcaagcaaatcgacaagaacacccgtcccggacaccttccggaaagcctcttcgctctcttcgcacccggccacctgagccacaaccgccgtggcgtcttccacgatccccacgcgcccgtccttcagtaccagcgagaacagtgccggcaccgccccgagctcgatcatcgatccccgattaagcgggtaaagcgcgattccgaacaaggctttgagcgcgtccttgactgatctaggcggcgaattgggggctttgatgatatcaaccagagagtagatgatgtctctcttcgacccaacaatcggtctgtactcgtccacaaccagaagactgtacacagcggcggccgaggattgtacggccgcggcggaggtcgagcttctgtgatgtgagagcgcgtgtgatagcgcgtcgagcagaccgcgcgtggagataagggaatcgcgacatgagatagagaggtttagtatggtggcggcggcgtcgtcctgagcggcgtgggaatccgagaagagtgtttcggcaaggtaagggattgcgtcggcttcagcgatgaggggacggctttcggcgtcgtgcttggtgattagacgaagctcgctgagggcatcagcgcgtgtttgttcggagactgagctgagtttcccaactaaggttcgaatcgttctgcgcttgacctccatggatgacaatgagttttggttcggagcttttttattctctgaaataaaaaacctttctttcttcatcataccaatatacgaaagaaacacgctaggggtattttaggaattctaggaatgaactttcgtcactttctttgtttttgtttaagttgcaagaatgcgattacgactaaactgagaagaaatgacgtaaatacccttgagggcttgggtggtttggtggggagaaaagtgagaaataaatatagttaggttgtttaggataatgtttgtgcaattgtgctcttcgatgaagataaccaagtggtcatactcattattcattaatggtttgttttttaatgtaagatggaaagtggagaattgagaaatgagaattgtcaagggttaaacaacaatgtggcattgaatattgataattgaaatgaatttttattatcagggaagattggtattggtgtaaagttttgaatttggtatagtggtaggaatttgagttggaagagtagacttaaaacacatacacgctctttaaagcaatgtgaaaggtggtccaatttgggagatgcttgattagaataagtccattattattattattattattattattattattattattattattattatttgtgagccatacatgacactaaaaatgataatacattagtttacaatatgtcatgttgtacctcttgggtacgaataatatattatgacattgctaccacataacttgtttaattaggcaaaactacccaaatatatatgctaaacaaaaaggatttggagtattctactaatttgtttgatcaataaaaaatttctattttttgtttttgctacgaaaccaaacattgtattaataatgatttaagatattcgtgagcacatggggcgtcacatcccaccagctaagaaatcctttataattgttaaacaatccccattcagccaaggcatgggtagaagaattcttagtcctagggatccacaagacctcaaccttcatactagaaagtatggtcaaaaccttagagaacaaaaaggaaacattccataagggagtaaccaaagcagagagggcctgaacaataacctgattatcagagagaatatcaacctcctcaatacccaccctccgaagaacctcagcacccttaccaatcgcctccagttccccatcagtgaccgaaaactgaaaaattttagtagcaaaaagagcctttatgccaccgacctcatcccatgtcacaatcccaattgccccaacaccatctttagtagcgaaatcgacattgacccgaattctcccagatctacgctacttccattagactgcacggcgcagagcaccaacattagactcccctctcttgctttccaccatcttccactgaaagagaaagtcatcccagatcttcttcttcgtatcacataatctccatttggcattgttatgataatttgcattcttgaacgaccaaagagagtggtacagtgttgggttttgtgccctaaataaaacccattac

SEQ ID NO: 379150 - DNA, 2011 bp, Cannabis indica
attattcaaaaaaaaaaagtaaatcaattaagaactaaaacaaaactaatacatcaaaaagaaaaaaaaacccaaaatatttaattggttagagcatcatgttcttatttggcaaataatatattattaatatcagtttagaattaaaatatctataattaaaagtatttattgattaattatattattttttcaattttaaaaatcaacattaacacattttctcaacaaaaaaaaaagaaactaaatatctaaattggttaaatttttcaaatatgtaaactatgaatagttaaataattaaaaaataactaatatttgttcgattaattatagatatttttcaatgaatcacacaattaaagccatgaagtgaatatttaaagaattaaagtaattttaaattactccaaaattttctatctaacttttaaattataattattataataagatatttattaaaagtatttgaatgaatttgaattgaaataaataatttttatgaaaaaaaatgtattcacttatatataaaattgaatttttatgataatttttatggtggtattgataagtgattgatcccataatagtaatacaaaggtacatgccacacttacttgctacacaatatagtttataattttactactgctccttatgagagaaaagagaaaaaagacaacataactaatattggtattttcttttctctctatgagaagttggctcgtccaatatcgacactgtgtctttgaatctgtttgattctttctctcgctgtctgctgttccttcggtagtttcgctccttggggttttgcatgatgggggataaaggaaagggtttgttggtgaatgaaaccattgaagagggggaggatttagtggaaatggttcagattgcgaaggtttctggagaatcgtctgggcctccaccccctgtgggtagtctggagacttttccagatcctatggctaatgagaatggtgtagtctcataaggaggtcagatagataagatgtagctactgagatagaagtttttggaggagtcttccatggaactggaaacttctctcgatatcttcgatgagatgggaagaagaggagcgttggcctgttgtttcagaaaacttcctcttccgagaaacagagttaaacaaatactttcaggaatctggagtctaaaaggaaaatggtggatgaagactttggagcatgggctttagggaatcttcttcgacatcgaagaggacttgaaaactgttttcgaaggaaggccttgggttctaggaggtcaagttcttaacctaagggaatggccggaggataaatgttggcacaaggttgatataaagatggcaaggatgtgggtgcagattcatggactcccaaccccttatttggcagttcagaatgctccggttattggggccaaggtgggtacctatgtcaagtttgacatagtggaccagaggaccattgctagaagaggtttcttaaagttaatggtggagatcgacctcactcaacgaattatggcaggatttcacttgagcattaatagagggggaaaagagtggatccaattcaagtattgtaaaatcccgacgttatgctttaactgtggatatctatttcatgaatgaaaggagtgttcaagagaaaaagaatatgggttcccgcctgtaggagaagcagtgccactatatggagtatggatgaaagccaattcgccggtgcgaagctgctttgatactcgtaatatcacggtggctaatagaagaggtctgtgtctggagataatggcacgtaggatgcaatccttgaatattcatgatgaacggaggtcaggaggtggaagcggagctccggtgggcccaagggaggaaaggaggtgtgttggcacggccaccacgttgaatcgtactgacagtacgaggggaatggaattgcaagggaatttcactagaaaggaactgtaacgccctaatgctaaggcacgctac

SEQ ID NO: 379151 - DNA, 6432 bp, Cannabis indica
gatcatatgttttacaaaagttatcaaatgttaaatgacaaaatgaaatctatattttctaaaatagtaaaaatagaactctgaactcaatttttcaacaattttattttttaataaaaccaactttaagacaattttttaacacgaacagttatagaaaatgtgactagttttgtcataacatctctatatcggattattattaagttttattttgacaaaaaatcagttaagggtcctaattgtataattttggaaaatacatctattttgtcatttaataaagcagagagtccaattggtaatttttacaatacacaaggtccaaaatagtatttaccctataatatatggatgcttggagacttaagattagctccggtggccatggagtgtgtgtgtaatgaggtcatgggatcgaatctcaaattgtgtaactctaataactacaacgtgataggatatagatacgttcatatatggggcacgacaaaatgtggtgcgcataacatattattattggtaatactctttatgtcgtgccatttgtttttcttttaaaaaaaatttaagacaattggcccaacacaatagcattagacacaatattgtcgtgctccaaaagttaaccgagcgttgggtcaggcatgatttttctcacatttacacatggtcacgactatgttgtacccccaccctctgacatggcgtgccaattgactaatgggccatgacacttgggcacaatattgtcgggccaaggtttcctccccccgccttttaaaaaaaactagattcgagagccccatttcctcttcaaccttcacactctgctctctctctctctagtctctctcactccatttccttttcaaccttcacaacactaccacaatggcagtcttcttcttctaagaccctcacactgtcgacgcacaaggctgtcactatggttgtccctcaaaaccaaattggcaatgcagggcacaaggtaagttcacatttttcttaaatttgatttgattagatttttactttgttcacaaagctcatttttttgtccattttttctttgcgtccatatccacaacaacagactcattctatttttctctttgctagaaaaaaaaaataagaaaggatttcaagtaagtgttcactcttatgagaacctaatgcactactacaaaaaagagctttagctacgaagtttttcaatcaataaaaaaaaaagcattactatagctaaaagaggaaaacaatatcttagaacccctttagaggcaattatttggaccaaccctacctacttggtaatatgttggtgggatattgcgaagtatcaatgatgtttatattttttacaaaagagaagcaatgttgtgttcttcggcttcttagtcgtgtttttaagtccaaaatcccaaaatagacttcaaatgttgtttattacaagaaaaatgagtatgtaaggatagagcatgtataaaaccattagttttgagttgtatttccctaccaatttgtgaacttgatcttggagtgacatgctatatatgttgtattggaaattgtcatgagaaacccgattttgatattgacattgaggttgaaattttttgtagtgcccttcaggctgttaatttgaagatgaattaacatcctcagcttaatctcgagtgccctttcaaagaactaaaaaggtgcattagccgaggtatctgatgtcttaagagcagcatgtcatgcacatagatttctccttgctttgattgggattccttgtctcaacaaaggaacttctaatgaagtggcaatggtatgtgttggagatggaaaaacaagtttatctaagaaatatactctatgtttagaaagaatcgtgttatgcatgaaagattgcaaggttttacaggtgcatgtgtagaacaccatcttaaagtaagacgatgtttagctaaaaaattacttcaatcaaattttaccttttttatttctaaatgtgaatccaaatatataaatacaaaatattatacatatatatatataatattttatatataaatcacatgtataagtgactacactacttgcttgttcaccaaaactcgaaagtttggtttgaatgttgttcttgcaattagggttagaagcacttatacatgtgattgtgactacatagtagaatttcttcttctagttaacatgaaggggaattagaaaaacatttgtagttaaacaatctctctgttatatacattatgcaaataatctacaagagtttgagaataatttaagatgtaaaagttggaattatctcttaggaaggatcagtcccaaactgcatgtctttgccaggggagagttccaatatgctacagtcagatgaggacatgagttcatctatgaacttcccttgaagttgtctcagaaaaaatgaggcacgtgaatcaaataatgtccataaatagtcatggggaagaagaaggtagatagagaaaaagtaaagtacaatatagaaaaatgtaagttcaagtattcatcaacaatacttctcaagaagtctcaagaatattgcaaatagtattaaagttttccatactacgctaaaaagaatttgaagatagcatgagatctaatgatgaccttttcatacataagaggtaagtcgatcattaaggaagatatacaccgtacttgattatttttagggggctgagggaggtttgaagtgtgatcctaataatgagggacttgtggttgaaagttcaatgagccaagtgcataagtcacaaaagaaaagtgcttctctacaaaattcatattctacacccattgtcaaaatggaggagataagtgatgtaaagatgtactcaaatcaaattcctataagatgatgacgaagctcaatatcatcgctccaactaattctactaaagacttaaagattgcaatggaagctcagtcaaaaccagctagtgtaacttttttgaaaaaaaatctattggttcttatcatgcaatagaaggcatatcgaatcatagcaaatgcagttcaaaatttaagaattctgatgctcatgttcaagctctcaataagtgggtgatgatatggatacaatggaggatggagaagatgaggagcttcttgaacaaaaaattttgttaaaaaaaccactcttgggctatgcaaggaatctacaagagtttgagaatagttttggatgtagaagttggaattttctctgatgatacatttcaggagggattgatcccaaactttatgttttttctaggagaaagttctaacatggtacaatcagattgtgacttggattcagctaatgaacttccttgaagttgtctgagagaagaaatgaggcacgtgaagtaataaaagtccatgaacaaccaaggggaacaaaaaggcaaatagagaaaaatgtgtttgagtgttcctcaatagtattttcaagcagtagaaagatgatgcaaaacgtattagagtttgcccccactattctaaaaagaatttgcagacaacatgcgatctaattatggccacctcgtaagaggtagaccattcactaatgatgatacaaactgtaattgattctaataaagggattgagagaggtttgaaatttgattcgactactgaaggacttttggctgcaagctaaataaggcaagaatatgattcatagaataaaaattcatctctgtagaactcatatcctacattcattgtcaaattaaaggaggtgagtgttgtaaaatgcagtcaattcgttttcctattagatgatgaggaagctaaatatcatgggtcaaactaattctactaaagacttcaagattgcaatagaagttggatcaaaaccaactaaaggaattttttctcaaaagatttcccttagttcttatcatgcaacagaaactataatattgagtcacaacaagtgcaattaaaaattagagaatattgatactcaccatgtgagtttgagtgttcatcaacaatatttttcttgaagtttgaaggatactgcaaaaagtatagaaattttcctgggtagtaaagagaatttgaaggcaaaatgggatctaatgatgggaatctcgtaagtgataaaccattggttaaggaagatacaaagcctagttgattttgttcagagggttgatggaggtttgaagtttgatctgactactgaaagtttggtggaagcacaggcactactaaaaaaaggaactttagctacaaattttttcaatcactaaaataaaaagtattgctacagctaaaaaagaaaaaatatcttagaacccctttagaagagttatttggaccatcccgacctgtttgataatatgttggtgggatatcgcgaagtgtcaaagatgtttacattttttacagaagggaagcaattctttgactttctagtagagtttttaagtccaaaatcccaaagtggacttcaaatgttgtttattacaagaaaaatgagtatgtaaggagcatgcgtaaaatcatcaattcggtggttgtgtttcccaaccaatgtgtgaacttaatgttggagtgacatactatgttgtattagaaattgtcactacaaatgatataatattaataataatattgagattgagattgagattgaaattgtttgtagtgccctataggctgttaatttgaagatgaatcaacctctttagcttaatctcaagttccctctcaaagaaccaaaagaatgcgtaagttgagataattgatgccttaagagcagtatgccatggacatatatttctcgttgttttaacttggaatccttgtcacaacaaatgaacttctaattaagttgcaagggtaagtgctggagaaggaaaaacaagttcatctgaaaaatgtactctgtgtatttagaaagcaacatgttgtgttaatggcagattgatgcaatgttttgcacatgcatgtgtacagcaccatcttaaagtatggtaatgtttcgccaaaaaatcacttcaatagaagctgcattcactctcatattagattatacattcatcatcttagattattcattcactatcagattagtggaggtgagtgctgtacaaatgaactcaattcaaattgtaatgagatgacgacgaagcctagtatcattgttctagctagttatactaaagactcgtaatttacaatagaagctaggtcaaaacaagctagctagtggagcttttttaaaaaatatttcccttgcttcttatcatgtagtagaaggcataacatagagtcacaacaagtgtagttcaaaatttgagatttttgaattacaatgtctctcaaaattcaggctcttataattaagctgtggcaaatgagatagatacataagaggagaagataaggagattcttgaacaacttttgttaaacaacctttttagtactatgcaaagaatttgcaagagtacatttgagaataatttaagatgtagaagatgaaaatgtctctaatgatactttttaggagggttatcccaaacttcatgactttcccaggggaaagttcaaacatggtaaaatcaaatgttgacttgaatttagctcatgaacttctcttaaagttgtctggcggaagaaatgaggcacgtgaagtagataatgtccatgaacaacctagagtgacaagaaggcgaatagagaaaagtgagggtcattaaacatgtgtgtttaagtgttcttcatcaatatttttttagcacacttaaggatgctacaaaaagtattagagtttgtaccactacgttaaaaagaatttgaagacaacatggaataacatgatgaccatcttgtaaaatataaaccgttcattatggaagatacaagccatacttgattctctatagaaggttaaggaggtttgaagtttgatctgattactaagggacttgtggcagcaagctcaatagtccaagaatatgaatcacaaaagaaaatgaacttcactttcaaatttgtgaaggtgagtgttgcatagatggagtcaattcaaatttgtttaagataatgaggaagcccaatattattgcatcaactatttttattaatgaatccaagattgcaaatgaatctcgatctaaaccaactagtggaggtttcttttaaaaagattcccgttagtttatatcatccaacagaaggcatattatcgggccacaacaaacttctctcatgatactttttaggtgggattagttccaaacttcatctctttgctagggtagagtttaaacaaggtaaaatcaaatggtgactttaatgcaactgttaggctaaaattagtctaagtttcgggtcgtattttcggttagttttcactctttgtttctagttttagggctattttacgcttgat

SEQ ID NO: 379152 - DNA, 1072 bp, Cannabis indica
ttttttttttttttcttgacagaaaagtttagaatattaaatagtaagaaaattttatcataattatttgatttgaaagtgttttcattttgttttgtttattttttatttttttagtttttatattttagaaaaaagtcctcattaaaagttaaaacctcaagagtaaatttaaaaaaatttcaagaggaaaaaaatgttaggagaatacattaatcactaagtctttctacagagcagaagatatacaatataagtagttagaccaccaaacataataataagacatggatagagctagctaggccaatgagtgtgcaacactgttggcaatcctaagacaatacatgaaagagataacagaaaagtgattccaataagtaatgatatctctaacaatacaccctaaataaaaatgatcaactgtctagttgagaataaaagtgataacaatattataatcaaattccaaaactacagaagaatatccaagacaaatcgcaagttgcataccaacaaaaatactagaagcttcaacaacaacaagagcaaaacaacaaagccaagtctaggtttttgaagaaatgagtgaacctgaataactgccgtagtctttaaagacccaatgctaagcccagcatcacaattgattttgactataccatgtaacggttttgtgacagtcagttgtcccatgatccgtaaggggaaatatcgagtaagctgtataatcccacaccgcctagggaaggtcaagtgggatgattcggagactgtaggtatcactactacaaaaattggcttcagtgacccatttaaagagactccaaaaggttttagtgacacttcaatgcgtgtcactaatgtagatgtcactaaaagtactttttagagtttcaaaatgcgtgtcactatatcatttttgtatttcatgtatatactgtctataaaaagttgacactatatctttatatatactttttttttttatatattctctttaattatgggcactactaaatattgctatattaattttttcttttttaaaaaattaatataataaaattaa

SEQ ID NO: 379153 - DNA, 3396 bp, Cannabis indica
gggatcaagaaagttgacatggtgtaaataggagcgcacatggccacagattgaatcaaggttgtgcgacctgcaagggaaaggagtctagatttccacctttcaatgcgtcgcgccatcttgtcaacaaggaatccaaaatccctaactttgctccctgacagcagaatcggattcccaagaaacttatccccgcgcttaagatctctgtaccccatcaggcccttgatttcacctctaagccccatatcaacattatccgagaaaacgatggccgacttgcaggaattcacacactgacccgaattcctacagtacaaatccaagcaccgtttgacttccaacacattctccttattggcttcgcaaaagatgaaggtatcatcagtatacataagatgggaaataggcaaaccattcctcgcatgagagaaccccttaattaaaccaagccgttctgaattaagcaaaagtcgggagagcacttcactacagaggataaaaagatagggggagagaggatccccctgtctcagacctctttcgggggagaattgcttaagagggccaccatttaagagaaccgagaaggccaccgaagacacacacttggcaatcaaccgcctaaagtcggcaccaaacccaaaggattccaaagacttgtttaggaacccccattccatccgatcgtacgccttttacatgtccagttttagcccaacgaatcccctacgacctttcaactttttaaaagaatccataacctcatgagcaataatgccattctccgcaatccaccgcccagggacaaaggcagattcgaaaggagagataatgacaggcaagagcttcttaatacggttggccaggagtttagaaataatcttgtaggagaaattgcacaaactaattggcctataatcatcaaaacattgggcattagctctttttgggatgagaacgatgaaggtctgattaagcgacttaacaaactcccccgtctggaaaaattgggtgaccgttccaatgacatcagcgcacacaatatcccaatgagctctgtagaaccgacccggcatcccatccggaccaggagccttcaattgtcccatggaccaaaccaccgccctattctcctcagccgaaggaatcctcatgagctcgacattatcctcaggagacaccacccgaggaatattctcaaagacctcgttctccaaaccataattactagtcgagaacacttccataaacttgtttcgaaaatactgacccatattagcccgacctgtcacccaatccgacccattatcagaaactgctcccacaaagttgcactttcagcgaatgaccgtagaggcatgaaagaatcaggtattccgatccccatcctttaaccacagctcccgggatttcggtctccagatctcctgatcccgcttgtgaatttcttccatttcaagaagaatatcagcttctattttcaaactatccgaagacgggggtcgaccttgaacctcaatcaacaacttttccaacagagcaagcttatccttacagaacccaaacacttccttgttccacttagcaagcttcctcctagattccgcgaggcgagccacaagtttataactcttaaaacctctaacgtcaatttcccacgcctggcgaataatctctctacacccaggatcccgagtccaagcatccaagaagcgaaacggcgttgcatagcgctctctatccatcataaggtctaagacaatcggggcatgatctgaatccttaatagccaaggttttgaccccggccttaggatacgccataatccacgaagaatccccaaccactctatccatgcgctctcgaatcagactaccaaaatcacgcccatttgaccaagttaaaagcctcccacactaccaagatcgatgcccccagacacatccagaaaatctctaaaaatatggctatcagaccccgagagggggttacccccaaacttctcgttttggtccaggatcaaattcaaatctcccataataatccaaggctcaaccaccgaagccgcctccatagaaagattttcccaaaaaaccgccctatccccgcaattcggaggtgcgtacacccaatagcaagtccacaccgggccgtttaggaccctcgagaaacaggccaagatcgtagatagagaggctgagactatctcaatttccattccctctttccagcaaagacataaaccaccagccgctccaaccgagccaactactgacgcattagaaaaccccagccgacgccagacaccatccatacgcctatgatccaacttagtttccatgagaaaaagcacatccgggtcttgttgaagaacaaggtttcgaagggctttttttgcacgggaattccccaatccccggcaattccacgaaaggagtttcatgaggcgttggggggcatgtttcggcctgcctcctcggccatagaaaaatcctgagaagtagctttcatgtctcccaaggtaggacaatcccggggagctctagcatcagacataaccgactcggcctccttctccaaggcaggcaaaatagccggtgcagatatagtaaccaaacggggttgatcacccgcccttaaaccgccgttatcaatagggacaccctcggcctccttttgatttcccatttccaaaatcgatccaaaagaaccctccttagacctcaaggaatccatatcaatacgatatctcttccccgagtcctccccatttgatctagtggaagtcccaccactttggttcactccactaatctccccaaaagcatcgggaatattagtcttatcaatcacctggatgcaactcaccccctgactttcggccacaaaatcacttttacaagatgacttccccaaacttttcttccttttagagccagcaagtttatccgaattaaaactactaccaaaaacagggggtttaggaatacctcttggcccaacgagcttgggtttattgagcttttgaaccggcgcgagaatagaccgcctctcttcttcattaccacaagtagcaccaaacttgatagggcccaatttctctttgaaaatactagccacatgcataacatgcttagtggggaacttggatagatccacatagtcattataagccacagaaaaggtttgttcagaattttgagtaacaactccctccattcccaactgttccacccgagtcaccccaaccggagatgccggggccactgcccccggagagctgcccgaaaccgcacccgaatattttcgtttctccaattcttcatttcttttcaaaacaccaactaatcttaattcctacaagaaaaatataataaattaaatctaaattaa

SEQ ID NO: 379154 - DNA, 2688 bp, Cannabis indica
acaaacattaatatttgagacagattttttttttaaaaaaagaaacatacactttctacaataacaaaaatgaaaaaaaaaaaaaaaaaaaaaaaaagctcattcgcagagtacccaataaaaacccgccaaagcgaaattattatttatatttatattattatttttttcctttattccttcaagctccttatcggcttagccagcttcaccggcggcgaagccgccgacgtcggcagaatcacagattcacgttgaaatgacgtcaagttccctaatctctctaagctcaaaccgaaagccgccgccagctccggacctctcattgatcggaggatcgagctagccccgaccagaaactgaggccgattcttccgagccgaggtagtgaacccgaaaaactccatcggacctgcacgagacgcgatctgacagaacgggaagtatcttgggacccagaacacgtcgccttctttcacctccgtgttcatcgctgaggtcccgttagggtaaacgacttggatcattcctgttccttttagtacgattccgtattctgtagcttttggattcaggtgaggcgccatcatcgatccctgtcaaattcaaatttgagtttcgaattcaatttcagtttcaattttgatattattcgaattattaccgctgtgagattgacgagatagacaccgcagccggatttcctgagtggagaataggaaaactcgtcgagtgcgatgctccagccatagttgtttttgaagcctttcttgccatcgtatagattgtaagagtctggtgattttcctttgcctttgtaatctttagttttcttatctctatttgcaaatagagaatcaagaagttttctccaagaccaagttgttttctgattttgttcttggtttatgtcttcttccaattcttcttcgtcttcttcttcttcttctccttgatgaaaccctacaattttcttaaggtgttgaagcttgtcttcttgtttcagctgaagaaatttggcccatgtttttggtgatcgagaatctggtatgtatactattggaccttcttgttgactacttaaaatctccttaagttctgcatgtgttacctgcaaaaatttacacatttatatatgtattaatatatatatatttatgtatatatagaagaaaaaacaatgtcaagtgtcaaagccatgttctttgtaatggcttttggtttggttacttacattaaatgcgttttcaagaatttctgagtcgaatcctgagagtatagatgctgggttggttcctccaccaaggaagaaagactgtaaaagagtaaaaatggtatactcaaaatggtgctaaaattaagtccatgtaaaggtagagattttgagaaaaaacccaactgaaaaaagtgaggtttaatctgtctatacatacctgaaaagttccaattctcagactctcagaggtgtcaaagctacaaatgatatgaagtctttgcccttctcctgtgttgacaagataaaatgctgagccagctgaaatcctgtacacatctccggtctttaatttcctctcagccagttgatccttgtatatgaaacctagttttacttctcctgcaagcaaacacaaattagaaaatagaaatgtgtgtgtataatgtatatatgtatatatcaatacctctgcgtataaagatggtcaattcagaatcaagatactgagggaggaaaagggtctttggctccatagtaatgaacccaattctcaatggtccttgagcaaatttactatcagagctcctcatcactctcatctcccctgcatcagttttcatcacatgctttgagtctctcaatatgaagggaagctctcctctttcatcttccctttctttttctttttctctttcctcttccttcttcctttccttctccctagtccaatcttcatcttcatcaaagcccattattcccaatactccatagctcaacacaagcatcagaaccagaagggtcaatttgattcttcccatttttgtcttgtcaatggtgtttgaggtgtgtgtttgtgtggaatcattgatgtttatgaagagaagtgatgaagacgcgtgtgtgtcatgcagagaaggaaggcttggtggcaggttttggtttagacacactttggattcagaggttggaatgtgatcgatgaatgacaagaggtatttgtgttgaatatctcttcctttcaatctaatctaataatctaaactgccataactttctacaggtggcaaggaatgaactccctctgttttcttttaatgaaaatctagattttattaaatcatagttacaagattagattgattgggtcttataaataagtaaggatgtggcttaatatttattgaagtaaaatatagagtaggacttaacataagttttctactagtaggaaagtttttttaaccattgattttaaattatgtggtcattaagatataaggtgtatattattacaataaggctgcttgtatgtaattaaaattttatacatattataataatattaaattatatatttatttttttaaaaaaataatattaataattaaaaaaaatattgatttttaatttaaattattattagagtaatttgcggcataaatacctaagttttatgccgagtagcagataaa

SEQ ID NO: 379155 - DNA, 3919 bp, Cannabis indica
tattcaagacaataacattttagttcaggacattatccattcgtttaaaatgaagaaagggaatgaagaccttattgcgattacaattaatctcgtaaaggcctacgtcaaattgagttgccaatttattgatcatgtgctctgaagctttaaggctccagatattttttacaactaggtctatcattgtatatcaatgactttcctcaacatttgtctcaatggatgtacactgggtaacgtttctcctgagtgtggcaatggacaaggggaccctctctctttttatctcttcatctaggcaacagacattttctctctttcggaggatgctttagataaaggagggatttagggaatcaagctgagtaagaatgggtcttgactttttcatcttttccttacaaatgatcttatcattgtgggtagagcgaatactgctgaagcaaaaggatatcgggagtgtcttgagacatttttcacttagtaaggccaacgtataaaaaacttaagatttccttctttttaacaataacactagtgaaggaatgaagagaggtattaaagaagttatgggtattgatggaattattagaaatattaattacttggggttcttgcgctcttcagattttaaaaaaagatgttgattttaacttttgtttggataaccttgtgtccaaactttgaggttggaaagtgaaaattctttctaaagaagtgaagtttaagaagttttatcgtcaaaaaattaatttttagggttaagtgtgacaaatcgtataattcaagtagttttactgtcaatatcatttgctagtacaacttttgaaaaataaacaaaagagagtaagtttaatatatatatatatatatatatatatatattatctcctctcttcaccgatattaccacttgggtactatcattatctttggaattcataactctgaacttcaatgattactgttgtgttattctaattataatttattactattaaacaaaaatatttacctaaataaaaaagattggattacatttttttcaaaagtaatatttttaatatttaatatatatttatatatttttttgctaagaattatctaatacaattttgagatggggaaattacgcaccaataaaaaggaaaaaaatcctttaaaaaatttaatatggtaaaaaagttattttgggtattcttttgataatttggttaatatgtgggtaagcataactaattgtgtgtctaaaatttttattaggacatatttcttaatacaatatattttaaaatataaattatcatctaaaaggaccttagaagctctttggttgtggaccatgtgtgggcctcaactaaccatgtgtggacctcagccagtgtctcaagaaagtgggtgcaagtgcaacgcaacttgatctctcaaatagaattgagaatagttcaataagattgatactagtattaaacagtttcaaaattttcaaagtctgtttacgggatctcgtgtttgggcccaacaatcttaggtgagggtagctcttagtgaagttcttaagcaaaaagctttatattagtaataaaagtctcgtgtttcttagatcaaagagggagataaatgctaaaaattcttctttatgtcgactaccattagaaaatgtagaaatgctatcgtgagtatcataaataagaatggtaatttggttacgaccagatgtgagattggaaagaatttatgaattttgttggtggtattttctcaaattcaacccatggccctttggaaagtttggacaacctcatcaatgatcacatctccgcccttgaacaattcgaaatagtgggtatctcgtgtcatgtagagatcagaaaaatgctttttactatgggcagcttgaaaacattgagaccagaaaaaatgtcaattctctttgttaaacactattagaatacagttggttttgatttctgtgaagttatggtggatttcttctagttgggacgatgtataagggtatcaatgcaactaatattgttctcgttttgaaggtacccaatccaaagaaggtctcacaattcagacctatttctctctataatgtggtttataaggttatctcaaaattattgtaaatagaattagactaatcctccccaaactaatctgccccactcgagcggctttcgttcctggtagaaatattcaaaacaataacgctttagtttaggaaattatccactcgttttaactgaagaaaaggaatgaaggcctttttgcgattaaaattgatctcgtaaaggcctacgataaatttagttgacaatttatttatcatgtgctctaaagctttaaggctccatatatttttttttttcaactaggtctatcagtgtatatcaatgactttcctcaatatttatctagatggaggtatagtgggtaacatttctcctaagtgtggcattagataagaggatcctctttctccttatctctcatattttcgaggatgctttagataaagaatggattgagggaatcaagctgagtaagaataagcctcaaatttcccattttttctttgcaaatgatcttatcttgtgggtagaacgaatattgttgaagcaaaaggataatgggagtgccttgagaaattttgcacctagtcaggccaacactaatgaaggaatgaagagatgtattaaagaggttctaaggattgatggaattatttggattattaactatttggagctccagctcttcaaatctcaacaaaaggatgttaattttaactttgttttgaataaccttgtgtccaaacactaaggttggaaagtgaaaaccttttctaaagcaagcttgactattatgatcgaatcagttgggctttctctcctagtgtacaccatgcaaacgaagaaactctccaagagacttgcttctaatgttgatggcatagttagagacttttggtgggactgcgagaaggggaactggggcctctacttgaaagagtggaacagattgtgtctccccaaatcctgtggtggcttgggatttttgaacaatggatatgaaccagactttcttggaaaaatgggaatggattgtaatcaatgagaatcaatcattttgttgtaaggtccttaaagccaaatacctaaaaggtaaacatttcatgaatttctcttacgagagttctgattcttgtttttggaaaaatgtagtaaaaggccaaaacaatttgaaagaaaggtgcttgtaagatgatcactgatgtgaaagatacgaatatttggggagatccgtaggtattccacaacaaatagtttcgtacaaatttcgtggccagtcaacccaatggacttgaatgggttgctgatctgatattagacaatggagattgggatctcattaaactctactccctctttgactctgagacagtttataatatgttgaaggggagtaagactattggccaagaaatagattgatggatttggcctaatgagccttatggcaccttctctagcaagtcatcttacttggtccaagctttagaccgtgctctttcttgtgatggtgcccccttcctgtggaacaaactgtggaatagcaaggtgttggagtgtcataaggttttttggtagaacattttctcgaatgcatattgaagacaccttatgccctttgtgtggggcgggtgaagagactatggaaaacctattcctccattgtaacttagctttctatttgtggagacctttcccttagggcattatactggttattgattcatatgctcgtgtttgggatttaatttaatttctttggggcctgaattcgtggggtgtcaatgtagatgagttgttcctctatgcttcgattatggtggatacgatatggc

SEQ ID NO: 379156 - DNA, 2985 bp, Cannabis indica
ataatataactatgcatctttctgttttactggctctccttattctgttgaaaaaatcattcttggaccttactcaatagattgtatgacaatgctccttcgtttaccctggtttgtttttggtgattttaatgactattttctcttaatgatcgctcgagtgtccctccccccccccatctgctatgacacactttcaaaattttatccaaaagttttctttctctcctttgcatccggttgggaatgtgtatacttggaagcatggctctttgcttgagcggttggattggtgtatagctaacaataattggcattcccttttcccaagagcaacccttcaccatcttgggttttatgggtctgatcatagagtgcttaaggttgttcttcaagatgagagcatgcagggtccgattgttaaaacctttatgtttgaaaaccactggcttatggacaattctttttttgatactgttaaattggattggactacctctaacctcccttcttacaataacagacttgatcattttcttttgaagcaaggttcttgtatccgagctatccaaaattggaattcatcttctatgagtctatccaagcgaatcaatactcttgagaagtccattaacacccttacttcgaatctccctctgtcccaggaccagctcaatcatgtccactctcttcaatcccagttggatagccttctcttaaaacaagaagtcttctggaagcaaagatccaaggtccattggcttcaagctggtgacagaaatacaaaatattttcataaaacagcttccattcgtaaaagagggaatttcattcgcagtctaaaatgtgaaaatggccagaaagtttctacattttctgagatttctcaggaaattcttacctatttttctactcttttcacatcccaatcttctaatcaagccgccatctctaccattctttctgccattaacactcctttggctcctgatcaaatcagtttccttaatagcccctttactgagaatgaagttcatcaagccttatttcagctttcgggggacaaagcccctggtttagatggtcttaacccctctttttaccaaaagaattggcatgtcattggccatgatctttcacttgccattcttgacatcctcaatggtaatactgcgctctcacctattaataacaccctcacagtcctcatccctaaaaaatctcatgccacaactctcaaagattatagtaccgattagcctatgttccaccctttataaaatagttgctaaaactattgctaatcgtcttaaactggtcctgggcagtattatttctcctaatcaaggggcctttatttctgagcgtatcatatttgataatatccttattgctcaagaagttgtccatgcaatcaatcataggaagcagggtaaattgggctgggttggtcttaaattggacatggaaaaagcctttgaccgtgtagagtgggactttttgattgccattctccaacacttccagtttcctcccaagtttattaacctcatctaccaatgtgtgtccactgtctctattcgtttcaaggtcaatggttctatcaccaatgctatctacccttctagaggcattaggcaaggggatcccctttccccgtatttgtttttgctttgctctgaaggcctctctgctgctcttaaatatcaagaaagagttggtcttctcagaggcatttctatctctaggcatgcccctcaaatctctcacctgttatttgctgatgacactcttctatttactactgctacggtttcctcttgtcatgctattaaggaagctcttactgtgtatcatcttgcctcgggccaaactgttaattttagtaagtcttccatgcttttttccccaaacacccctacttccatttcagactacttcttccaacatctaggcatgacccctaagccgttcattagtaaatacttaggtgtccctcaatgctttggcagatcgaaaaaagatagttttgacttccttcttcatcgtgtaagtagtcaccttaatgtttggaacagcaaactcttttcaaaagcaggcaaggaggttctcttaaaagcagtcatccaagccataccctcttatgctatgtcatgtttcagactccctgtctccatttgtcataaaattgaaaagctaatggcccaattttggtggggctctatggggaagggttctaaaattcattggaagtcatggaaccatctttgtgtttccaagttctttggtgggttgggttttagatctcttgttcatcacaatcaagccatgcttgctaagcaagcctggcacatttattctaatcctaactccttactgtttgctgtgctgaaagctaagtatttcaatcatagtaccttccttgatgctgatcttggtcacaccccctcctttacctggcgtagtgttctctggggaagggatctccttaagaagggtttactctggaaagtgggtaatggggaaactattcgtgttgttgaggactattgggtgccggaggtgaggaaaattcagtatagagctggttgctcccctccatctgataaagtcagttttttccttcaccctgagggatattggaatcgcgaagccctcaacacatattttgaccctcctactgtttctgcaatcttgcatgttcccataggtggctgtgataaggaggactttttgatctggaacaaccatccctcgggtattctctctgtcaaatctgcatatcacattgccaatgcaggctccctccctccttcatcttcaaactcctccctctcaaagaaatggtggactactctttggtctttgaacatcccgcctaaagttaaaaattttatctggagggtgtaccaccatatactccctgtctccccttcaaccttttttttgaagaaaactcttcctaatccgagttgctctagctgc

SEQ ID NO: 379157 - DNA, 2196 bp, Cannabis indica
aaatgtttttgtagatgagaaactataaccattgattcgatttggaattggatcatatgaacaactatttgtaaattaataatatttaataaatcaagacttattgcaacaaatcaggtgaaagttgtactaaataatatattgttaataataaaaacaatatacaaactttttttaacatatgtatgaaaaatgtaaaaagtatcaactatttgaaagcgaacttttgtcgtatctccacgtgatacaagctacgtgttaaaaggtgttgtttattttaatagtagcactattaaaggtgttcaaaaggaatatgcaactcacaacattggttggtgtaaaaagagttgctactttttattttgttttcacattattagttcggtaagaacattggagttaatctgttggtaaaaaatgaattggactactaatgtaaattttttattataatattttagttaatctttatgcgagaaaatatatattaaaattatttttttaattttttttatgtcggtgttcattataattttaatattattcctataatcgagcatggaggatgactaagagatagcaataggaaattgtaattagtactcgtcaaaagtaaaataaaaatagacttaaattttgccttttctgccacctctatataatttatagtacataaaattaatttctcataaaaaaaatcatatatatatcaatatatagttgttaactaggaaattttttttagtgatgcgaacatcattatttgacacgtggcaatgaagaataacatcaagaagtggagtagacccaagtcatagcagtcgacctgggaggggaccctagccctgcacccaggttgactttcggaatctttgggatggaagttcaaacttcaataacttgaatccaactcactatatttcaatattttgtaccatagctgaaattacacgaacttgtaacccggaagccaacctaggcacctaaggtttcacgcgacgcccatgtttacatatccaactagggtattggtattctggattgtcttagtgcaaaagggttaaaacttgcattagaacatcaactagacataccactgacatatttgaggcatcgtaatcagaatcgtaacaagtttatttttgagcaccaggggccctgagcacacagtgcccaggttgacaatctatcgatttgggttccttacacgtatcagatcagagatctgacttttgcatcttcttcttcttcatcaaaaatagggaaataggccattttgaagaagaaacaacacttcttgagtgcaaaaaatagggcccagcgcctatgttgacacttgctgctggggccctatgcccaggctggcatttttcaacatgggccattttaagtggagtttttcaagaaaacttctaagcaacttcttttttaaatattaagattcaactatttcgggggactaaatggaatttttaaaggggcaaaactaggacccaacgcccgagttgacacctagagctgggcccaacgctcaggttaacatattatcaacctgggttgattccgatcaagttcatcaaaaagtattcgtgacatttttttcgtcatcaaaatttatgaagattcaagtaaatatggggagaaaaccacaaattcaagcacttggaagcgcgcaacgcccaggttgataatcaacatgggacactgccttcaattgttcaaatgtcaaatttgatgtgaccattgaatttgaaatggtcaaaaagaaggtaggagatctcatcctcatgtttgaaagccttggaagtattaaaaacgagatcacaggagctcgggagtaagtacccagcgccctggttgacaaaaggcctagtgcgctgggttttgcttatcaaattttaatgttgtttcgatcgtccatgtagttttccacactaaaaaaaatccacaaagtcaaaaaattcaaattcacaactttaaatttctcatttccagttcacccagaagtaaagagttctgagtctgtcatttcggtaaaacaacaacatctttgagaactggtgaccaattttgccaaaacacagattctgactaagcgatgtcaaaaatatcacttggcatcttaaagtacatactttggacatttttcacttacccagcatcttggttgacgtcatatgtcaacttgggcactag

SEQ ID NO: 379158 - DNA, 620 bp, Cannabis indica
caaagcacaatgaaataagaagtgggcatggtggcacgtgtgatagacttaataataaacaaaggaaaaagattgtaatgctataacacgtgtggggttatagtaagatgattagggtttttaattaacttttttcacaataaatgtttcttagtcaataaagtaaacaactcccctaagtacaaatcatccacttaatcaagaaaattaaattacattataaaaataaagagaaaaagtgaatgagctagtaataaaaataatatgaaaattgttcaacactattataatttcctatagatacaatttaatattagtcttctatattttaatttaatatattattaaaaatggttaacaaattataatgtaaatttaataggttatagaagaaaaaaaattgatccttggattaagtaggtacaagcctagtttgcttatacaaaaggttgggcttgtgtttaacatcactgataattataacacaacgtctgaccaactaaatgcacatggtcgatttagaaaatatatgggcctaagactatttaaattttggaaccctcacttttagaatacataaaaaaaatatttaaaaagagtatcactacaagaaatgtcac

SEQ ID NO: 379159 - DNA, 2669 bp, Cannabis indica
attagtggtaaagaagtaattagaaaatgtaatatttattgtggactaaaatttgactcatggtattgtttgtactaaatttagcattatttttagcttgagctaaatttggcacacattttacatcaccattggagttaaattttagtaaaatgttctaaaaaaaaatggataagttgaaaaatatcccttttttatgtccattaatcaaaaatatccttatattatatttcattgaaatatacccacttttgtaagtgagttgccaaatatacccccaccttccacttaagtctaacatataatttacattaacttaaggagtataatatgaacatcatctataaaagtggatatatcttaaagaaaatgaaaatggaggtaaaaatcaaaacaaataaagtaggtatacaatgtaatttcctcctaaaaaatagcaatacaccacatttatagcactttattggagatgtaaaaaatataccaaattttgttatgacacttttagatcgtgttattattaaattttattttgacaaaaaattagttcaggatactatttgatactattttaaaaatacgtcagtaacttttgcaaaatataaagtctaaaatagtatttacccaaaataaaaggccaatttttgtcgaaaataaaaaaaatgaaaatagttgaattatgtattctttttagttaatttcatgttatgtttcttcatggaaatgtacacaaatttagtaaattcaaacttaaaattatattaatatgtacaaaacaagccacaaaaataaaaaattaaaccaaactcatgaatccattttttttctctaaattgttaaacaattaacacaattaatatacaattttacaatcaaatctatcaataataatattcataaccaacaaacttttttttttccaaatcaaagaattaataagaacaaaaaatcaaaatcaatagtacttttttggacaattttttccctatgattaaactacaatttcttttggtatgttaggtctatactcaagagactcttcaccaagcaaaagtgctctcaaaattgcttcacacaaaccattataatgcacaatcaaatgtccaccatcaacaacttcatgatacttaatccaaggcaacttacttgaaacatatctttgtagctcaaatggcacaactttatcctcataaccttgccaaatatgtacacaacttcgattctcattaggaaatggattccttagctccattggatcgaaaccccattcgctataagcaacaacaaaatcaccacgaagagtatcgaaaacacccttgtgttgtaacttctcctgtttaaaacaaacaaatcaaaagaaaaacataaacttttgttacatgcctagtctgccttagcctagaactgatcatgctttttgttactttaaacataagaaaagatcattccacacataagttttcaatggttaccggtgtgagcattggaaaccccttggtttttttagagggcatcgatatctctgctgttgaacagtactggttttcggttcataacagaagaagttgttggtaaccatttttgagttaccaaccaatataacaatccggggacatagttagccatccaaactccacattgaacaagttttcgcctataatcatctttgattagctttcggggaaaagaaggccatttataattcactactgggacaacaaaagcaacacctgatagcctgcaatcaaagctgagttacaacacaatcaattgagaaaaagcataaagcattagagttttgtttatttgcctttcgggtatgtatttgaggcaactccaagttggatatgaccccattgaaactccaatgacataaaatttagaccctatttgtaactgatcagctagttcttgaatgtctagtgcttcactcttgacagaatgtttcgggtttggatcgctttctccataccctgctcggtcatatagcaagaaatatatcccaagctcatctaccagatcctgaaaactaaaaccacattgaatttcacttcttttcaaaccagtataacaactcattatccaatcctaaactactaaactaagtcaggtttggatgaatttactcaaatctacattcaatgatacatttgtgtacatttctccaagcataatcatattgggtaaatttctatgagattttcatactaaaaagagtcagcttttacaaaacttttaactcaaaatcaacattcaatgatgtgttagtacattgtgtggaatataccttcttatatgggtacatttccatcagattttcatgctcaaaaaaagtcaactttacatgaatttactcaaaatctacattatgtggtagttcaattaaaaagaaaacaaaaaaccagaacatttctatcagattttcaagctcaaaaaggtcagctttacatgaaaaagacacaccatttcccccaaaaaataaaaacttgaacctttttcaaagtaacccatatctcaaacaagagaaaaagttcataactcagattcagaaatgaaaaataaagaaaagggcattgaaaacattacttgaggagctaaaaagttcatatctttagaacttccaaagccatgaacaataatgatcttgtaatttgatctaggttttgggg

SEQ ID NO: 379160 - DNA, 1795 bp, Cannabis indica
tctcagagaaagagaaaaaaaaactaacctaaacttcaaaaccacatactacacaatggccaagtgtagagaagagagactaacaaaaatatatatcaaacatcaccaaatcttaattcctacatggctacatgggaagaaattttgtaaaaaaaaacagagagagagagagctaattaaatggggattttacagttattcatagaattttgggatctacatgatagaacaggcatttgggttgtcatcactgaactatggtgatgtaagggtcatcatatcttgtaacagtgccagttgtggcagtgttctcaactttccttacatgaccaggaggagctttcttgtcgtaagactgagctgcataaggctgagccactaggttgtaaggtacataaggccatatctctgcttttttccctgttgacttggctttcttaagcactttgcttgcttccacaaaaccactaacactcactttctgttgcttcctgtttatgtccacagatttaactcctgcaaaaccatgaattcaatttatcattagctcaaccaaaaaaacaggggacaaagaaataaaaccaaaccccaaatacatatatgtataaatataacttacttaccacttaatgaagagagtgcctttttaactttaagctcacacccatcacagtccattctcaccttcaggtcaactgtctgcaattgcttcttcttcttgtgtttatggccacttcccattagatcagacaagtactccaaagttcctccaactcccatctttctttctttctttctcttttgatgaaaaagaatcaaagagtaaacttgtgaaatgtaaagtaggatatcaaaatgttgaagcagaagtagaaagctttagacagagcaaagaacaagagtttgtttttatagtgcttttgaaaagaaacaagagagagaataaggcaacaaaaaataaagatggtggttttgttgaagaaagagttgagtattgagttatttatatataaaagaagaagagcattggaaagtgaactctaagaaactacaaggaaggaacttccttaacttacaaatggattctttccttgccttcaaacatacaaagaagaaagaaaatgtttaaatatatttaaaaggctgtctctgaatacctctttagcttatgatattttcttttacacaggcctacttatatatatagagaggcctttgatcagatttcaaacagagaaaaggtaatggccccacatacatcagtaaattacaaaacaaaagtttttataacccttcattttttattttttaagtttcatgtattggaacaatgtttcaatgtgcaattattgtaatctattttattacttttggcttccttaatggagcaagctttatccttttcgctcaagaaatagttttgctatcatacccctaccgaagatatgattatgaggggcttggatgcaaaatcagttaaacagataaaagaaaggcactacatttgttctctaaagtaaaaaactaaaatttctttaaaatatttgaataatcaaattaaaaccgaacaaaactttttcgttatttgaaagctttatttaaaatttactatttattgcttaaatattttttaataattgtttttgattttaatatttatttttatcgtggatattaacttatttttaatattatatatttaaaataaccatacataataattggaacttttttatttttacactttaaattaatttttttttaagtaatttacagcataaatatttaagtttaa

SEQ ID NO: 379161 - DNA, 2277 bp, Cannabis indica
tccaacaacattgagtcataaatccattccacgaataaaattgtttctactcctagaagaagccttagagtgaaaatacttagtgattttatctccagctttaacccaattcaccttggaccgctgcttccaaaaaacctcctccttatataaaagggtatctatttgagactgaatttctttaaccttattattattattaactgagaaaggaaaattagagtaaatactatcaagtctagcctgaagcaaattgatcttatgcttaaaattattttattattactctaactcctaataacattgatacaagaggattgtttagacagaaaagagagaagaaaatcttgagagctattaaaagatcttttagtccaagctttcctaacaactataaaaaaaaattaggttcagcaaaccaaaattttcacacataaatctcttattagcagcagccttatgaaaaccatctttaaaaactacttttaaagtcctatgatccgagccaaaaaaaaccaaggtggaaaagagaagcatcaggaaaaacatgaagccaactcttattaacaatgcactcgtcaaggcgctcaaaaagagagttgtgcttctaagtaaacttatttccgatataaggtaaaggagtaagatcatacttagcaataaaactttaaaaatgagtcatagcatgcaagggagggttagtagaactagatttgtcatttagagcaagataatcattgaaatcactaaaaataaaccaaggcattaaaggagcaatatcaaaaattcggttcaaaagagtctaagtatgaacttttatccgaaacataagaagatccataatatgaagaaatatgtcattttatattatcatccatagttacataacagtcaatatgattggaggagtgattattaatatatacatccacagcagcagccaaaaaagcaaagatagcctagacttaaaactaaaactagaaccagctcctagcttagtttccataacaaaaagaagacataatttatgctgcttcacaaaaagggagagattttgaaatgcctgaggactccacaaacctcgagcattctagcttaaaactcatttttccaggcgggattgctctacaacactcaccggtacaatttgatcaaaatcatcagtggagaccaccacttcactaccatttgcacaagcctacttaagcatactttgaattaaattaccaatagtgccatcttgtcaagtgtaggctctcttagttccaaagacaccctaagaggccaaggcctacaaggaaggccagatggggaggaaacggggagctgcaccccttttcctttatcaacatggacgatgaccggaggctcattcatggtgacatgagaaacgacacaaagaatgctttaaaaaccactaacaagagagcgagaactagccataacctcctgggacacaacagagactatactagaaggttgtccttcatcccgagtatgagtcaccataacttcctgagaactaaccaagccagtagtaggaagaaactggtttacaacatcagtaagatcatgattttgatggtatgacctcaggttcatctcttcaaatgggatggaattggccatatcaaacgggtctcgtttgaagaaagacttaggaggggccctaatgttatccttaaaaggaagcacaagaggaacacgaccctcatcacagtgtttaaggaaacgaccacagttagaaaaaatatgatcaaatctcccgcagaaataacaataattttggagaccctcaaacttaaaattaagccacttagtcctacccagcttcctaaagaaaacatgcatgcctctacgaataggctaggtaatgtcgaataacacacgaattcgaaggaagggacccaaaatttcaagcagagtaactttatgaatgtcaacaccaacatcttcaacaacaaactcagcaaggtcagaggatctaaaaccgaaagggatagaatgcacttgcatccaaaaggcaacaaacctaagttggtcaggctgaaggatatcaagaccttcaggattagcaaagaccattaagcagtgatcgaaatgcaaaggttggccctcaataaccctatgcctatccctgtcacacccaaaatgtgcaagaaagagcccagaatgatactcagaaaagttgatagggaatcgaacactacaagaaatgtcacttttaccagcgcatttcgcaaactgcgttggcaaagaggtcaaagttttatcagc

SEQ ID NO: 379162 - DNA, 1548 bp, Cannabis indica
cctctcgtatcactgtattcattcatggattagctccaaaagaaagatgtttttttattcaatttttcagtgtattttcttggttaggattccccatatgaaaatactgtcaatgagctgctttttgagtatttactgaattcatttataaaaataatatggtttttaacagtattttaatccacattttgcagtgttattgttcagttttggtgtagttacagcacagtacctctgaacataattgttacccaggtttgtttcatgctcaatcaactctttactagttaacatagttcaagacattttacaatgttatgaattgcagaatttagtaagaaggaatgaatgaatgaagtaacttgaccattctttttcttctatgccgagttcagatgggatcccggttcaagaaagctctcgttgctgagagtgtaagagagtcgctccatagctggtgcaagagggtgaaagagaaatctaaacgcgaatccttgcactcacacaccacaagatcggtgtgttcattagaatcaaccatctatgagggggacgaaataactattgcatcagggactctgtcccggagcacttcattagagtctcaaaatcagttaactgtgacatcaaatccacagcctgaggctgaggctaaggctgaggcagtacttgagattcccaacattccctatcaggaatactcattcaggcttgaagagtacttatctgaatcagtaaacattagctcatcacaaacacaaacccccactaatggtgaagaagccagtttaagccatggagatgaagaccaagttatgactctctttgagctgtttaagaacacataaacttgtattgactgactctctttataaccacaggtcatcaagtctgtcatagtttctcattgtaattgtattaccacatcaaattaagtcctttagaagaaagattgcacattcattcttttcattttcttagtagtatacataatataatatatatatatataaatatatatatgtttaaccaccaatgaactaaatcaaagatagagaaagaacaaaatgttacaaatggtagttttaaggacatgtaataactcattcatgggataaggggaaaaccttaatcctactaaaaaaaaacaaaaggccaagccagcccaaccaaccaactaaaagcatatataatatattgacatagttagcaaattataattgtaattaccaacgtaaagaaaaaagagatattcattatcaagctaaaatatcagttatttcattactacaaatggcagtttttttgttcgaaaaaacatgtaataactcattcaatagataagggaaaaccttatcctatgaaaaaaaaaagccaagagagccagtccaaccaaccaaagcattgaaacttcattttttccttttcttcacaaaaaacatatataaaatgatgatgaacaagattaataaaattaaaacatgataataattgttttttttagttacttaattaagcaagttcttcctccttgtgagtctcaatgac

SEQ ID NO: 379163 - DNA, 4177 bp, Cannabis indica
gagagagagagagagtttttaaggagaaagggtatttttgtttttattttgtgaggataaattctaacttaagttaattgttttatccttattaataatcaatttaaaaaatctatgaattaactagaaattccactaaagacaataattaaaaatcttatatcattttgccctttctttctcatgaggcaacctaaatagcctagggataaaatagtccaacatcataactccacaaattccaagatgctcaactttatttaagtgactctaatggtcaaatcgtcacattccactgttattgggcataaaatataaaaatcataaaaatttatatataacatatataatacacataaaattcagtaaaatcttcataatttagaaattatttgtctaaagtttatttctcacaataggtcatattttctactaataagcatataatcgtaagataataattaaatccataattatctgctaattctcatgtttaaactatgtattcattacacagactgtcgatttacgcaaattaataagctagcttgaagcttcttcataagaaaggaggatattctggaactgtgcacaactcttattatttgcttcaagaaagaagaatctatcatcaacaaaaagtaattgtgagatcttgggtccacgctaaccaatcctcaagcctgaaatattgttcatgctaatttcatgtttgatgagagaagataacccttcagcacaaattaaaaaaagaaaaagggagagcgggtcacattatctcaaaccatgagtaggaaaaatgtttctgataatatcaccattcacatttatggcatatgaaacacttgtgatagattgcattacaagtccaacccaactaggatgaaggcataacctcgtcatcatccctttaagaaaccaccaatcaacacaatcataggccttagccatatttgttttaattataagttaaaaaccattttttacctttcttgtgacacttaatagtattcaaatattcaaacccaatcatagcattgtccaagaaaaggcgtccatgtataaaggcactttgctccacaaaaataatatcattaagaacctctcgaaacctattactgatcatctttacaatgatttaataaatgacattacaaagaatgataggcctaaaatcagtactattgagtgactccttcactttaggactaagaataatgatagtttcattaatactatggatagtacctatctcatcagtgaacgcgatacaagccttatagacatcatcacctacaatgtctcaaaattttttgataaaacccagtgctcatagcatcttttcctagacttttatggggatgcatttagaaaagagcaatctgcacatctgactccaaaaaggaccgcataagagcagcgttatgagcatcaagaacacaagtaggcactgttaaaacccaacccatagccccagagaaaggttggtgtgaagtaaacagattcttaaattaatctccaaacactgttgcaatattatgtatgtcctccacctaaagatgattcgattaaaaattacttttaatgaaattcttccgtttacgatgagaagcactatggggaaaataaaggagttttgcctcctagctttaaccatgcatgaatcttttgcacggaaggcccaatacttctcattcttgtaaagaagcacatccaactctttttccttctaaccgtagagtggccaagaactagcatctaaagctgctaactcaacctttttctttttaatatccattaggtcttcttataaacttgaccattcctaccataaattagctcattagaaacttttttaattttttctccattaccgtgtatactcgtatccctgaagcctgccaatgtttcttgacaatatcttgacaatcactctcctgagccagttgaaaatgaaatatgcttaaattgaggttgaatctgactcttagaagggagaagaacataggtaagcaatggtcggtgattagacccatgcaatttcaagtgagagacatacaaattcggaaacaaagtccaccaatctgagttacacaacatacgatccaatcgtttttgagcaaaggttatcataccatatattaactatatatttaaaataaatcaatttttgattaaaatatttaataaaatctttttagtaattaatatttataaatatattttttaatttataagaaaataaataaaataaagttagttattggtaatttattaattaatttttaaattaattacaaatgtttaacaataatctagcaactaaacataaatataatcattacactaatatgtaattattaaaacttctttcatatattattagcaatagcttttagtttttatttgtacgtaataaatggtatagagatccttaatcatcaattaaccacattttcaccaaaaaaaaaattaaccgcgtgatgatgatgatggtggtggtgagtgatgtgcacattcatatagtaaactttatactcgtgggtactcgattatctagtcacgatatatatctgaggtggtaggttgggcctacaccttcatattaaaactagtaaatttaaacttgtacttagattcaatgattttcaacctcactacattatttaaaccaggcagtaaacgatatcttgctctttggatatataataagtaataaattttgaaattgactgtctctttgtgggctaccattaattattggaccacttcctattaaaattacaagttgtacatattcctttataaggcattatggagttacattaacttccttttaggttaactaaagtattaatatattataagctcattcttggtgggtggggtggggatattaattataaatgacgaagctagacttggctatatataataatttattaatttatgtataaaaagaataataataatgtaattaatttccactaatttgtttctcaaaattatacaaaattaacaaaagaagaattaaatggaataacaataaaaaacacacataaatataagaggtagtttttttgttcagttttgatggtgatgatgaaaaagtttagaacggcaaagagggcaagaattatggcgtaaggaccactcagcaatgcaagcttggtgaaacacatggccacaagggacttgcttcccaccttgacctgaccggaaacattccatgcagaccgagcaaacatcggtggcggtggtggcaacatcaacggttgacatttcgactaccgaagtgttcgacgttgcgatccaacggttagaattatcttgtggcggcatcgtgagagcctcgtccaaatcaaagctcatcatgtcaactggatagtttgttgctatgaaggccataattgttgttaattataggactgactaattatatgaaaacctcaaaaagagggttgataaatattaatggtaattggatgagtagtattgtagtagtagagatattggtttctgtttgtttggatttaggttcatatttatggagctgaaaagtactatagtgttgagtttcctcgtaagagcaagggtggcaccttgtgctttgcttgactttgtcatatattgacttgaaaaaacaagtagcctaccttataacgttattggttaacagtatgatttttttttattattatctaaatgaatttctacacttttatgcactttggattttcgcatatatgacacgggaaccggtgggggagtaaattatgatggcacattattttaattaactaataaatatattatgggaaatgctcaaggatagtgtgtctagtcctctcttttttatcaatattactattggtttaattaaatattaggtcccacataatttaatgtaataatttttagagaatattgttagccaatcataagatgacacatctaaaaagtgctaagcaacactagtacctaataggaatattcatatatcactaaaaaaaaatacttttagtgacaatcttgtagtcacaacataaattttttatgactaagtgtaactttcggtcacaacaaaaagttccttgtgactaaaacatagcatttagacacaagttgtcactaatttaagtgtcgtttggtaacacttttattttctaatttttta

SEQ ID NO: 379164 - DNA, 1196 bp, Cannabis indica
ttttttatataaatatatatttgtaattataataaattagattataacattatcattattataatagaatcataataattgcaagcactttaaaatttataatttactacacttaattcaattttctcacagcacagttgtagctattttttagtcccacagcacaactgtgcgaaactggtagagtttttttaaactaatgcaatttgcattaaatttatgaacataaaccagtcatattgcctaggatcttaaatgtagtcacatgaatctttattattagttatgctaattaatttatgatttcttattgaaatgttaaatttatgcttaaaataacttgatcatcattcacatattttatggttatataaatttagtgttttaaaggtggattttctttttctgttttcttttctttttcaccatccctcaaaatttgcaattcatactagttgtaaccggagtacaaatttgttatagttaagaaaagaaaaacaggagacaaattttatgggcttaccgatgcatccaaccttaaaagacaaacgggccatgccaggcccaattttgtgatgcacccaatgttctttttcatatgtcaataatcagtaattatgttggattctgccaaaactcaaaactggaactgtttcacaatttcaaatatttttctctcataattgtagagggtgaaatctacaattacggaatttgagcaccagcaacctgtcaagaacaaagagagagacaaaaggtcaattgggagcaccggtggagtgtcagccaaatagactccgacgctcaagtcagtacgattatagtaaaaaattataataacggaaaataaatgtaatataaatggtagccggacggatgaatggacaagcggacagacgaactaaaagagtaactccgatggtgaggcttaagagaaaagcttagaaaagacgactgtctgcttgagtcagtgagtagtgtgagtatcgaatgtgttctgtccagcgtctatcgtatggttcattttatcgtgtgttcttagtgtcgttgccctctgtccacgtcacccgttggactcgttcaaattggttacttccctaattattagggagtagtaatcgtcctccagactggttccatatttacttgattttacccgtttggctgactggccgggctcggacccggttgcggga

SEQ ID NO: 379165 - DNA, 1692 bp, Cannabis indica
atgtgaagagagatgatataaacatggcaacgaagtacttaaagaagatgaaggaggcctacctagagccagaccctgtgacttatcgtacactattgtatgcatactctataaggcatatggtatctgaagctgaagaccttgtatcagagatggatcttaggggccttgagattgatgaatttacccagtcagctttgactaggatgtttatagaatctgagaaccttgagaaatcatggttatggttcaaaaggttccatcttactggcagaatgagttctgagtgttattctgccaacattgatgcatatggagagcatggccttgtttccgaggctgaaaatgttttttattcttgccaggaagcgaagaaactaaccgtccgtgacttcaatgtgatgattaaggcttatggtgtaggaaaatgttatcagaaggcatgtcttttgtttgatagtatggagaatcatgatgttgttccagacaaatgtacttacagctcactcattcaaattttggctggtgctggtatgccgcatgaagcaaactcctatctgatgaagatgcaaaattctggattggtaagtgattgccccctgtattgtgctgtgatatcaagctttataaaattaggtaaattgaaaatggcagaggaactatataaggagatggttagatttggtgtgaagcctgatgtcttagtctttggaatattgatgaatgcttttgctgatgctggctgtgtaaaagaagctcttggttatgttgatgaaatgaaaaaatctggtttacctctgaacacagttatatacaattccttgatcaagctctatacaaaagttggctttttgaaagaagcacaggatacatatgaacttctgtcatcagaagaggagggtcctgctacctattcttcaaattgtatgattgacctttatacctcacaatctatggttgaaccagcagaagaaatcttcgagagattgaagagaaaaggggctgcaaatgagttcacatttgcaatgatgctgtgcttgtacaagaaacttggaaggtttgatgaagcctttgttattgcaaagcaaatgaaagaactaggaattttaaccgaattattaagctataatcatgttctaggattgtatgctgtttgtggtagatataaggaggtgctagtaaccttcacagaaatgatgaaagcttctgttcaacctgatgattctacatttgaatctcttggcattgttctggtgagatccggggtttcgaggcaggctgttggaaaacttggagtaatgactaagaagaatgctcaagttggattgcagaaatgggtgtcagccctttcttctgtagtcctagtggatgattgtgattacttgtagctgttcttgtatcgagcagaagtttgagcatgggggtaagatacaaggctacaatttgtagttaaaaagatgaaaattcataggaaggatttgattgtagaatttgcacagtttgtatggtgaaatatagacctttgtatatagtagaatgtagaacaaaaatttgtgtaaccttacttgtagtagtagtatgatcttgttcttggatagtatattttgccagttgtagctttttttttcttttttttttttgatttaagcgtttatatattacaattatattttacctgtgactcgaacccag

SEQ ID NO: 379166 - DNA, 1370 bp, Cannabis indica
atcaaattggtatcagagcggtaacaattcatgggaccgaagaaggattcgatggtggaattcaggggagaaaaggtctctgaatttcgtggggaggttcagtaggtatcgcatggtttgacgaagatacaagaggagtttcagggggctatcgctaagattgtcgccaagcaattggaaccagtcgtgaatcagatctcccaactcactcaactactcttacctccagggaagacattgccggcagctgcagcggttagtgcagatcggtttcgacgagccacagaggggaatgggtcgtcggtgggggaacccaattcggcaggagctccaacaactcctccaccactgattgtgcaatcaacagggatttctcattctctgtttgcaccgacaacgacaccgattcaactgggatcattttcgccaacacagtcacacagtcaggatttcaagccaccgagatggaaatacccctgttcaacggcaataaccccgacggatggatttatcgcatcgagaaatactttctactgacgaagatgaccgaatctatgatgttagatacaatagtggtgggtctcgatggagacgctctctcttggttccaatggcaaaatcagcggcgacccattacgtcatgggcgatggtcaagcatctggttctccttcattttcgagcagtacccgtgggatcgatctcggaggaatttttatcgataactcagacaagcaccgtgaaggattatcgtgttcgttgggaagtgttagcttctcgggtcaccgatgtacccgatcacatcctggaaggtaattttgtaaaagggcttaaagaagaaattaaagctatcctccatattctacaacccaaaggcctggcccagattatggaaacggcccaacgaattgaagagggtcattatttaatgggcccgacttcaaaacccagtacccacaaatcgtttttgagccctattttgcctacccgacctaactacaatccttttactacacgttctcaatattcaacaacatctaccaaacctcagaattactcgtccccttccatggcaacgacaacctccaaggctggcagtagctgaccgaacaccatgaactcctataaacgattgacggaggtagagtaccaggacaaacgatcccgtgggctgtgttttaaatgttataagaagttccaccccggccatgaatgtgagcataagctgctgcagattatacttaccaatgacgaagaggagtccgacagccccgatgagaacctgcccctatccccagactccggtgatactattgtcatttaatttaattattaattagacatataaagtctgttaataaataaataaacc

SEQ ID NO: 379167 - DNA, 2382 bp, Cannabis indica
taaaaatacggaatgctggttttgtattatgagacagtaacataattttttttacaacaatataaaatgttgttttttaattggtttataacaacgttatttttacgttgttgttaccggaaagtttcaaaaaaacatgtaaagaaaatagaattggtgaaagtgttgacacaaaaaaaataaccctaaaaaaataaatgcatttcaattttatgtgtaatatataaatttctcattttctaaattttgttgggagactaatagtacgaaaatataaacaatataagtattttaaaaataaattacaaaataatataattggttttcttttaatatattttacttttataatgtgtttgaaaagtcatattgaaactaaatttgggtgtagtttgaagtaaatataaaatttaacacatttgtcttattatctaattacacaatagtgatatatgactaagaattttagttacattctcaaatattcataaacctcccataataattaagtataacaatgttgtataattatcaaaaaaatttcattttaaactcaatccaaacctataaaataattgtcgacccaatttttttgtcaattgacgtgaagtcacatatacaatgtaaaactgataataagtaaacgatagcaaagacgaaaataatagtgacaccagattgttatagaagttcggccccaacttgagtggtcataatagcatactctctttttagttgtactaatctttaatttaacactcaagatcacaagaatagcttagttaagtttcttgagatcggagaaattttacaaatatgtctatagtgtttatgcttacaagaaaattgtgaacatttttctagttgatggaaaacttatatttacagggagaggggaatctatcagcatttattacctgaattcgcaccataatcagcatttattgtgcaaatccataccccaatcaacataggtgtatgccgcctaggggacctgtgctcccgatacaatattgtgttatcttttttccttcttgagaggcatgtcttgactctagagtaaagcctacgcagggttgcttcacaagattacaaatgtagcttgggaaagccattcatctgcaccctgactatgtgtatgccctccaagtttacctccaccgagatgttgcatgccaaccaggtgggaagggatatcttcatgttattgaaacacttagtccaattcgtatgcttaatcttcttccggagggtctcgaattgtcgggtgcagaaaataacttgatatcgagaaaccacacctcaaaaaccactagtgaaacaccatcatgccacccatgtggtagatgcatactacctaggtggcacattgcatgctgcccaggtgtgtgctccacatttaggcacttcaaactttgttttctccttcccgcaagacatatttgataagtccatatatatcttataaatatggtcatttactcgtgttgttattattatttttattctttgaactgttggttaatgtgactttattttgttaagagaattgacagctaatcatatgtttagagatttttgatgcagttttaacgcattatggtagtaaatgctggacgttggagagcttaatttgactagtaaagtgtaattacaacttttgataactctaaaggtagagttggacttggagctcaacaagattttagatctcgttttcagatttttagaacatcttgaatcgtccaattcggagtcatgttgaagaagttatgaccaaaaacttatctaagcacatgacataaaacccaggaaatagcacccagaagacgccacttaaactccacatatgcggtcgtgttcgtacgatatctgtacaaattacaaaaaaataaattttgagtttaaattaagtttatttttagggttgtataaatagcacttttagagattagcaagtttttcattacgttttttatggagagaactcaagaaaagaggagaatctacatctacatctagtttttcttcgtaaactcttttaattttcatctataattatacttatgattatgtttgaaattatgtagtagtttgcttttaggttaagtgctattttaaaactcgagacatgatttctcgaatgctttgattaatattattattttattcctttataatgaattgtttatattattttattttaattttaatatttattctaattttatttttataattttttaatctttttctaataaaatttcactataatttttactataaatatttaaaaatataacttattttagtttgtatatgtgtatttttttaagaatatgatttggaaagaaaatttttttaaaaaaaaactaatataat

SEQ ID NO: 379168 - DNA, 4676 bp, Cannabis indica
tactcttagtagtgacacaattacttctaaaggcactctgaatgatgtatgcgttgttaaaaaataaaagctaaagtaacatgaaaaaatatatactaggaactttattttcaaaactttttacttctaatgtgctcgtgtgttcgtgggggattcattctaagaaaatgttttacaaactacatatagaaagttaacccgtttatcctttccgaaaaaaaaaagagttaagtttatccatcaacaaatcagaggattaattcaaattagaacactgaaagccattgaaattaacattttatagttttatacaatagaaacatgattcgaatcaaccaaatttttgaggactcgtatacagtttcactggtcaaaaaccaagtatttaataggggcactatttataaactccaatatgaactacacattttttggcactctttccttaagatcagacaatggcagattcttctgctacacaaattggctgtgtctttgatcaatcagtagtctgtgcactacaagaacaaaattttaagtgcttgacaaaacttggttatgccaaccgagaactgacctcaaaatatctgcaatgctaatattattggacataacacacttttaaacaaagtaaaaataactcatggtcctaacttcacagtatccatgtgaaatgctcttcagaagtaaggagcaccagtttgtttacatgtattctttttcattttcaattaatagggaaagaagtcttgcaaaatgtgcttgtagggtatcataaagcatacactgtatacataactaaccccagctaaattcttcaagttaatttgatacatagtaagcttgaccagaatagtatatgtataataagaagaagaagaaggaaaaagagagaagggaagcatatctcgtactaataaaggcactattatataatggtagactagacgaggcaagccaaataaatcaacttaccaggaaaaacctacatgaatgaagccagagacaactttggcatttttgcaagacatcttattgctcagctattaaagctgaggtatcaccattagagaaaggaacaagattactatgagttctgatggttgtttcgcagttggaatcgctagcttctccttcaccctgataataaaggaaaaaacaaagcaaaagttagacaggtaaatgttaacacagaataactcaagccaatttgaaaagataaaaataccaggcagcataatacaattatacctgctccaccggagttgaagaatgatcctgggtcttcttggaaagatccctcaaagtcccctgaaaaaaccaacgtcaaatatttaaggcctttctttcattgcttctacacatgtttaggatttacaattgaaaaaaaaaatgcaccagaatgctcatccattcaccatgtatttgacatacttgccaatccatgtttactaaaaaagattaatatggtgattaaacttctaactagacaaaatgccttttctggagtgcaagcctcgttacgggacaaaagaagtgcatcagttttatagcacaataatatcacacacaacgttgatagatttcaattcctatatccttaaacccttccgatttatagaggaagtgataaagagaataaagcaatctgattgatatctctaggagaaaggatgatatgatcctgtcttgcgcacaaagaaaacacatctatcagcttacagttagaatagttggttaaaagaatgttcttttaaacagcaacaacaaaagctaatttcgctaaacatacaataaaacaaactcacaggaccttctctattgcaatttaaaataagacacctttttatccaggacactagcattacattacgctaaaattacagtatttacctaggcaagtaaaatgcagacaatatatacgaaatgaaactaatttcaatagatatgataccaaccctatttgaccaaaaaagcccacatgcgttgcagagagaccttgggccagacggcccacgtcgcatcattggggtagactttgaacttgtgccgcaatgcgtacatctaaacaagtttaagatgcaaaatagtgaagaaaaaaatgtttaaaggtaaacaacaacatgagagagtataataggaaaaagatacttaagaatgtatgataggagaatatacaagtgactaaaaggaacaaaaaatgtttgttgacttttaaaaagcataacacttacgaagtttcaagtaaattatcctcttgtccagactcctggctattaccccagctataagatccatctgacttttttgaagtgaactggcccttgttgcgctgcatcctgatataaatgcatatgtgaaataagtacagaaagcaataataagccaaactgttaagtaggtaagaacaagcacaacaataaatcttgcagtagcagcagcacatggaaaacatcaaaactcctagatctcaaacaaacagacgtttcattagctacaacaaattaagaacacagactgtataaaaaaaactatagtataaagttcacagctcattcaatgtgcagagccaaagaaagaacagttaagttccagatttaaataaaacaaggtaaaattttagttccaattaacgtttccaaatgagtcctgagggttaaactactttcctagatgcttttaaaatcaagtagctacttctgttacatttaccaaagacaagaaagaaagaaagaaaagaaaatctaaagaacatttggaagaggagaggataacttaatgaaagatagttcttaatggtgcaaaggagtttatacaaatcagatcatagagaccaataccattcaaattgtatacttgacatcttgttttgaaaacaaacattatactgtacttgatatcattaaggttaaaaatagcacaaaagaatctgctgcttttactactttttctaaatggtcataatgatttttgggttagtgcactgcagccacacccaccaaatctaaccaaaacaactcattgatcccttgaataaccaattacaataacacacctaagtgcaacttcttgacggacacaatatctaactttcttatcaaagcaccgctcttttctcttctgccggaacctatttaatgaggccgctctatgagactgactacaccgtactggaatgtcgaccatagcctatagaaaatgcaaaagcacataaaaataataataattaagatcccaaatttgagcatttataatagtatataagtacctttgtagaagaacaaaaacaaattgaaaagaaagttaataccctttgattctgagactgcatccccacaccttgtgccccagcagagatttcacatccccccaagagtaacaacactgcttgaacctacaaaaacgttagcaaactttctcaacaaaatattcccacctaggagtagccaaatccttaaccctgcctggttcctaagaaattaaagttcaaaaaaggaaaaacagaaagacaaaactcacttacatgttacttaaatcacactaaaagagtgtgaaattaacacagtaattgagcagagatttagtacaactttatataacaacaacaactaatttcaattccaaacattctaaaggtcagcactaactaactaactaactaccaccaccaacttcaatttcaacattctaatgttcaaatcagtggaaaatccaagcatgtaaagaaaaaaatcaaagtaaaaccctaagatcagatcaaagtaaaaccctcaaatctgaatcccgaaccttatctggagtgacagcgtcgaaaacatagacttgtccacggaacgagagggtgagctggctgctcccatcattacgatgaacgaccagctcatggccgccgccgccaccataaacagagtcgtggttgacgtcctcaacgacacctccaccgccggcgacaaccccggcggattcatcgagagcatgaggctcgtagcggaggtgaggattattgtcaacggactcggcaccggggccgattcctgaggcgtcttcgtcttcagcgatctggttagggatggtcagggactgtgcgtgtccgtacattggcggttccagtgaagcattacagggagagaaaatccgagtagtgaggaagaacaaaagccgaaagcagaggagagagatagtgttggtgtgtgggaaagaaagggtgacctggtttttgtctggtgctgaaagtagaaggaatataaggtaagaccatgtttggttagaatgattaaataaaggttgtgatgagagtgacaactgaataatctttatataatatctaatctataaaggcagcatggatggtaccacaccaccactccttctactttgtttgtgtgtaaataaatcaatatacttacttcaggcaggaccagtttacatgcacatgtgttgtgatttcacttattatagttaaaacttgtacatatcctccatattctcctaaaattaaattaaatacagcttcaacctattcgtaaaaaaatataggttaaaacgtaattgttatttttgaggctttctccttaatacataatattgtttgtaatgctcattacgcatattttgtttacattcaaaaaaaaaaatagtttaattttcttatttaagatattttgtaaaatttataa

SEQ ID NO: 379169 - DNA, 4302 bp, Cannabis indica
aaatatcaacttcattaaaatagttagcattccaaatacataagattttttaagtcttctgtaacataaaaaacagaaatgctacaaccagtattgaaacaggagtttctagcaacgtaatgtgccacccgattcgctgattgtttaataaacagtaactgaacattaagtaatgtagagagtagagctttgcaatccgcaacaatcaaactaaaagttgaaaacattttttgctgactgtgtatatagcttgcactgataacaagctgataacaaaaaatagtagttaataactaataaaagggacatatcatattagtgaggaaacatcaacgtgaggaccatattttatttttaatttactatttgcgtgcttgtggagttcttacaaagaagagtggtacttacaatatacctattagccggcgagcatctataatatggtcttactatcttcaatatgatcaaagacactcgtggcacctgcaatgcaacatagaatacagaaagttgaataaaaaagttcattaggaaagcaaaactgaaaaacaagaaaagaaactaaacattcatagacatatgcaaagcttgcttcgtagaaggacacatgctttagggagaaaccaacaccaatagtgagacaacagcaatatgaaaatggatctaatcatctaaatggtgattgatatagcacacaaaccaaggtatgctgcctggctagtcccatgtctaattggctaaagctgtttaagtaattgatataggatggaaattagtcaaatttcagagttcaatttcgaagttaaaaggttgttctaagcctaaaaagatgtcctcgaattagtccaaggatcttttaagctttcaaatgttctatgttactaatcgaaaatttattttttggcgatctgtactatttagttttgccaagagtctataacttttttcagaacaaattcataaaagatctccagaaatctaataatgtttctgaatttgtggattgtaactgtaaacgactcggattgtgtgatgaaagaaagtaaagcaaacggcagaaacaagtatgagccacaaggaccaaaatccataaccatagttaacaattgtttggggagtctgggacataatataatatgaagacatatccccaattatcaaacacagaaaggtaactcaaacaaaaagaaaccttccaactaagtccataatgtccagtccatgggagaaccccaaacgtttcagtcgtaccaactatcaagtaccttagcactcatcaagagcactagagatagagaaaacataaagctctttgccattattgaattttataaactcaatagtaaaattaaattctttaactgcacaattagtattggtcttttagtcatgagcaattacagtctttttaagtctaacattttcaaatctcaatgcagataatagaacaatgttgaaatctcacataacaagagtgcataccttgcttcacattctgcaccacaccctcctgctacatggctactctcaattaaccttgggcagaaaagctctaatattttctgaactaatgtcaagattctttattgatgctaaaatgttatcaagatcatttgagacatcatgatattctccaatgccgccactgttaaaaggaaaagtgaaatagatcaagtaagtctcaagcaaaaaggaatgacttataatgcaatagaagcaataaaagaaaagaaaaaacaaaaaaaaaaaatgaaaatgaaatacctatatcgatccaccataacttaaaccatcttttctggaatcttcaaccctaaaaccatcaaaggcacaatgcttccccaataacagagggctaagacgacaaaggagagggagacgatgcctctctgatatatcacaaatgcaatgctctaagaactcccgttcataagtcgtcaacatgccagattcgtttgcaacatcatcgctgtctagatccgctcgtaaggtcgtctccatcagcacgcccagttatgatgtcgttgccatcgagccactacccagatttccacatcccgactttcgcatctcaaaagtggagaaaagaatagagaaatagacttacattataaatttacagcggaaggaaaaaaaaatcttttcttaaacatgaattataagaaacaaatttaaaaaaaaaaaaaaaaaaaagacaagtggtcgtgcctaatcaaaaagtttagccagtatttacaacactaaatctgagtggtttacaaacataagctgagagaagtcgtgccttttgacatgtgattagtctctatgttttagagcgagtctgagtgtttttatttctgtctgatctattctgatttcgtcctttcctggttcatgcatggcttctagcagacattaaaaatagatagaataatatatgtttggaggaagaagaggatagcgaagaggttcttgatatcacaaaggaaaacgcttctgacctttggaagcccgacaagggaatgacaattaagatccttaagcaaaatagattcttgtttcagttctaccacgaaatagacattaaacgtgttatcaatggcaggccatccacgtatgatcgtaaacaataaataatcaaacgactgaaaatagaggacaacccaaagctaatcgagcttcgtacccttgatatgtgggtttagatacacgatctccaagcaagattcaagactgagcaagtagttcaaaaagtaagtaactacataggtgctttccttaaatgggaaccaaatatgtggcgtgattctctcagagttcgggtgtccgttctcctaaatgctctactgaaaagaagaatgaagtttaaaaaatgtgatggtgttgctttttgggcaaatttcaaatatgagcgagttccgaccttttgcttcatttgtgacattatgggccactccgaaactatttgcgataaactctacgatacacctctagaagcaatcataaagccctacgggctgttcatgagagcaccacaaaaaggaaggaattttctcacagcttcaccatggctccgacagggtccaaccgatacacctaacagaccagaggtaaatcacgttgattctgatgaagttaatgcaaacataaatattttccctattattgttgaaaaaatcttggaagagaatcaccctgattttaagcatgggatacatgatcaaaggaatgaggcaaaaagttaactttggatgtcaatgagccagctgtcttcataaaagaaaataatgatatgtttacttctaatatggagttagctatttcaaagttaaaacggcgtcgtgtaggtctacctttaaataatgggcctactaatataaccaaggttatggagcaagataggaatttttttgagtcttctgatgggctttcaaaaaatagagaaacggtgggctttggtgttcaggcccactaaacattatgagtacaatcaattggaactatcgtgggcttgggaacccacgggccgttcagttcctagaaggcatatgcagttaaaagaagcccaaattcttgtttttgtgtgagacactttgtaaaaaagatctggtggagcgattaagggtccagcttgggttcgaaggtggtttctccatcgatgctacaggtagaaaaaggggcttggttctattttggaaaacctctgaagaagttaatcttctcggtttctcttcaaaccatatcgatattgaagtctgtatcagcgtcgtgttgatgtggcgtctgaccaatttttatggcaaaccaaatagaagattgcgtgatcgaacatggactctactttgttctttgtaccatgaatctcccatggtgcatcattggcgactttaacaacatttcaaactaaggcgataagagaggtggatgcccttacccaacctctttaatttatggctttcaattggttcttgatgactgcaatcttattgacctggaccttcgaggctatcctttcacttaggatcgtgggcgtggcacatatcattgtgttgaaattcatcttgaaaagctactgtttcccatagctggttaggtactattggattatattttaccaggatctagagttactaccatgtatgttgtttaacatcctaaatatgaatctctaaaataatgtaaataaacacatataaagtttgagaaaccttacagtgggtgcagcggaattataatggctccttccactcagatctctaacccttgtatcctttctgtagcagaatatcaccaagatctgagcccgattcttcttctctt

SEQ ID NO: 379170 - DNA, 2447 bp, Cannabis indica
gaccccgaccctgacaccgagccctaaactcgcactcgaacctcgaaccccaaaccctagatctggactcgaaccctgacctgcactcggacttgggccctaggccctggccctggcccagccttggccttggactcgaattccggccttggccttggaccctgatcccgaaccttgaatcctgccctggggttcgagtctgaggtcgaggtgtgtagatggggtccgaatctagggccagagtcgaggttagggtagagtttatggtaaaggtaacataattttacataattaatacaagttaacaccaaacatagtattgtattaaagaatactaatacaatacaatccagcacaatacgatacaatacaatacaacacgttgttgtgttttaaatgagcccttccattcttatttataatagtcagggggttggtgcagatccaaacataaaagactagtcagactactaagaattcaggaaaaatggattaatacttaaccatcatcatcatctggagttgaggtaatcatgttgctttgcttatattgtcatgatatagttactgtgcctattcattatctactctactgagtagttagtatgcctgcatgttagtattcatcatccttattctttatacacccatggccctgcattgtgctcttgaaatgcaccatattcatggctcctgaaaccaagaaaatcagcaccaataccattgttgcccgtatgcatgttattcaccattgttgcggaaatgaaattctgactgtattgacttgttattgcttctgctcctgtatcctggctttggaacaatcctgatggccattcttgttcttcttcaccacaaaaggatgtgggggaaacatgctgagctctggaggtagtggggccgttatttaggcttagtgtttggttgttttgcatttgatatctgttcatttcaaattcttgttggttgagacttggagaatgaagctctgcgtatttaccagaaactgccaacttcttaatcaaagttgaagaatccacactgcctacgaccaaggccagcttttgttcagcatcaatggttacagtgtatacacctgaattcaaagcttacagctcataatcctaaatattacaagacataagtagctgccactttattgctaaataatattgcaagacattgtattcagttagaaacagtaccccaaaagtgagagaaagaaataagaaacaatttagctactaaaaattgagaacattaaagataaaagagaagttaacaccttctacttttctgaggagttttctgactttttcgacgcatcctgggcagtgcatgtttacttttaattcatatctctgccgaagcattaaaatatcaaagttgtaaggcagactagcaaccattaatgttgaaagttagaatagaatagtaagagaataccttcagttttaaaatttcaaattcagttgccatcttctcagctatgctttcttgctgctattctctctctttatagagaaaaaaatgcgtgtttgtgtgtgtgtgtgagagagagagattgaagtgaatgtgatttgaccaggtcaagaagacatgtgggtgtggtgacaaatttggagatgaagtacacaaaattctcgtggttttggtcatgtgtgggagagactcttaccattagcatttgccagaacaagacttcttgaaaggcatgactactatttttaaaccaagtgttgtctaattctgaatacaagtattcttttttcttccatttattttacaactttacataagtatacaatataattgtatgtagtctactattcttcttctctttctctcgccatatcaaacttttctctaatctagtcaacgtttagttcatatgatagtatggtgatgagctttcttattgtactagtttcatcaaataataacgatatttgtcacaacactatcataattttacagggtctgttagcttcattcttttttcatttctaattttttgcttagtacttctttcccactcattataagaagaatcaatagtaataaattctgtttgaagaggttcatgatttcatatacgtctcattggagggttcatctcttgctactagctataggttgctatgaatctgatttttctttgtgtaaataaaatgagggttgcaatataataaaaagataaatttatgtgatagcgaatttaataattcattatatctccaaatttccgacaaaaattcctaagttaaataacatatatctactataaaatataaaaattataattataaatgtaatagtgaaaattacatggggtttcaaaaacattttacttaaatatgacactttaaggtttgactgttatgaaataatataaaatagatgagaagaacgaagaagaagatgaagagagaaagagaaagtgaatg

SEQ ID NO: 379171 - DNA, 10719 bp, Cannabis indica
ggtgggctatacatgaagcagctaggtattgtattgccttacgacttcgaactaaccttgggggcccaacacaaacttttgctgcgttagaacggatgcttttggacatttcacacttactacaacttgataatgagcaaaatgatgggaacttaagtatgattggggcatctggtgctcacttgttaccaatgaggttattactggattttgttgaggctctaaagaaaaatgtatacaatgcatatgagggttctattgttttaccattggctagtcattcaagttcattgttttttagagccaacaaaaaagtgtgcgaggagtggttttctcgaatatgtgatccaatgatgaatgctgggttggctctgcaatgtcatgatgctaccattcagtactgtactttgcgtttgcaagagctcaggaatgttgtggccttatctttgaaggacaactctagggcccatatagctgatcacctccatagtatcaaaagtagattttctatggacatcatgaaggttttgcatcacatggcactagctctctgtaagagtcatgaatcagaggctttgattggcctacataaatgggtttccatgatgttctcttccttgtttggggaggaaaaccaggcttttactcataaagaaatattgggacccttttcatggattactggacttgtgcatcaggctgaaggtcaatatgaaaaggctgctgctcactttattctcttgctacaaagtgaggagtcacttggttccttgggctctgatggtgtacaatttgtcattgcacgtgtgattgagtgttatacatctgtatgtgactggaagtctctagaatcttggctattagacttgcaagcacttcgtgctaagcatgctgggaagaattattctggtgctctaaccacaacaggcaatgaaattaatgcaattcatgccttagcatgttatgatgagggagattttcaggcgacatgggcattccttgatttgacacctaaaagtagcagtgagcttacacttgatcctagcttgggcttgcataggagcgagcaaatgcttttacaggctatgcttttgcaaaatgagggaaatgaagaaaaggtgcctcatgaattgcataaagccagattgatgctggaggaaacattggctgttttacctcttgatgggttaagagaggctgttgcatatgccatccaattacattgcatctttgtatttgaagatggttaccagctcaaagacagccaagataaattcaaacaacttccatcaattctaagttcatatgttcaatccatgcaatatccatcatgcagaatatatgaagattgtaatcaatggctaaaagtaatgagggtttatcgagcaatttcaccaacatctcctgtcactctaaaattgtgtgtagatttattgggtctagctcgtaagaaaaacaatctaatgttggctagtcgtctaaagaaatttctcaaggatcatatcttgagctgctctgaagaaagataccagggtttccttgtctcatctctgcagtttgaggaaattatgctaatgcacgctgaaaggaaatttgaagatgctctcacaggcctttggtcatatgtgcgcccttgcatgatctcttctgcatctttagataccaactcggatgacagttttttgaaggcaaaggcatgcttgaaactctcactttggttgaggcagagttatacagacttgaggcttgataagattgttgctgatatgctttcagattttgggagttcttttgacacagatagatccacctttagtgatgaaacctcgagtggtagtccaagtatgggtcctattattgaggaaatggtaggttcagctacaaaattgtctaccaatctttgtcctactatgggcaaggcttggatttgctatgcttcttggtgtttaactcaagctagagattctcttctcaatcctcaagaaaatgttgtccatacatgcttgttttctcctatcctcacccaggaagttctacctgggagatttaagttaaatgaagaggagaacacaaggatagaatctctgattacacaactctttcagaaaaagtttgatagtgacacaatttctgcagagcatttgaggaatgagaaccttataaaggttttggtgcagcaggtagtgaatattattgaagcttcagctggagaacctggtacagaaaactcaggcgaagaatgtttttctgccactctagcttccaagttaaaagtttgcttcctgcataaaaatttgggcttagatgaatatgaaatattatctctagtcaataatttagttgtaatttggtggactttgaggaagagaagagtttcattgtttgggcatgcagctcatggcttcatacaatatctttcatattcatctgtgaagattggtgatggtcatttagcaggctttggtgttgagtttctgaaacaaaaatctagtagctataccttaagggctacgctgtatattttgcatattctactcaactatggggtggagttaaaagaaacactggaacctgctctgtcaactgttcctctatcaccatggcaggtgagaaggtgtttcatagtgtatcatgcatcacataattttttgatgaagataacacattctgacgatgaatcttttgtaggatgttacaccacaattatttgctcgactaactactcatcccgagctagtggttcgtagtcaattggagggcttattaatgatgttggccaagaagtctccttcttctattgtttacccaactctagttgatgtgaatgccaatgaagagcttccacaggaacttcaacacgtactcgactgtttggtaatgggaatttctttcactaatatgctttactcatctatgccttattgtttaacaaggttccatttgaccataatttaggtgattttgcttaacattattataatatttataccaatgaacctcttttccaatgattgacaatagcttttactggggaaattatatataatgtatttttaatttataagaagttggcatcacaatttataacatgcctgtttgaaatggaatcaagattgttgaagcagagagtcttgttacatgcagactaaactttatccaagattggtccaggatgttcaacttatgataaatgagctgggaaatgttactgttctttgggaggagctgtggctcagcacgctccaggatctccacacaggtcagctaatttctcttgattgtgctttttgttatacataatgctagcataaaatatttgaatttttttaactttcctattttattgacttaagtttgagttgaactcaagtcaataacatacagcataacgggttgtgtggcatgactggtcagtttattaatgattgctgcaaaactgttgagcactttgttctaagttttttctttttcatcaactatgtgcacaagcattctgagtggaaaacttgctgcttagtttattttggtttaatgttttttatcttacattctttaatatattttcctttctttcttcaaaaaaaatatacatttttctttctaaaggtgaaagtgaacaacttattatcattttgtattgaggagctgcagcaagcaagtttttctatgtggattgcagtgttctacttgtttaatttgcttcaatgttataattggtttacttgtaatcattcaataattttagcctttgtaaaggaataaggttggcgtacttatgtgtgtttattaaataattgatatgcctctatctggatatagtaattttatattattcctattatagtttttggcgttaaatctagctacttagatcttttatttggtagaatttcaatggaaggtttccttacgacattttatgtatacgcttcggtatggggttttatctatatattttatattgccttctgaaaggcatacagctcagcactggcctaaattagataggtacaatacgccatgacctacagaaagaaatttttgtgtgtatgctttgatgggaagctgattcctagtttgtttcataactttattgattggattttcaactcattaagatttttcaagtgaattttaaaaaacatactaaattgatctcttctttctgtgtgtttggtacctcttaatagtccgtcaaaagcaccaaggacttctccactaacctaaagaggttgtccttggctagcatacaatggaggatttatcctccttaaaaaaagaaaggcaagaaagtttatgcacgacatatgaaaaaaataagaataatgatttactttttctttttttggatggaactaagaataatgaattgactagtattttttcaatccccaaagctttatcttatcaattcgttgaggttctttcctatataaacagtgatattttgctaatgcagccatcatatcctcaaaaaactaatgagtggactattattggtgttcatcttttccatatttatgtgcatggactttcttttagggccatcttgtccctaaaagttgtttgtgatagacctcagtttgtttataagaggaggggccgaatatgataaattagtctattaatatcagtcttattttttttatatatactcttttaagttttgtaattaagtggctgagctgtctttttgtgataggatcctagttggcattagttgatagtaacctgggcctatatatatagaggaggggtctctaagggaggggtagagaaaattgtataggaaagttgtggagagattcaccctctcgaaaggtgaaaataaggagagaagagcctctcgaacagctctgaatttttgtatgaattgttggctgagattaatagaaaaaagatactttgagagactcaattttggtgtagctttttgattgaacttttctaactaaggaaattctatcaatttgttactttttatttataaatatatatttgtatattcatattatattatatgcacaaactatccaatttaaatttaattgcctccatatgaaaattgatttaatatttgataagaatgactttctctgtcaatattgattttagatttcacttgtttcaagttaaatcaatgtatacgatttattttttaaaatcttccatagtttctgcctacttaaaatatcttggagaacaaaatgttttctcatgaaggaaaagatagatcataatgcaaattctggatttaagattatgtttaatacttgttcaaaataacactactgccattttcacatttatttgtattctgtagatttatatatatatttatgaggttgtctaattaactatttccagatgtaatgcggcgaataaatttattgaaagaggaagctgcaagaattgcagaaaatgttactctcagccaaagtgagaagaacaagattaacgctgctaaatatgctgcaatgatggctcctattgttgtggccttagaacgtcgtctggcttctacatctcgatatccggaaacccctcatgaggtatggttccatgaggagtacagagaacagttgaaatcagccatcttacgctttaagactcctcctgcatcatctgcagcacttagtgatgtgtggcgaccatttgatcatattgccgcatctttggcatcttaccaaaggaagtcatcaatttccttaagagaagttgcaccacaacttgcttcattatcttcttctgatgttccaatgcctggtcttgagaagcttgtaacaatatctgaatctggcattaacagtgctaatcttaatggaactgtcacaattgcttctttcttggagcaagtggatatactgtcaaccaaaactaaacctaagaaacttgttatactgggttcagacggtctaaagtacacatatcttttgaaaggaagggaagatctacgccttgatgcgagaatcatgcagttattgcaagctataaatggctttatgcggtcctctcctgaaactcatggttattctcttgggattcgctattattctgtgactccaatcagtggtcgtgctggtcttattcagtgggttgataatgtaataagtatatatacactctttaagtcttggcaaagtcgcaatcaactggcacagctctcagcaatgggtggtggcaatgcaaaaacttccgttcctccacctgttccccggccaagtgatatgttttacggtaaaattatacctgcacttaaagaaaaaggcataaggagagtaatctcacgaagagactggcctcatgaagtaaaatgtaaagttcttcttgatcttatggatgaaactcctaaacagcttcttcatcaagaattatggtgtgccagtgaaggtttcagagcttttagctcaaaactgaaaaggtatcattgagaatgtaaagtagttttgaagagttgattcacagtctgttttatatgtacttttttaaaccaaatacaatttggtattgcatgttgattgccagaacaacgttgcttttatcacttaaaatttggtactagcatggactgatgactactgctggtatcataataaacttttagtaaattgtacaacaaaatgataatattgttataatagactagcatgcactgcaccatacagctctttttgaacagctgtagaacatacaatgtaaccgttttcttatctcataggtattctggaagtgttgctgctatgagcatggtgggccacattcttggcctgggagataggcatcttgataacatacttgttgatttctgcagtggagatattgtacatattgactataatgtttgttttgataaaggacagagacttaaagtcccagagattgttccctttcgtcttacccagaccattgaaacagcattggggttgactggaatagaaggaacctttagggcaaattgtgaaacagtgatcggcgtattaaggaagcacaaagatataatattaatgttgctagaagtgtttgtttgggatccacttgttgaatggactcgaggggatttccatgatgatgctgcaattggtggtgaagaaaggaagggtatggaattagctgttagtttaagtttatttgcttctcgagtgcaggaaattcgagtgcccctacaggtatgtctccttgatgagagagaatgtatgaaatttcactttctgagtaccaagtatgaattttattttcacttttccatcctgatattggtaaatcctggatgttaggaactgcaatgtgcctataacattttttttttaaatgcacatttgcaactcgtttatttgataaatcattttagcgtcacagcgtaacatgcatgtttggacatgtgtgagtaattttttttcttcaataataaccaggagcatcacgatcttttattggctacactaccagctgttgaatctgctcttgaggtatgaataagcattatttaccatgttcacctcacttcagctttcttcctttttcagcagttatgtgttctgaacatatttttttatcttctttgttcattctgactatatgtttatgttatcagaggttttctgaagctctaaaacaatatgaaatttcctctgctctcttttatcaagccgaccaagagagagctaacctaatgctgcgagagacatctgcaacatcgattgttgctgaagcaactagtagttttgagaaaactcgcgcatcatatgaaattcagtcccgagaattctctcaagcaaaggctgtggttgctgagaaagctcaagaagcagcaacttggattgaaaagcatggaaggattcttgatgctttgcgaagcaatttagttccagaaattgatgcccggataaatttaagtaacatgcaagaagctttgtcactttcttctgctggcgtgatggcaggggttccattgaccatttgtcctgaacccacacaagtacaatgccacgatatagacagggaagtctctgacctagtgtctgaactggatgctggactctcatctggactacagcacttcaagtatattctttggctttgcaaagaattttacctctgaattatcttacaaccagtgcagtgcatggctgggcacaagttttgcagctgtctgttagtgccctttcttccgatatcctgtctatagcaaagagacaggctgctgatcattttgccaagactcatggggctgatcttgattctgtcaaacataaccatatagaactgtgtcttcaagtggagaagtacatgtcagatatagagaaggttgaagcagagtgtgctgagctagagagttctgtaggctttgagactgaatcaaaagctaaggaccgtctgctgtctgcttttacgagatacatgcagtctgcttgtcttgaaagtaaagaagatgtaactcttccaattcaatctggacaatctaaatatgatggaaaaaaaatagttatatcagaagaattggatgagaagcgggagaaagtattatgtgtattaaatatagctgtcagttctttgtataatgcagtcaagtgtaggttgcttgacatctttggtagttgcgttggaggaggaaatgcaaataataggtttcaatatgattttgaaactattttctgtgagtttgaagagcaagtggagaaatgtatgctggtaacagagtttgtaagtgaactacaacaattgattggtatacccagtcttgagtcagataaagatgattctcaattttattctgaaaaaagttgggcttcgatttttagatcaagtttactatcctgtaagaacttaattgagcaaatgactgaaactgttcttccagaaataatgaaatcggctgtttctttaaattcggagattatggatgtatttggatcaatttcacaaattcggggttctgttgattcagcactagagcagtttgtggaaataaaaatggagcgggcctccttggctgaactggaccagaactactttattaaagttggactcattactgagcaacagctggcccttgaggaagcagctttaaaaggcagggatcacctctcctgggaagaagcggaagagcttgcgtcacaagaagaagcttgtagagcacagctggaccatcttcgtcaaacgtggaaccagaaagatgtccgtacatcttctctcattaaaagagaagctgatataaggaattccttggttttgtctgaacgacagtttcggtccctagttagtgttgagggtgagagtgggctgcatgtcctgggaaggaaggcgttaactactctagttaagcctttttttgaagtagagtcaattgatagagctttctcttcgattggaggtgctttttcttctcagtcaaatggaatttctgaaattgctgatttgttgagttctgggcaccctatatctgaatgtatatggaagtttggtagcttatttgatgaccagtctttctttgtttggaaagtaggagttatcgattcttttcttgatgcatgcattcatgatgtatcttcatacgtggataaaaattttgggtttgaccaactcttttctctgcttaagagaaagctcaagatgcaacttcaagaacatattggtaaatacttgaaagaacgagttgttcctactttattggcttgcttagacaaagaaaatgaacatttgaagcagctgacagaggcaatgaatgaacttgttatcgatcaagtgaaaaatgatattggggttgtaaaaaaggtgcaacatatgcttgatgaatactgtaatacacatgaaactgcaagagcagcaagatcagccgctttccttatgaaaaggcaagtgaatgagctcagggatgctatccacaagactggcttagagattgttcagatggagtggatgcatgatgtgactttgattccttcacataacagcagaatcaaatttcagaattttcttgctagtgatgacagtttatatcctattgttacaaaccttagcagacctaagctgctagaaagtatgcattctgccatgtcaaaaatagccaggtcaatggagtccctgcaagcttgtgaaagagcatcacttactgctgaagggcagcttgagagagcaatggggtgggcatgtggcgggccaaattccagcacgacaggaaattcttctagtaaaacttctgggatacctcctgaattccatgatcatttgatgaggcgtcagaaactgctttgggaagctagagaaaaggcatcagatgttatcaaagtatccatgtcaattttggagtttgaagcatctagagatggcatttttcgatttcctggggagctttatcctttcagaactggcggagatggcaggacatggcagcaagtttacatgaatgcactgacaagattagatattacttaccattctttcactcgtaagattacttaggccaattactgactcatttgtaaaagtggtattattaacatatgattaacaatgtatgcatgtgttacttattaggcactgaaagaatggaagattgcacaaagtaccatggaaactgcttccaatggcttacatgctgcaactactgaacttcgcattgcatctctcaaagcaaagtcagcttcaggttacgttttccctctgtaacatttgacattttatttctactaggacatgcatttatctttctctctctctctc

SEQ ID NO: 379172 - DNA, 3347 bp, Cannabis indica
aactttctatcaaaaaaaaatattataattaattaaatgtatatatataaaagaaaattaatattattttggaattattttcttttgttaaatgatttgtttgtttggacactgtattttatttttatttttttgtgggaaaaatctaaattctttcattaaaatgagaaaggcctcagcaagaaacaaagtctgaattacatacgatttgacaaaatcgatgcattttcataagataaagagcctccttaggtagcctaagagcattagtattccacttccgactacaattgaaactgcattttttaaagtgaaatataataggaaaatttatgtatcataattttttaagggaatgttctggtaaaccagatatctgttttggtattcaaagatttttataatcacatatattgtacttgtctggaattacattcagaaaattctaaattatgtatgtgtcaacaataaaattcaaacaaatattaaccacgtataaaaaaaaaaataattgctaaagtaataaaatatttgaatcttattttttacacagtaaatcatgatgctctcactgttcttttcaagcaaactctgagcttgattgtgaactcaagagagtagtaaataaacctaacccgaggcatctagctttgttcagttcttcttctacagggaatctttaatgaactctgtaacgattgaagctaactcagcttgatgatcagagaaacgatgatcagcaccttctacaatctgcaatttgtggttttttattatcttggagaactctattgcatcatcaacaggaatggttttgtcagctgatccgtggactgtcaggaccctgaatcaaaccattttttttatcaaaaaaagaaatagtaagtttattaatagtcaataaaagaggtttgaatgctaatatatattatagagcatcatggggtgttagaaacaagatattattattataatgagcaatagttttgaagtgaaaaattcttatttatttgcactaactagtgttcggatgtcaaataacaatgcagagtctagattttgatcacctgcaatcgtcgctgatcttaagacatgctgagtggatatcagtattcagacgatccaacatactcttttcagtcacttggtaactggttcctaccatgaaagagtgtcatcaagaaaatggtccaattaagtaccacaagacgtagctagtatcaaattccacaaaattgttacctcttctatctttgacctcaatgtatcctttctcctttagtgtttgcatgaaatcttctccaaagcgttccgcaatgcctctcttcagatcataacgcccacaaacattgacaacagcactaacatcagtatatcttgaagcatacagaagcaccgcatcgcctcctgcaattatggatttcagtaacatacttttcttagagaaaatttcacatatagaatagactaaggtgaactctatatatctttgctactaagaaaagatactaatacctcatccaattatgaaatcttgttccttatttcattaaaagattaccaaattaagatgaagactaatcattgcacctttactatgtccgagaattgcactgatggtgcggttggctccaaagaaatgttcgattacagaacgtagatcatcagcctctctctgatagttcccatactcaaaggtaccttcactttccctacaaatcaaagataccacaacaatgaacactaaatgaagtatgtacatttggaattcatgtaccaacacctgcaaacaattatgggtcaatcaaccccagttttgatatgtaataaaagagccacctccatcaccatgattagatgcaaaattaatttacatctaggaaatgtttgatcaataaatgaattctaatgtatgataattcttgcaaaacataattactaatccaaagccagtcaagaatcaaagagatttcaactaaagtaagactggattacttgcttattattgctatagccaaatatctcagagtttacaaatacataatgtttgtataattgagattattgtttcactttgtcatgtcaacaacttacccatttccagcaaagtcaaaacggaaggagctaattccttccttttccaaagcaacagctaagttaagcatcattgtattttcctatagatgaaaaggaaacaaatattaataagttctaaaacttttccagaatatatacaactaagatatttgctattcccatgagaggttatttatcaatttaacaatatgatgaatgtgtacacaatcattaaactacaatgttgaaatatacatgaaactatagtagtactctgtagccactactcttctctctcaagctagattaatagtatagattagaaatactaacctttgaggatcgaaaaccatggcataagataacaattccctcagatccagtttcatgaaataagcccactagtttttcaccatatttgtttggtacgaccactcgttcaaccactagagagagcaatttcaaactatattaggtgctaattcaaatatttgaaactgaatttaacaaaacccatatcagattagagccgtagaagcttaaatcaagaagataggccatcaaaatccaataaaaaatatttaatatcaaacacattctttagcaatggagaatattctgacctggggtttgtgcagcccggaccaatggggccatccttaacctgaagaacgttctggttctgggactatgtttgggtggtgagaaaaagtgaagctggggacaagaatagtttagagagtggaagttgttgttgttgttgggaggacatgaatatgaatatggtagtgacagtgtcagtgatgaatgaaaactgtacaactgagttcccattcctgtcctttaacccgctaaccaaacttgtctttccgaaaatgttttaagagactgtgagttcctccatagccatatccttacatttttcttttcataatcctaagtaacttcacaccatccatggcctctcctatcagataatatttaacactaataaaccacactaattacttcatctgcacaacttattaaaagatatcttcattttttttatctgataggcagtaagttaatttaaacattacaccaaattttactacattttcaaacaagagcaccattctaaattagtacttacttgattactttacattcgttaattttatattaaactaataattttgattttcttatataatctaacagtaatcaggccgcgctgcttgcggttatttataaaaaatttaaattacataattgaacaattaaattat

SEQ ID NO: 379173 - DNA, 1749 bp, Cannabis indica
ttatacacaaaacttagtaaatcttagcacaatttcaactcatttcaacccatttaaccacaacaaaggaagcttatcggttttaacttttatctatgaactactaaagttaatccaaaagtataggaaagcgatctccgttacactaacctttacagccaaagtctgtaacgagaatattccgggggcgtcaaccccattcagataagctttcacctccggtataccggaacctgcagccgccggtgctactaaggccgtcagtgtagacgcaaacagagtaagcaccaaattggaagcgaaaaacacaaaaaaccccatcctatacctacaaaagtcaagagaacaaagttcagtaatggagattctttctatttttctcacctaagtttccagggaaacaaagcaagactagctttactttttacctatgctgtaacatcatgttagaggtaatgacaaacttaacgccagcgagattctcaacggcgaggttattgcaaaatccgatcaggctaacagttaatccgatgaggaagcaagtgagccacttcatgaatatgtactgacatatttgactttttccacgactcctccaatcttgcttgaagaactcgttctcgaaaatcctgattcacaaaaccaaagcaaaacaacataaataagcaatccctctcatcatctcaatccagcacaaattttagaaagaaaaaaaaagcgcagaagagtaaggaggaatttatactcgtaatcgaggctctcgatagggcagacatgagaaccaactatggcgacctgagaactcgaattggggatcgatctctggctaaggccggaggagagtaagggaatggaaagagattcacggtcacgatcgtactcctgttgattctccgccggagcatgctccagtgcattggccatggcggctttaccggttgaattgaattcagtcaatggcaaagcttgagttagttatggtactttatacatggaagagaaatggatatagaaatggttggcaatctccggattcgagaatcttagcaagagaacagttgactgtttcttcactcatttcttactttatgtttttccttttcttcctcttttggagaaatgctaactgccatattaaggtgcgaaccacacaacacctgctggcatacctttacaacaatgagtggatttgtaattgtaacctcacttctataattagtagtatttacccattcacttttagtaagcactcgacactagtggtatctatcacctctagacgtgtcgtcttattattggttagcgaaactttctaaaaatactaaaagtcaccagtagtgcctagtgtcacgggcccaccttttcaggtagcgaaacacctgtgcggcaccttggtttttctaagccaaggtcagccttcaaaatctgagtaacaatatgctcattttgcgcgactgtgtgcctcatgcacacttccgtctctcgaacaactcccgccgagtcatgctcgcaagcatccatgagtgcattcatacatcgaggctctctagctaagatactcacactgaccataagttcccactatgataagacaaatcctaacaccgacgctcacctagtcactcgtgaccaaggtagcaagtgtggcaagtgtggcaatatccccacactaagctgacgtgccaacgcttctactcatgtcccattcgatactgtctgaaccatctccctcatcgaccaaggaccccc

SEQ ID NO: 379174 - DNA, 2531 bp, Cannabis indica
gaagaataaaacccaccactaactcgaacaacacaggcacgacaaattttaaaaacctccccataaccggtttcatcttgaaacggagttacaaaacacgattgattagtttaaacgtcaaataaacaagatcgaaaattatccaactttgaaatgatgacatcgataaacaatcggttaatgtatatatagaaagctttgacatggcaaattgaaacggaaactaaactaacattagatccattataagttgtttttagcacaattagtgtggctgcgagattctaacatcacaagacaactacaaatatagaattgaaaaaatccttcattctatataacaaaaccaacattaactgcacaccaccatatcaaggcaatataatgtctatgccatttaccatattcaccgaaaccttctaagtctatctatatctaatgacgacataaaatcaaaaaacgaaaacaaataatactgataagcgttgcacaatcgcttaattaagcaccatgcagccaacacttggattcatcaagagaccaacgcacttaagcacgttcacctctgatacgccttgccagttgaatgtccttaggcatgatggtgacacgcttggcatggatggcacacagattggtgtcctcaaacagtccaacaagataggcctcagcagcctcctgcaaagccagaacagcgtgactctggaaacgcaaatcagtctgcaaaacaaaattgtacaatcattagaaaaacatatgcaaggataccaaaattacaccaaatcaccagcaaggctattaaaattacatcgaacaccaaaagttatattaccttaaagtcctgagcaatttcacgaacaagcctttggaatggcaacttcctaatcagaagctcggtactcttctggtacttgcgaatttccctgtgcatcaaaacaaacaattattagttataatttaaacagaaattaaagaaaataaagataaaaagaaaactgatttgcacaattgaaaacaagagtagattgcatacctgagggcaacggtaccgggacggtatctgtgaggcttcttgacccctccagtagttggggcagacttacgagcagcctattaaaacaaaaccaaattaaaatcagaaaacaaactaaacacagcgttaagataattattacaaattcgagaaattttcagtacaaaccttagtagcaagttgcttacggggagcctttcctccagtagacttacgagcggtttgctttgtacgtgccatatctgagacaagaaataaagaaaagaacaatattaaacaaagaacaatgaagatgccaagaatatgcgtaaaccataatctacaaaccgaataatagtcccactttgcaaaaaccgtacaacaatgtaacataaagtcctaaagttttaaaaaaataaacatcttatcaagcacgaaaggtaagtaaatctacatcaaactctaacgagataaattaatcatggaagaacgataatataccaataatatgcataatccctaaatgttaaacgtaccaattacataaatgagaaaatctaaaacaatataagacccacaaaatcgcaaaaccctagatcgagattagcgtcaaagacgtaaaattgagataattttaggagtcattcatcatacaataaaatctcagaggaaagagggtaaaatctcagataaaaggggggaaaccctaagctaaaatcgaaagcgaaagtgaacatggaagatgacaggggatataaatctcaaaaccctaatttcaccatcgaaaaacagaaactttcaagagaaagacgaaaaggaaaactgaccttagattgcttcttctcttcaacctaggtaagcgactcttcttctctcaagatgaataaagttctgaatcgacttgtgattatggtgtatttatagcctgcgacggttgtaacgatttgaagatggacggataggattcattatccgtgtgttttctctgttgattatctgacggttgagacgtggcttgtttgtgttttctcgcgttgaatggacggtccagatttaaagtttgacgaaaacgcggatcgttaggcattaatactcgattgttattggtcgacacgtgaaataagtttttattgaatattatgtttattgttggaaatagaaggtttacattttagatgaaaacacaaatacccgttggccgtgggtggtagttgaactgttgaagaggtatttcgtaaaattataattatatcctttatttttttatttcttttttagaatcattgatttaccttttgaaaaaaaaaaaaaaatacctcaaataattttagaaaaattttagttgctcccaaagaaattataattacacctctcattaaaaaaaattaaattaaattaagcctaattaataatttttacccccgaactctgacatatataaaattgtgcccctgaacttttttggccgttaaaaattttgcccgaactattgagattgttaaatttaaggacttttgtc

SEQ ID NO: 379175 - DNA, 4187 bp, Cannabis indica
agttcagggggcatgatttaatgtatatcaaagttcgatgggtataatttagtaaatatcaaagtctggggaataggatttagtacataaacaattactgaaatagtaaaattcaatgaaattaaacaaaagtccttaaatctaacaatcttaatagtttaggagaaaattttaacggccaaaaaagttcaagtggcatgatttggtatatgctaaaatttgagagataaaaatcttaattagcctatatgtaaattttatactttataatcattgcataaacccagaattcgcttatcagattttcacaagttgtgacatctaattaccgttagaaagaccttgtttttcccatactcatcagcaaatgctaaacccttagaagtggacacaacctgggatcagacctgctcacattagattaaaacacaacaatacttggcacataattttacgactgttttagtagcaagtcaatggagacagtaaatattagtaacaacacaacaataccttttaaagatagctgaataacacatatcaagaaatgtacaatctcaaaacaccacaaaagaaaaaatatatctctaaatagctagtatttcacattcatcttaaactctaacttataaatgtcataactatttggattgaataccacttcatcacataaaagattatatcctttaaaactttatggcctattttacttccaaagctttatagacttttcatctgaagttcatatcaaataaaggaatatttggactgatagtctttctatacgttaaacactttgatcttcttaattagtactactgtgaaaaactcactttaattggttatgagtgtatgtaatgacaatgaaggtttcatatatactttatgctgggtcggctgggcataggcggactagactcgcgtttaggactcactcattttaagggtccattttaataattttttaaaaataccatttatctttatagtaagagctttaaataaaaaatttctctatagtccatttcaactcagggtcagcactgattttatgtgtatgatttggaatctaattttgaaacaacgtgaagcatgataaatggtgttctctgtatataatacgagattcaagcattaaaactagattgctatattaacctacataaaaataagattacaacccaaaatacaaattaatcatatttcaattaacatatttataattctgattaaatactcacacccaagaataataccaaaccacaaactaatttcttcacctatttattgtacacaaggaaaggccaatttatatgtcaatttaaaattaattgcagtatgacttttcttatacaaaattgtaattccatcataaaaaaaaaacatgtatgaatctctaaattaaaagaaactctaacttaaaatgttaccaatcacaaatagttcatttttgcagttatttgattttcttcagaagaatatgcatatttttagaactctattggcctgaaaaaagatgttaaaaagggtataccacacaaaggaaagaactggcgaattataagaatataagacatgaataaaagttactaacatctaataaatcaggtccttgtaaaagaaaaggcacaaaaaatcaaaatatggtcaacttttccatgttaactatttcccttgtgaaacaaccttacaaacgtaatcatagtaaaatacataatttctattttgaaacgtattggatcgatagtgcaaacgacaccccatgcactgattagctcccctaaaaatcaatttgatgaatagataccttgaaatatacattattacatgaaataaaacacacttgacagtaaaaaaatacataaaaaataaaaaattaaatcttagatcttccaaaaaaatacaataccagcaagagattgaaatccattttcggacccaatcacccactaaaaaatccactttttttcttcctaaaaaagaaaataaactatttttattgatatattatctttgtattgtaaaaaatgaaatcacaatgaagtttctttcaagaaaaaaaaaaaacatgaaaatggaaaaaggaaggagaggcgtacctgggaagctccacgatagtacctgcgcagctgaggagtttccagaatagctaaaatgaggaaggggcttggggttagaagggtttcttttatatgaagcccggttttcagtaaaacactttaagttttacaaaggcttcaaaaacacattattctgtgactagccaaatatggcccttggtccaaaccatgataaaaggccaacaagggacatgttgggttggttaagctatttttaactaatttttttagtttgatttttttttattattcagaaccaaatatggacatcgttccaaaaaaaactagctacatatttcatgcgacaagagtaaaagtgggataaaacacttcaatatatttttaccccactttttatcttgtcaagtattaaaagttggataaaaggcctcatgttcaactaaagaaaaagaaatacttgttgcatatttatgtttttcatcaagaattagctgagttgattcatgctacattaatatcatgttcaactagtagtgtaggggccataacttgataatatacttcttgacctaaagatgatttcgttccatcttgttggttcaagaagtaatctattcacttgcacatggcaaagtgtatctcattatgaagcgagctatttggaagacagttgctttattggtagtattgtcgtagatgcaccccgttccagtaccatgcactagattgaagttgtattcatagcgtgctaacttgtattttttagattatagtgcttcaatgatgacgtatgacccttcccaagaaagtttgagtagttctgcaactgcatgtttcatcttcaggaatactcatcgtaacacaatgtctccagacttaaatttcttgtctttaaccttggagttctagtttcttgcaaccctttgttgatacacagcctttcagagctcaaacatatctcttatttctttaatcatattaagagactcgaccaacaattggtcatttgcatggttgtcatatgttagcctctaatctgataggagtgtgagctctacaagtatcatatcttcctatccgtaagttaaagcgaaaagagtatggtcgattattattttctttgtagtgtgggaagaacacaacacttagggtagctctttaggccaattcctttagctttgtctaggcgcttctttagcgtatttttaagagtttggtcaactgttttcacttgctcatttgcttgtgggtaagaaacttccaaaaaacttttaatgattatgtgtctgtcatagaagtcagtaaagagattgctatcaaattatgttttgttgtctaacactatcttttttgggagtttgaagtggcaaatgatgttcttgaacacaaaatcaagaactttctttgatgtgatagtggctaaatgttatacttcgacccatttggtgaagtaatccacttccactactgcatattgaactctaccttttcccctacgtagtgaacttatgagattgattccccaaacaataaatggccaaggagtttgcatactcttgagctcgtttggggcaaccctaggtattttggagaacctctaacacttgcaacataatccataaaattattagtcattatcgaccaaaaatacgaacctatcaatatcatctttgagaggcttttctcccaagcatggttgctaaagagtccttcatgaacttcctgttggaaatattttaccaggatctagatttactaccatgtatgtttcattaacatcctaatatgaattctaaaacaatgaaatgaacacatataaagtttaggaaaccttacattgggtgtagcggaatataatgactcattccattcagatctctagcccttgattcctttctgtagcagaacataatcaagatatgaacttggatctctttctctccttctttgatgttgattctccttcttgttgattggattctacacaatcttccacactatgattggcactactctatcactagggtatttcgaaatttaagagaagaaaagagaagaagagggtggcggctatggctcaggtttttctctgaaaaagaataagat

SEQ ID NO: 379176 - DNA, 2092 bp, Cannabis indica
gtttgaccgatcctaacaaagagtagggactagtttctagttttatttgtacaagaaatatagtggatcttagcgaccttgtgtacaattatagaaaattaaataagatgactattaaaaatagtatccgttgttgatgtatttatgattttttttttttgaattatagtagagttttttgtcattttattagcttggcagttcaaaattattttctaattgaggttaggctataatatccctaagacttctttaagaacacgctatagacttgaaatttttggtgatgcccgtttggaataataaatgcacttgtgttgtttatggatcttatgaatagaatttgtagacattacttgaataagtttgtggtaatttttattgacgatatcttggtgattccaaaacatgcaagaatcatgcttaacgcttaataatagtgttatagactttgagggatcaacaattatataataaaacgaagggtgacttctacatgatttaagtcaaattcttattaggatatgtaattttgtaaatagcatcacaaaattttgcaaagataaactgtatcctacaataagaaaaacgctttgagagggcaccatagagcatattttctacatcacttttaatatagctatagatcgtaacttattttaatattcttcacttttcagaataaatttttcttgattttttttttggtgggtaaattactcttgatttagtttatgctattgaagcaaattaatttaatcaaatcgaattcttagtaaaaaattaaaatagagtagttgatttctccttagccctaacgatcaatttcgttgcagactatagtgtttgatatttggattgatgggtgttgattattagctattttggaagtttgtatttatttatttatttacttttaaaaagttgcaaaacgtacactactaattaccccttcagtcgtagagaacttgttatatattctcaaccactaacagtaatggcgggccattgaaaaataaaaaagcaccaacaaacaaaacaaattaaataaataaaatcatgccacacagacaagattaaagcactcaaaatcatgtcatagagacaaaattaaaatattcaaaatcatgtcacataatcgcaaaattgaattgcaataatacaatctcgatcaagctacacttatgtctagaaaaggtcagcaggcccggccgaaaaaaataaaaactttctgtatagtagctataaatttaggaactagagaaatttaattttttgattcgattgatgttaaataagagaacttcataattactaatattactataataagaagagtttttacttgtactctaaaatataaataaatccgtattatttattttctttaaaaattgtttttaaaaaaactaattaaacagtttttgttttttgaaaattattaaaaaagaggataaatagtggcataagttctaaaagttttaagtttgtaagtgatagaatcccaatgtttatttttagtggcataagtatccaatgtttataaaactgtaatttttctccaatttcatcagtataaactctgttattttcttaaataagccacatataaggtccaaattttagatcattgggtctagatagaaatatacagtatcaattacttccaaatattcctttaataaatttaaacggaggaaaattacagttttacaaacattgagtacttatgctgctaaaaataaacattgggtttatgccacttacaaacttaaaattttgtatacttatgacgctatttaccctaaaaaaaataataaattgtgttcacatttcttagaatataatattaaaaaaacaaaacaacaaacatactcttagtttttatttttcttttttattagaaaaagttatcttagtaaaatgatgtgtgtagctattttaattatttcaaaataaaggagcaaatagaaatattctcactaatatgtgtatataattgactatactgatcgaaggtttccttattttattctgaacaacaaaatagaaggtttagggttcgtttggaacgccgtattaggtcgtattg

SEQ ID NO: 379177 - DNA, 3861 bp, Cannabis indica
aactaaacaacccaaatttatgcttgtgacgcatacttgttcaaaagataaaccatcctttttactagcaattaatatccagtatctacttcttcccagtcgatttaccaatcataaaaagggctcacacctaacacaacaaagtacaattgaattgaatggagccataaactaacgacacacaattccaactccacttttactttcactgaaaactttgccctttttattatatatggaaaactctctctgctttaatttgcttaccctttcgttcttctttctctctttattagttcttttttttttcaataaaacaacttatatcagcttctctcttttctctaccagtagagagacataatgggaaaaggggaagatttcaaaaaaataaaaaccataaaaaatatttgaaataactttaatcaataattacttaattaatcacctgctcaatagcaagcagacatcaacatttgaaaatataagaataatgtttgattgtctacaaaagaacaaaaactcttatcatatctttcttggtagtataacaaaatcctaagacctttgaatgtgttgcacccaaaagaccaattgaaattattaaattactgaaaaaaaaaataattaaataagagaaagatattagatcaatattttccataaaagcagtcattttttgactctataataagcttcattcacactcttactctttcatatatatatatatatatatattgatatttataataagtcaagacaataaaaagcaataaagagatcatatgatgatcattacataaaaagaacccaagtaaagataaacgaaagaaagaactgtcaatatgggagatccatacatatatatatttataattgggataacctagctagtctaaagcatatcataattaagtcacttatcacacaccattaattaaccttaagcactaattaaaagaaaagattaaactaatggattcattgtggggggaccataattgttcatcaagcctaaactattaaggtacccaaacgagtctttcccagcgtccgtacaaccaccgtggtcttgccaatcaagggccaagagctttgcatttggctttacatcaatcccatatttctggtcatcatcatttccttcgtacgacatcattatcctttgacacgtgtccataaaggtcccagtaccagtcccatctaaggacattccaaatggagagcacaagccatgaaaattatttggttcgataattccatgatgatgtgatgaagagttacttatgttaccaagtcccatcccaaccatgcccaaatcaatgggcctagggctttcgaaaaagctatttgggcctggcccatgagtgcccagaaggttactgaggtgagaaaactgaacctggtcaggaaacgagagcttaagatcagtggtactggtactccctccaatagcatcaccaccaccattgttatgattattcttagtgttgattaaaacgacagccgaattgttgtcgtttgtcttcttgggcgcgggtttcttgttcttacgacaaccaccgccaacaggaatgttacggagggtcccacctttggtccagtacctacgacaagtcttgcagaagtacctgggctgagtgagactgtagttgttgtagtaacaaaacttggtgtgtgtggactcacatcttggacacttgacgagggcattgtcgtttgggggtctgagcctttgttgttgttgttgttgttgttgttccattattgtgggcttcgagtatgtgagaatgttgtcgtttgatggagaagaagaatctattcctgacgagtcctcgtgaatagtgccctgaaattggatcaaggtagttcaggagagttagatttttgagtcagtaataatgtcgtttgcaataatgtctattcatcaatcaaatcaaaattatagggctagagacctatatatactgacagctatagctatacaaatagtctatataatttatatttactaagaaaaaattacagattttaacaaaacaaaacaaaaagaaataatactattcatttgattaacggttattatttgtttacaaatagtcaaatttatacagagttagatgtgtttgctagctctttgctcgtgaaaaatgtggttacggtattacacgaagatgagtattatatataacttgacaaaaaagcacaatgtacgtatgagagtgaatttagcaaattcacagcataaaaatatgaacttggatttgctataaatttacaatttttcgttagtacataaacaaaaccattttgttattggttgccaaatctatcataaggttcggtttctggagagaaagtatatagtgcttcatcatggcagtattatataacagtaacatacctgtagccaatcagatgacaaatccatgcaaacttgtacagaagtaaagcccatgtagtgtgtgtatatatatatgattcaagaagagatatagcaagaagaacgaaaagaagttctagtgagtcaatatatgtatgagtagtactatatagaatatatggagatctctatcatttaataattctcactatatatattacgtacgatcaagtgaattagaaaccaaaaatgagtagtagtagtagtaatggcttaggaagagagagagagagagttgtgaaatataaaaactgattggtttagtttggtttggtgtgtggattgggttggtgggaactataagtaaggagaagagaaaagggcaactaagactaggattgttaatttgtgtataaacattaaaaaaaacagcgtcggtgggcagaacatgagcgagtggacccgaccatgtccgcacactgccccaacacactggacccaaaatcctcaccatcaactgacggccttgatgtcatcctaattgagttgagtgggacattgtgagccgtcggatttcgaccatacacgtcagatttcacaactgtggtcgtcacaccaattaaaaaaataaatatataatctcatgagttacgctaggaaagggatgatggtttgtatttttgtgactgagtgaacgtagtgtgacagtgacagcatggcaggtttgagaatatatttttgagactttcgataaagaaaacatatataccctaacttgcgggtccatttctgtgggacccactagctctcctcttcaatcaaaggatagaatctaatctaataatctctatatatatctttgcccatggcatggatcatgtgcctcccaccaatcactaacatccctcctttgaaattttcagggctgatccaatatattcaaaattatgcattggttaacttttgtttgtttttttttttcaaataatggggttggagattccaacttaatttctgtttttttttttttgtttagaagaaatatgaaattattaaattatgcttaattttatttttgcctttagttgtatgctgggtcattgcggaactacatacacctatggagtggccatggccccccctaactttttagaaaaagaaaaaaataaacataataatgtataaattaaattaggataattagattttacttattagaaaaatgtgatatttctcttattattaagcctaataaaaaattgtgaagttgaaattgaaaaataagcccaaacccaataacccatttaaattagttatctattttatggtaaaaaagtaacaaaaaaaatgatgggtaaataccattttggaccatctgttttccaaaagtaaccaattggaccctgtgttttgttaaatgacaaaatggaccctgtattttctaaaatagtacaaataggaccctgaattgattt

SEQ ID NO: 379178 - DNA, 2536 bp, Cannabis indica
aaaaaaaaactttaaattaatttgaacaaaattaattagtgacaaaaatgccaataaataaatcaaaattatttgcggtgcaaatttaaaataagctcttgaatacatgctcattaccttggccacccccaattttttcttctgaaaattaaatagtataatagtaaatgttccttgatttattttcaaaattttacattttgcaccacttatataaatttctacattttggctcccttaaatggcgtttcattctgatttctattttagaaggggtttttcatgccttaacgaaaacacgatattatagttattacaaaattctttggtaatataatcattttagaaaagagactatccatgcaccttattcctttctgttttaagatagttataaattaatttttttgtttgtcaaaaaaaaggatatatttattagatgtgataatattccttatatttatattggctaacatcacataactatcagaaatcttgaataacttgacatatcgaaaataaagtgcaaagaatctacgttaagtgcctagctctataatttttgtatatacctattagtggggaagaaaaagacgaagagagaaaacagagtctcttttattaatgatgattattcaaaatacaagatgaagctacatttatatagcttgagaatcagtaggataagctaactgaaacttaacagaataacagaaaagcaagttaactaatcctaactaattctaactaaccaagacactaactcagaacatagcctaattctaataataccccatctaaataaaacctctgttcactttgatttggatattgaattttaggaaaattaccaatttatatatattatgattatatattgtcatataacaaaaatagaatcataactattaaatcgatgtagccttcttttaggggtctacatagctcccatagtttttttcactaaaatttattaagttatctatgttctaccaacaataataaaaatattattgcagatatatataaatataataactactacaatttaacgtagaactagcaagacaacaatatctacaaattggtcttcccctttacaaagctgcattgaaaaatgattggagagctgcaaaagcaatgatacaaaagcagagccaattattaagaacagcaattacttgggctgaagaaactgttcttcacattgccactggagcaaaacacgtacagtttgtgaaggaattgataaatttgatggacgaaatcgatgtggctttgcaagactctaaagggaacactgcattttgccatgcagctctgaatggaagcatagaaattgcaaccattatgatggagaaaaataagtgtttaccactcatacgcggtggccaaggaatgacacccctctacatgtctactttgtttggtcaaagtgaaatgtcatggtttttatatcctttaacaaagagtattcttggaaaaggagaaaggattggaattttcttcaattgtatcaactttgatttgtatggtacgcacatctataaatataaatatcattgatttcatttatccaacaatatagaatattagtactaatagtaatttgtattgtatgattaaattaacatatatattacacagatctagccttgaaaatgtttgaagacgacagagcgctggccatggcttgtgatatgcataacaataccgcgttgcatattttagcaaggaagccctatgcattttgtcatcacaaaacttctacaatacgaacaagctacgccttctcaagtatgcatatctattaaactactattattttttttgttcattttatttaataaaatatttttacattaataatataagatgaaagtcgtcataggcatagtctagtggttccacatttctcctcgtatagaggaggtctaaagttcgaatcctccccctccaaaatcaagaaaacaataaataataaaataagatgggtgtttaaaaaatattaaattaataatgcaagattatggaatacccatctttttgtgttaagtatctattaaaattgctacacatttctacaagatttaatttagtctagaatttgcttaatttagtttaaaatcaacaacagattaacaagagtgtaacattgaaagatagtattttttgtaaataaaattataaaaatcgtaaaaatgtttaaaattccgtacaactatatttttggaattttttttttgtttttttatatatatttgtgaaataatccctttttttttttactattttaaaaatacacaatttttttttctattttaaaaatacacattttttttttaaaaaaaagagttaatttttttttctatatgccactaaagattaagtccgaccttgtgtatgttatagccacaagagtttcttggcttccaaattgtgtaacaaaagcaaattacaaacaattgataaaaaagcgtgaaaattacatgaaatatgggatttcataacaaagttaaaaaaatatggcattttt

SEQ ID NO: 379179 - DNA, 2731 bp, Cannabis indica
tatatatatatatatatagcaagtgattaattagcgcatatattgcacaagtatatacaatattattgcttattataatccttcaatgtcatatatcaagaaaaagaggaaagttaattagtgcacgcagttcccttagttagatctaacacatatagttatgtccatagttcatatactttcgcatactactttttaatctctttttcatatatatgtgtatgatatattagatgtctctataattttgttaaacattacaatttaactgaacatattttaaaaaaatatatatctttctaaggttgctgttttaaaattcactgcacatatttgaaatacacaaaaataaaataaaaactaaaaatataactaaccattgcacttaatatatatgaatatcaatcaatgtttctcttgtaatgagatatcactaactactgtaccaatggtaggcaaggcaataacgatatattcttttacttaataattatatatcactttattaattcttgctcagccatgcatcgaatatatttgtatctgtctatctttatatcttaaataaaaatttggccaagcattttacagattttctcaagtggggagaaaagatatgtatatttaggtatacttggttaataatatgagatgcctcaaatacacaagcactttagaacaaattaactgttacagtcaaacagatatgtactaggtttagggtttgtttaaccctagaaggggaccactaaattttctggcttttgataacatgaaatacccgtgaaaatccaataaaatctcaggcatgcttatattttaatttactaattatatgttatatcatggggtaattaaccttcccataaagatgattgtagaaaccctaatactaaaattattagaatttgtcagattttgtgctttcaaacaatatatattaatttgacactataaatatatttttatatatatttattatacaatctagctgggttttctcgagggaccacttctcaactatccaattattctttccctctttactcaaccaatctagggtttccaacacttaaagcaaatcctatagatttaaagatacatgagaggaaagtggagataaaaaggtaaatatccaggaaataagagacatatatatacaagtgctgactttttacactaattaattacataaataataattctatatatgaaatgtttaaaacaacttgcataatatatatccaataaagtgtactgtacttctagtgattccagaagcatctccacaatatataaatgcagtgtatttttattcatgttatatgtatatatacacacaacttcctattggactaattaattatatagaaaactgttatcatcttcttatatattaacaataagaaaaagaaagaaaagtatactgattctatagagaagacataatatttgctcgtgaacatttttaggcataaccctaaatccatgtaatataattattataaaaagttatagttgtgtgtgtgtatgtgtgtgtgatgatttgtttttgatgaaaataaaaattgtagaatattgatgtgatcataagtactgaaataatatatatacattctgctgtttccgaccatatatggaatcgcggtatatatcgagcttcatgattaattaaatgtgttcagtcagagatagccagattatctgccacatatatatatatatttatatataaaagtaaaattaattagtagtcatgtggtgagctttggcaagagtgatgagtatacattagtagctatatatatagtactactgcaaacaagtgataattaaatttagtttattattaattttctaggaattaaggaaagaagttatagcaagcaagagactgaaacttgaacagtgcacccctttttcacgacaaaccgaagtagggttcatgggttctcatgtgactcacaaaaataccgacaaaatttacctacaacaaaacacaatatatatttattaatttatatatatacatgacaagtataacacactctctctactcatctcttttctcttctttttcagttaatatcaaatttcgaaaactttttcttttaattaactttgatacaaattattaagtctaagtatagggagaccagagctttgtatatgtatatatatcggtatatgtattttctttagtaatattaacgagctacacaaatgtacaacatgcttcaaaatatcacagcatctatacatatatatggtcaactctttatcataataataaactcaatggtaagatattctaatcattttttctttttaccacttttgataattaatagcttttcagtgctccaagtatatgtacatatatatacatttatatatttatcattaggctataaatattcagttatatatatatatactagtaaatagttacgtgcgaggcacgtacactaaattttatgctaggttttttaatgttatttgaaagtgatacgaataaaaattaaagaaaaaatattattagttattaggtgagattattattatgtgtatctaaatatattatagtttataatgttaaaaattaaaagtgaataccgaatgcaatatattagtgtttaagaaagcttgatgatttaaaaaatattacttaaatgagtgtaagataaaaagaaaattaataatcaatctctaaattgttgataattgaaga

SEQ ID NO: 379180 - DNA, 8417 bp, Cannabis indica
tttcaaattctttttttaatgaatgtgttataatagagttttttctttttcttttattagagatggaagtaatttgattgtatactaaaggacaaagattaatttattttgattcagttttgaataattttattatgtaatttgttatacttggccgtgctggttttaattatttattcatttttaaaaatgagagacttgtgtatattatgaagtcaccaaccacccctagtactagtctactactactatttcaaactcattaatcagcgtgaggacagaaaaatggtcacacactaatttagatttggcttaaatgatttttggatcattttttaagattaatccgtctaacttaattaataattaggttcacacaactacccctttaataatctatttaaaattttaaaaattcataaatatattaaatatatcgtctaaaatagatttttaaattaatgtatttaaacaatattatataaatgattacaagatcgaatcacgtaaacctgtttataaacagtatcaagagagtagacagctcagaaggttaggaattaacagttagaaattgttaaacttgtaactaattgttttcagttggttttctattattactttatataaagttgtgtaacaactcattcattcaataacataaatgcattctctttctttttcactctctctcaaaaatttaatatggtattagagttataaccgttcacagttatggaacaccaatcgaccttcaatggtggagcctcaagattgaactaggctcaaggacaaactcttctcccaaaatcgtatcatgtgtcgtttacacattctttatcgatcaaactagataaacataactgtctaccatcgaaacaccaagttcttgcttcgatcaagggaagtcgacttcaaaaatttctagatccaactcaaactctcacgcgcttcctcattactgcagatgaagaacataacacattcaatctagagttagaagattagaaacaacaggacaataactaattgcatgataggatgtgataccacatctcaaatctggacaactctgaatgaataatacatagcgcttaatgcagccaacattggaatgtacaagacttagctcagaaacactaaaataacaggttcattgaatgattacttattgaagataaaagatattgtcgatcttcttgccacaattggtcacaagcagtcgcatcaagatcatatatagaagcaatctttaatggattgcttgcatatatgatgtgtttgtgacttttgttacaactagaaatgatgcctatactgtagctaaggttaaagctctgatcgtggctcagtcagttcgtattgacaagaatgctaaagcattggatatcagcaagagtgaggttaatcttgcttccaacaaaccatctcagtccaattttccctctcaatctcagcactttgggtttcaaatgccttataggcccaatcgagaccctcaatatcgtacatatgataatccaataaacacaatggcggtcaaggaaattttaactcagggcgtggcaacaataatgtcaatggatgatgaggcaatcccaattactctcaacgtggacagaaacaatcttggaatcaaaagcctcagtgtcaactctgccataaattgggtcatactgtcatgcaatacttctacaggttcgataaaaccttcaaaggacatgaatgttttaatcagtttcctgccatagccaatcttgctgagatgcaagcttgtcttgccacaccagatgcagttatgacgacaagtggtatctagacactggagctactcatcatcttacaccaaatgggtctaatcttgcttcaagcagttcctacattggccaagaacaaatctacaagggaaatggcactggacttaacatagacaacattgtaactcctctctaatctctccacttatctctcaaactctatctatcaacaatttgcttcatgttcctttgactaccaaaaacttgttaagtgtctctcaatttgccttaaataataatgtcttctttaagttttactcttttaattatttggtcaaagcacctgataccaagaagatcttattggctgagaagcttgataatggactatataaattctctcccacataactcactcatctctctaccagtgctacctctaagctaaacaattaatttggttcttactgcctgagtcatcaattatcttcatcaaattctaattttcatttatggaacagtaggcttggccaccctactaataaaaatataaaactggctctcagctattgcaatataccagtttcaaataaaacaaattctaatttttgcccaacttgttgtcttagtaaacatcacaagttacctttctaattttccacaactacttttcatgagccattacaacatttgcttttttatttatggggctttgcacccatcaaatctacaaatagatatagatattatataagttttgtgaatgcctattctaggtacacttgaatttacatgctaagaactaaggatgaagtattgcctactttcacaaaatttaaaactcaaatagagttacaattagggttcaaaattaatagcttgaaatttaattggagaattagagcctttactaatttacttgaacagtgtggtatagttcacaaattggcttgtccacatacacatgagtaaaatggggtggttgaaaggagacataggcacatagttgagataggtctcactcttttgggatgaagctttcaaaactacagtgtacctaatcaatagagtgcccactgtaactatacacaatgtgtctcctattgagaagctttttcacactacactagattacactacgccaaaagtttttagttgcttatgctatcctaacctaagaccttataaaaaaaaaataaactccaatacaggtccaccccatgtgtatttcttgggtacaacatgtctcataagggcttcaaatgcatgtctaaggaaaacatgctccatatttctagagatgtagtgtttaataaacttagttttccatgtgttgagtctcttcatcacaaaatctctactacttttccttccccctattcaggtgtaccatctctgtcatcattgcttcaagtaaataatattccacctgtgcctcaaccacatgttcccatcgtttctcatactgaacatactgctcataagttacagtccttgtcaaataacttcaatacttgaaagggactatcagtgatggtctgttactgagaccaacaacttcaatggaaatatgtgcttactctaatacagagtgggccaattgtgttgatgatagaagatcaacgggtggttatattatttttcttagtgaaaatcttgtttcttggtctgccaaaaagcaacaagttgttgctcgatcaagtactgaaagtgaatttcgagctttagctaacactacatcataaataaaatggcttgttcatctcttgtataaacttcacatcactcttgttcaaccaccaatcatttgggttgataaccaaggtgctgcaactcttgctgtcaatccaatcttccatgccaagttcaagcatattgaaatcgatctccactttattaaggattagattttaagccaaaaaaaaaaaaaaaaactctctgctcaatatgttccagcagtagatcaagttgccaatgccctcacaaaagcactctccactaatcgatttcgcaaattaaaaatggcttccaccttttttatttgagggggtatattaaccaataagtgtagttaattattggttttaattagttgcaagttctattaatcctgttgtaactaacttcttgttagttctgccttgtaattcttgcttgtaaataaatgaagaggttcacaattgtgaactaagcttttcagtaatatctttcctctgttttctctctgagtttctcttcttcttctttctggttttgaccatttacaaagtgagctagttaagcttgtacagcctgtgatgcacatgcatctaacaatttcaactcatcaaggaaagttaaacttaaatccttctttgattatatgatttactatctctattcgaattaaaaactatgaattacttcaaaatcattatgtaatctcttgaaatgaaataaaactaagcatgaaacatgtctagcaaaacataaaagacattctattgcggactttgcatgcctttattttcccttgtattaatatctctttattacaacatgtaaaattactcgaatcaatctccattatgattgagctaattataacaagaaaattttgtcacaagtatggagcctgataaggattattgagccatcaaagcgggttttgattcccacttgttcttgatggcattccaaaatgcgggtatggcaacttcatcgggaacttctttgaatgatggtaagtaattcacatccacaatcacatgatcaccactgccttcatcaatctgatatttcaacgtaaccaacaacgcttaatccataaatcctaccatttaattcaataataatatttctaaaattaaatttataaaatgtaaaatataatgaaacaaaaactagttgcagaactgtagtttgtcatgcttgattcactcaattaggaaaattgaaaattttcaacttacaacaacatcaaagccaaagatggtcagaccaagatttttcatgagccactttgcagcttctgtaaccaagtcttcatcaatgtgctcattattgcccttcgagctattactatcagaatgagggttcccagttgcagtgggaagagattttaagctgtaacagaaatcatcacagttctggtatgtaaaattaatgcatacactctagggcgtacgtaaggaaagccaaaaccaaaaactaaaacaaataaaggaataaaagcaagagaatgattaatgttacctgtcgaacactagaggtttgagatcatgactaccgaataattttattaagatatctgtgtttggcgtagacttcttgactgcataaaatactttctcacccaagacatagaatttatagagaatggatgaatggttcacatattcctgcaattcaaagtataattaatttctccaacatgatcgacaatgaacatgggaattacaacaaatgcttcagccttctgcagttattgctcacctgaataactgctggaagaggaactttcaggtctttaaagtcttggtctttaaaaacaattgcctaatatgtaaaaccaaaaatttcatatgaatggaaatatataaaatagctatgaatatgtgattaagtatctaaaaaaatttaaggtttgtacagccaaaagaataagaaaacagtaccatactatgagcaacagctacaccacaagcaacttgaggtttaactatacatggaagggatagtttagcttcagatagacttcgaatgagagaaagttccttataatcatcaacctgaatatttttttagctccagcagtgattacagttgaaaagaagtttcgatagagcatttgtgacttggcataactttttttcacagatttgtaggatttactattacagtaattgaataacaaccttaagaaaatgaggacccctgattaaatgaccacttgcacctttgagattttccagtccaagtaaaatatgttgaatttttagccgatccaagacagggtaaatattactaagcggatcaatcacacaacagtctacatgatgatccatgtatctgttaaaaataatcagaaagaaccacattactgagtagattattaatttcccttttatattccctttatacttggaatcactcttttctaatactaatggaaaaatcaccttttatcttggcaaaacagcatagattaagcaaaaagagattaaaatgaagcaaagagtaaaataaacaagaagctaaaaacccctccacccatgactaaacttttgaccacataatagtacaatagaaatataatatattcggaagagcccctaaaagtaatataaatccagttctaaatacccccaactacataatttctagttatagatatgtaaaatcattcagagatacgtgtgtgcattagccaatgaaaatgtaaattaaactttttggttttagcatgttgatcttctttgaacgcaaaatgtttagagagaactaagtcaagagaaatattatgaacttctaagttgttgcttctgtttttattgcatcaactgtattatatgattctaaacttaccttttcagttcctccatgccagtggtgtaagttattttgtttagaaattctgcagagtcgctcaattcaacagatacgatttcatccgttgctttatgaagaatcaaatcagcttcttgcagttgaggtgtaagaggaaggtcaaatgttaggggaaagaacattaacccattatgagtaggatacatagggaatgcacccctctgcaaaaattaagatacaaaagcttcagaacgcaatgaaacaataatttcaaatatttataaaactttaagtaagaccactgaagtatcaggtcaaaacaaggcgtctaggaaccccgaaacagaaaaggagatctagaaatctctctgtatgatatatttttcacatagaaacaatctgcaaatctacaacatcccaaaaaagtttgaaacaagaaaaaaaaaaggaataaggccaaaaaaaatgttgaaataatttcaacatcaactaggcgcatcctttattctagtctagagcatcacaaatcacaagactattattggaaattataattctctttctttgaacccttaacatgaacttcatgtggtaccattaagcttcattgctgttcaaaatcttaccttagcaaaatcttcttcgcgtgaaggcttcataatataacctactgtcacaacattgtctccaactgcctgcttgccaatcaaaacacatattcataataacacacattttgaaggtgataattttgttgcccaagtaagaaattcattttataattacattaccaaaacaagaggtttgcatcaaaacccttctaacctttttattaaggcggcaaatagtcaaaggcaattcctccaatttgttgatattatcaatgcttgaagcatcacatgggctggcacctacagcaggtgaaagaaaaacaatgtgatgtattactactaattcaaatcattgagagtaaaagctattaagtagttaactgataaggaaaaacatacttcccaattcaaacaggtaggaattagatttcatggaatcagtattcatttctgtgaattttcaacatttaaacaggagtcgccaaaatggataagtttcctaattcaaatctgaacagcccaaaacatgtctataaaacttacttaaagcaacgatctgccaattacagttagggggtttattgaagagttccttgtcatcatcagagagcaggagcaaaatagttcctctaacatgattccaagcaagcataatatcgttgatagcatcttctagtgaagacgaagatgggtccaatgaaaagcaatccatggagtagagtgctgccatctttttaagcagattgatctaatcaagccacacaacatgaatttttaatatcatcacaattgtatcaatgcatgttcaatcactgtgagatgaaatacaagaggagaaagaaatcacttcgaagaagcacagaaaagagccaattagacaagtagtaccttgtgagatgaaatacccggtccatgagaaattgcctggaaattaaataacaatagggcattaaggaagaagaagaagaagaagaaaataagagaatcaatagagagagaagaagaagcaccgtagggatggcagaatggcggagcttacggaggagggagtcagcggctgggttggcaatgtcatcatggaaaagcagagagtgatggaatatgactccgcctattacaccaccatttgcaccctccatctctctctctctctctctgaaactgaagtaaagtagtgacagacagagaagaagaaaggaaatgaaatgaaatggaaaagaaagaagccaaagccttcccacactactactatccttttcattatttatttatttattttttttttttgctgaaacattatttatttttcttgcaatgaacacttattattttatagggtaaatactattttgcactttgtgttttacgaaagttattaattagaatctttgttttgataaataacaaaatgaattttctgttttgttaaatggtaaaaataggaccctcaattttcaataattttatttttttaatataatcaactttaagacaatttcta

SEQ ID NO: 379181 - DNA, 1738 bp, Cannabis indica
gacataatataccgagtgttgaagtttttcctcctcccggaccacagctgcactgaccgcgttctcaaatcggctaaatataaatataagtcttctccatgaattagttttgacagcactggtggcttagccatgtgttctttcaactttctaaatgcctcttcgcattcttcagtccatttaaattattgacacttcttctaaatgttgaagaacgggacgcacttgtcggttgagcaggagataaagcgactcaaggcgacaaccttcccggttaagctttgtacatccttgtgtctcttcggggagggcatgctcaataaggcttgtattttttttcagagtttgcctctatcccgcgctgactcgctatgaatcccagaaattttcctgatttgacgctaaaagtgcattttttgggattaagtttcatcccatacctctggactacctcaaagcattttgtgaggccgtctgcatggcccatgcacattttggatttgacttgcatatcgtctacgtatacttccatgttccgtcccaagagacctttgaacatccggttgaccatgcgctggtaagttgctccagcatttttcaattcgaagggcatgactaggtagcagtatacctcccttgtcagtcttgaagctagtacactcttgatcaacgacatgcatttttatttgattgtaccgtgaataggcgtccataaaggataataacttgaaatctgaggtggcgtctaccatttgatcgatcctgggcagcggaaaacaatcctttggtcaagccttgttaagatcggtgaagtctatgcaaactcgccacgttctgtttagtttaggtaccagaaccaggctggccaaccactctgggtaatacacgtcccgaataaaaatattggataataatttgtcaacctccttttctaaggtgtcaaccttcaccaggtctagtgggtgcttttttgttataccagaggcatatctgggttgacgttcaggacatgagtgatcacatggggacttattccggtcatatccccatgacaccaggcaaaagctgcctttataatgtctatgatttgactccgctccaccagttctaggtttttccctagcgaataattttggatgcgtcgaggtcacacaccctcccttcctcaatatcctccatgggctctaacaccgctttagacccaatacgagggtccaactcgtcctgttcttctgccaaaactggtcatggccttgtatcatcaggaccgacaaatgtactgcaatgttgtaacactttcttacttctccttgatttcccctcactgtccctactctggcctcctgggtagggaatttaaggtacaagtgtcgaatggaggtaattgctccaaaattgaccaaggccggcctgccgagaatggcattataggcaatagggcagtctactgccacgaaggtgcagtacttgaaggtgctttaggggtgtcagggcataagataatcgggagccacaactttcccattgggatgagggtcatcccgtagaatcttgtgagctgcgaaccgctgggagaaaggtctttgtcggtgagcctaatgggcataaaagcgtccttgaatagtaagttcacggagcttcctttatccactagtatcctggacatgaccttattcgcaatgggagtttctatgactaaggggtcatggtgcggaaaacgcactggcttcgcatcttc

SEQ ID NO: 379182 - DNA, 5230 bp, Cannabis indica
aaagtctcttgctctttctcgattgtggctagggtaggaggcttgtcctagtgattttcaagctattgtgatgactgatttgcttcagtaataaaaatagattttctaacttaaaaaaaacataagggatttgtagatctcaattaaaaattacatattaattcttagtaattatacaaaataataatattgtataataattaatgatttattcaattatgagaatgggagagtttaatattggtgcctcatataattattgtgttattactaaaaagaataaatacctcaaatcttatcatttaaatcaacagtgatgcaccatttgaaaatggtatattaaatattttctctcttctcttcttcttcctttttttttttttttgttatggaatcccatacagtgatatgaaattaaaaaattctaggatatacattataatgtccttaaaataaaagaaagttctcaataaatagtatgtaccctacctacctaatttttttttctttttcttttactatggatttagttagctatatatactaatcaaaattcttagtatgactgaaaatacaaaagctattatttgagcatattttgaagatcaaaaaagaaaaagaagaaaaatttgaacaacattgtttaattcatcaatcctcagttctaactgccaatgtctttaattcccactaactaggattgtgttaatagttttatttgtagtaaaatggttattctatttaaacgatatatgaactttgaggataaattctttcaattccactcttaatgttactggttacttcagattcatctcaattgatgtgatataaaatatatacctatagcctagaagatggtgaagaaaatggcaaaccccaaaaacaccaactagatttagataaattatttgaacagttgactgactaacctaaaaggaatataataacacataattaaatacttcattatattacatttttgtctggttccgattcaagagaaaacattgattaaattatactttttttgggtcccaacgctactaatttgtagagataaaaaaattgaatagcattaccattatataatacatttgaaggaagaaaaaacaaaaaagggagcagtagagttagatccatctctgactttggccaaattcctcatacagacaacagatggggtctttaccataaatattaggccacagagactatctcttgcttgtattattgactatatttcaagtcaaatgtatcacaaggtaatgaacaaagaccaatttctgtgctcaagtaaaacagataagaaaaatgtggctaaatatgcatacaggtgtacatactattctcacccaacacagtttctctggttttcttccttgattatgaaggtcttcccaagtggagttgccatcccttaggatcgatttcctcctgaaaaacataaatataagatgatttagtcttttggccgaaaagaatttggcagcatagcataaaagtattggaaggtagagtaactaagaacctgaaatgctttgttacgccaatgaaacacgcagccacgtgactccatgtacttgtagatgtattgaggaagtaacggtttaaaggatgaatgaagtttcacctttgttaagcctccacatgtcaagagagcggcagcaaggccattcggtgtcaatccagacaaatgcaagattgtcatgtttcggagcctgttgatcctggtaactgataacagtccagcatctgtgactgaacagtatgacaagttgatctgtaacacaaccaaatgaacccctcttcttagtttaagaattgttcatttgaattttctagggaactagtgtgaggagaaatgaagaagtatttacctgttgcaggttctgtgaaaatttaccaagtgggtgcattgcgttatcattgatgttaaagcatttctttatgtccagctctgaaagttgcctgcattccatggcgatcgatgatagaccaactgaggagatgtgaggacatcctcgaatttcgagcacttttagacttgaacatttcgacaaggatatcaaggatgtgtctgtgattttgctgttataagcaatattaatcatctccagagcagggcagccatggcctatagcttcaatgcccctgtcggtaactccagcacacctttgaataacattatagaaacaaaacttgtgtcaattttcaaggcaagacaaaaatgtccctttttccataagaatttggataagaagcaaacctgtaaagatcaagctctttgagttttgaacaacctctcccaacatggataagtccctcatcagtcatgtttaagcagattccaagctttagactctgaagtctagaacatcttgagatggccttcaaacctgcaaaacaaaaacaaataaggtaaccactttaaatcatttaaaagaacaacatattataaatttttacactaggaatgttgagattcatttctttcaaaccttcatcatccatctcattatctgtgacatcgagatcctccaacatttggcaatgttgtccaatcaaaacaaaggcttctttcgaaaccagactgcaagattccattctcagggaggtaagggaagtacatgattttgttatgccttcaatggaggcaatagttatctttcggcagcaagtgatgtctaactttctcaactctttatgtctttctgccaggaagcagagacactcatcagtaagtcccgagcacttactgaagctgagttcaactagagaggcactccaatttgctatagaatttataccagaacatgtaaccaagcaaccatctagtttaattgatcgcaaactggaaaattgacttaggcattttgctagatcagatgtgacctgaaccaccagagatatcttaatgagccaagggaaaggttgttaattatgcaaaatgaaaaaaagttaaaagggtatcaggcaggcaggcttacagaagggccatttgctaagataagctgctctaaagaattagcgccgttagtcagagaggataaaccaatgtaactgagactctgacagtttgacatgttaatcatctgcataaaaccacaagattaagtgaacaagtttaagtaagatgtctgaatgtgtttcttgtttacaagtgtaacaatagaaggaatggtgactttaaaatggttccaaattactacactaaataagataaggtggacatttcagaacatttttttaaagttaatatacatagcataactacatatgcaattatgaacatgctgaaaactaaaagtcatatgagaaaatctcaactctcaagtctcaagtattggcattaaggagaaaatgttacttttattgacttgcaagtatggttgagtgtagaaaggccattgtcatcaatcccatgacagccttcaagaatcaaatcctccaaatgttgcagttgcaggatatgtgaaaggcatttttcagtaatctgcagtacaaaagcataggtaaatattggttgaagagaatacttaacataaacatataaatacaaacatatacattgcatgtacacccaaagttaagtatataacataaattatatataatcttataggaagtcacttctctgattcaggaatttctcttcctattttaagcatgatttggaaccttggaaatgttccaagtaaaaaataaaaatcataactctcagaaataaaatttgcaaaagctttcacttaagaccattgacataaatagataagttcatcacttggaaacttttttcttgttcttttttggacccacaatccattaggaccatacactttttcatccactatctatattggttgagaaaacaggccaacgacttaagagaagtaagtaagcatatcatatacacatttctcaaaagtgaattaactgttttataatccaagctacgactagccttaactatgtgacatagtaataattcattatctaaaacaactgaaataaaaaaactcatattaagaatctgatgctcacaaaacaaattcaataaaaccccaccaaggtcttaaaccataatgataaaaatcccagaactcaatcaccaaacaattaaaaaaattcttcacattaatcttagctaccaaaacaaagaagaataaagttaccggcaagtaagagagatccaaactctgaatttctttgcacttcatagctattaaaccaacccccaaatcagtaatccttaagcaccatctaagacaaagggtctttagctttttacacccaacggcaatacacccaatcccaatatccgtaattgatttacatctagacaaccggagaatctccaggttccgggcctcggcgatagccttggcggcagagtcagtgagttctgtcccgttagacaaatcaatttcgaccaatcccgaacagttattgaccagagtcaacaacccaatgctggaaaaagctctagaccgggaaagatttatggagcggagggtggatttccaggccacggaaacggcggcgagattgttgtcgtcgacgagtgaacagagcgagaggtcgaggtgggaaatcgaagagtagcggcgaaaagtcctgggaaggaggtcggagcggagtggcttcagggctctgcggtggcgagactcgatgaagtagaaggacttgcagactgaggagaaggatcttttggaaaaagggtctccgtgaaggtggtcgagaatggcgtatacgatctcatcggtgaaaatatcaaaagggtttgtcatgtttggatttgggtctctgttttcgatgtcttttttgagctttttcatctgtgaataatgataatggatgatggtgggtgggttcttctgttctttttctttagaagaaggtcaaaacatggggagtcaagttaagtgattgggttgactaatttgatgtgttgaaagagttgtaggtttcgaagattcggaggtttattgtttaactgcaaaagtagcagttcgctttagtttagctgagaagagagttcgttcgtttgtttgttattttgtacagagtagagagattaagaaatgagcacggtatggagtagaagaagaagagtttaattaccaaaatggccttcctgctggatttatctccattgaatgaaattcctaagttgcccccatttaaatatttttttttttgacaaagcccatttaaatatttttttttt

SEQ ID NO: 379183 - DNA, 7210 bp, Cannabis indica
cactgccagaaatcctaaacattcgccttgtaataaatctctaactgttaatattgaaatcactggaatccatgatctctgaactgatcccagaaaaaacgaacggttcctcgccctcgagttggaagatcaccatcttccgtttacagtcaacactagtcgagtgcttagttaaaaaatccatttcaagtataatattgaaatctgctaaacccaattctatcaagtcagcattcaactccatatcctcaactctattcgacatagacctaatccacttttgggagataactaattctttaccaggcagtagggttccaaaccctttatcataactatcatgcagtctatcgaatttactaaaaatcctggctgccacataagggtgagtggccccagagtcaaacaatatagagaagtaagagttgttgatcgagagctgacatataacaactgaggggctagcttctgcatcagcctgagttaaagaaaacacccttgctagagcatgttttgctattgacttctgttcttctttcttaagctccatgcaatctcttttatacagtcctggaaacccacaatggacacatccttgccctctactctcacccagatgatacttcttacaactgggatactccaggtaagtgtatcgggtttcagaaccaccctgatagttgcctcgaccctagttcccttggaacctcttattctgacatgagccaccgggtgcagatggtgcctttctcttttttggtcagtggtcaagtcactatcacccctaccataactaaaggtaggaggagtaggggctccaccaacaacttgagtccctcagaactcctaggtgcacacaattgcgcccctaactcgtagtacctttcccacatattagcatagatggtgttgtcgtcagtagtaatcgcaagattatattttatttttggatttaatccatccaggtacttttctctcttgctgaaatcggttggcataattcttaaggccaacctagccaatcgatcaaactaagttgtgtctttagtaacactcatattctccttctgggtcagctgggtaaattcttttctttttgcacttctgactgcctcgttgtaaaactttgcattgaacaactccaggaactcttcccaggtaactgtagtaacaacacaagtcagggacaccatgtcccaccaaaccagggcatcctcttaaaactagaatgtggcacaggcaactctgtcattgccgatgacaccaataaaattaaaaattcttataataaccgccagcaactgcttggctttcatcacatcaaaacctccctgaaagagtggaggtgcctgcttgcggaacgtttcatagagtggttacattcggttcactacaacaatcggccctgcctgcacagcatgggcatgagccacctgcacttctggagcaggcattgcaggagcaccttcctgcctcaagcatctttacatggccgagatacagaggattatgagaaggacgatgatggtgactactataaagatggatattataaagatggtttgtattatgaacatgaccctagtctggggcaagtaaccgaagagttggcggcaacacaggcgactctagaacaacagcagaggcttactgccaagatgaaagcgaccattgagcaacttcgaaataaattagatggtttgattgggatagatggagaaccatttgtggaagagatgactgaagggtgaacccacgtgcaaactaacgatggaacccaggaccttcgcatggataagggtaagggaaaagtaggtgaacccttacctcgtcagaaagatgcgcctctggtcgggcaaccctcgaggacgcagaagcccaccagcgcttttgagcctggatgcccttctgaccctcgagacagggttgcaccgaaaggaccagcaacgaaaattcctaagcctagaagacgagtggatcctcctagtgatttcgtcaatcaaactactggatattctttttatatatatatatatagtttatttatagttgtcatgacattgattttcttgttttattgtgttgttttatagttcatttataattgttatgaggttaatttctcgttattttttagttattttctactttttactgagaaagtagtatttttataattttgaaattttaaaattgtattttaaaaaaaaataaattttgtattattgtaaaaaaaaaaaaagtataaattcgaaaaacatatataaaagaaaatatctataaaaaaaatcccccaaactattgaaatggttaaagttttggtttttttttttgttcttttttttttctcacaaagcaaagtattgccttgtttttcttacaatgctcataatcatattttatcatataaactaaatccaaaactatggcaaactgaaatcattactacatcataataaagttttaatatatacatatatatacatattataaaaactaataaaaatagtagactgagtcacaggtagaaaatagttagaaattatcactaatttcctcaacaaaatgaaattaaaatgaaagtgggaccgatttgcattgaatgggcctaatacaaaaacatatagaatgacaaggcacaacctttcttggtaagtagtacaaatgcattgggggcgtgaggccgactcacataacaacaaccaattaacacagaatccttgttccttctctgcctcaccctttgtaaatgacaaatacgccctcacacttggatatacccttcactatccctggtctcattcttatatacaataatcttaaataatagtcatcaaatgtttctatcgaaagctctttcaaataaataaataaataaaataaaaataataatataaataagatgctatgttaccaataataatatacaccatattttatttattttgttagtacattttcctaagtataatgtttgattgttggctacatagcttattaaatatatggtgttcaattttcttatatacaacattgttactatcattattatattttgcttatcaaggtatagagttgatatgattgaatacatgtacttcttttctccttaaacaagctatcattttttgttttatttattcattattacttttttaatttcaacaacttgaggttaaaaaaatattttcaaccttatttttagcttaatctaacatttctcatacatacaacaggctgcatccaacagccaccctaggtttgtacaccaaatacaccctattgaatcatcaatcccacacgttcgtttgtcttgctaaaaatatccccaccccaaatcaaataaagaaacccaataattatttattgattgaaaattgattaattataaacaaaattagaattaaaaattaaaacacattataagctgtgcaccccctattttttttcttcgcctcagaacaaatgtcggaacaacaaaattagccattgctatatagcaccctctatatatcgtgttcccatatttaatttcacttctaaactcctctctctctgatctcttgttctatttttatttctcttttttcatattatttttggtagttatcaaaagtagcagaagttatatttggttttttttcccaaagtcagaagtttatatttggttgacagacacacacatatatatataaatatatcaacatgggaggttgtgctacaaagccaaaggttttgaatcctgagacagcggccgatgtgcccgcacctgttcctgagccagcggccaaggaagtagcggtggctccagccgccaccgcagacgtaggccctggcttggctgaggagacgaaggagaaggaggtggtggtggctgaagctcatcatggtggggaggagaagaaggttgaaattgaaacagatgatactgtcaaggagattgttgatgatgacaaggctagtgatgaacaacaattgcaacaaggaattaagcccaggtctctcagtaacttgttcaaacaggtaaaattttatatgagtataaattatttaagaaccgtaatatttttttttgtgtgtgtgcttgtattccttacaactattattttttgattatttcttaaaaacggtaaaatgaaaggtagtctttttgatttcgttagttggaaaccttttcttttaggttgttgcttttagaaagatggtgtaatatatttatatatatatatatatatatataattaagaattattggttatgtatcaaaatctaaatttaatatttatagatttattgataataaccatggttatgaagaagtgttcttatatagttttggtaccaaaatattgtgttggaaaaagaaagataactgcaatcagctggctcttgaaattttattaccaaagtaatatatacttgacacatatttatatgtgagattattaaaacaaaacaaaattattttgatgctttgttcacaatatatttttggtgaattgaaacagttttgttttctgatgacgcccaagaaaatgagtgtaataataataataataataataataataataatagagtttctctctccatcaatggttttgttgtaacgtctttgttgtgtaactgggttcccttttctcacgaaaaataagtactagcgaaacgtttttcattttttgttttggaaaggaagtgattttcaatgctaatcttaatttaattctagaaccgattttttctttactaacaaacgttcccaagcatgttatatttcgtatgtcatgaaatttcatcatgattatagtgatatatatatatatatatatgtgtgtgggggtgattactgtgatttaatcttaaatcaattggtgagttttgtttgagttaaatttattaagggtcccaactcccaattagctaaaaagattcccatactaaataaaatatcattttctctaaattttgttttctctgacctatgtctttatggttgtctagtgtcataggtttctcaaactttgatacaacaatgcaattttttatagattaagttgggcaagctttctcttttgaaagtaagggcctctagagttctcaggttgaacacccccacaaataacattaactaaaactagcctatactacatccttattagattagttaaataataattacaaatgtacttggtttaaagaaagtgcacattatacatgtcagcattattattagtagtaactagtctctcttggactgtttttggatggattaacattggaagatttgattgattagcttaaagaatctgtgtactgtatcttagacattccatgatagcttccgtcccacctgctgtttggatcctctttgtttttgtattagtcaattttattccttttgcttagaaatacatacgcagaaagtaatctgaatgtgtactagtttgacctatatttatgttacatcattaacacaatcttttttagcaaagttgatataaaatccaaaatagctttactttgaacgtctgttttgtatcaataattttttttttattattggcagtggataaatttgagctcaatttgtttggtaactgataaatatggttgttgttattgtgtaaattaataatatatttagtttaatggatgcactactgtttgtgacatcaaataaaagccaggctaaagggagatacattctggcattgaataatatatgtatatatatatataaatgtatatatgagaatggaattgacactatatagtacttgccaagttggtgggaagcagataatgcttgaattgatgtcttaagtgaatgtattatagaaaaatatttatttatacagttgtaatattatgtgacctgttatgttgagaacatttcagtatttatcttatatgcaactatttggtattgattaatggggaccagccagttcatttagaatatttctttattactcagttttgcttttgacacttaattttcagaatgtagaagggaaggaggaaacagaaaatgatgggaaaaccccatcagagactgaaaagactactgaggaattatctgaaactaaaccccccaaagcggaggagcctgaggctaataaggttgatactttagaaaatgttgttgaaacgacagacaaagtgattgaagctgccccagttactgtagagacagaaaacaaggcaacatcacccgaggaggaaaaagcagaggaaagtgcccaagtagaaacagtacctgtggaaaaagttactgagaaagttgaggaaactgctgtaacaaatggcgaagctttgatatctgaggaaaaggtggaaaatgtgaaggaaaatgagcaggaaaatgtgaaggaaatacctgaggaaaaggctgcagatgttcagaaaactgatgttgtagaggaagagaagaaggaaaagaaagagttatctgaggaaaataaaacagaggtgaaggaaagtgttgaagaaactgctaaagtatgaaaattaaaaggattttaagttattactaaaatataaggaagaaagacaaatgtgattttgcatgttgttctacaggagaaggttgtttaccctattattgaggtggttagataaatcttgtaagaaagataaatgttcattgtttccttctttactttttcgggggactatgcgtttcttttaattttttctttttactttaagttctctttcatttattttttctgatcctcttaaatttgaattgcctttttcatttttttttaccttttgtgtggaaacatgggcttatacaaatatagattgctttgtttagaatgctactttgattcgtcgttttctcttatatattaattaatggtcatatctcatttcataattgttatgctgtattgataaaaatacttgttagtgaataacagtcttttcggcaactatatataggggccttgctctcacgcctgggcctgtcaatgggctgagaagcatcttcgaaactgtattgtctccaggtttaggataatgtattggtatagttttcttccccagacccaatagatagcaaaagataattatacatatataatcaaagcggtaaataataaaacacacaaaattatgtgctttggaaattagcctactccacccgaggccactaatattattaaactgagtaaaaaatatatagaatatatatatatat

SEQ ID NO: 379184 - DNA, 2272 bp, Cannabis indica
agagagagagagagagcatgtggaaagcaagtgcagtccaccgaagaaaccacaatatgcttgactctgtccatacaatagtgtcggtcatttcatacgtactactctctcctcaactgcatagtaaataacatgactcaccatacatgcaaccatgttttggttagtgttttaaatatatttcttggttagtttggttttgaatattttgtaatgtttttactgtaattattattatactatttataatatctatatcattccatcaccaaaagaatttaaagtgaagatatttttgtcaacacacacctcattgatagtttgaataaatatgctagaagtgaggagtgtaaatggtgaatttaataagtcaaatgtatattttggtaaacttatctcgatgaataaaagcagaacctaccttgctgcattcttgaatgagaacgtggttgagaattatgttcaagtattttggtacaagaacaagggaaaaaaatcattagtacaaataagttattctttgtaaaccaaagaacaaggtatggatgttttagaattctagcactcataaatgaagatttccaaacaaatttggagaattttttagatcgtacatactaaacaatgatgttagaattttggaagagccggtagtttaaaaaagatctcatatgttgttgatttgaagttagagaatggtagttggaatgttgagttgattagcatggtgcaattttattaataacaatctacaatataattagaacattttatctgtttgaaaagaattagaataaaaaagaaccaattaactagacccttacttgaatcgttttataaaagaaactaaattaaagttaaatgataaaaaagattgcagcatcactattaacttcaaaaatacgtatatttattttaatccactttttaacaagttcattcaactccttagcttgagcattcaaccttttggcttaagcattcaactattatagaaggtgcgtaactctactattaacaaacccttcagccacaagaacttattacagagataaaataaaacaagattatgtcacaagacaagattaatcgcaataatctaaacaaaatacacttaaaatcatgtcaaagactaaccgtaataacaaaactacagattttgaccgcctaagccagagaaggtcaatgggcctgactaaagaaggccgatgggcctgacttgaggaaaaaataacctaagtgattaaagatttaggaagaaaaattctaacagataatataattaaaataatataattaaaagagcttttaatcacaataatgctaataattattaaaatttctagtagggattgcaaacttgatgataaaataatgtgaccaaaaaaaaggtaatgctatactaaaagaatcattggtagaaacaaatgtggaagtatgaataccccaaaaagtcgcactattttttataattgagccactaagacatcttcaatgataaatataaatattatgatatatttcacacaaaagataatttgtgatatatttacaataatttttaatattaagctacattacacaattacaaaaattgatgacaaaatttaaagtttggttaatatttttattaaaaatataaaaacataattttatcatataaagcaatcaacaataaatgtaagagtttataatttaataataaaatattaaaaataaatataaaaaacaatacgtcaacttttacaaattcagataaacatgcaaaatgccatattttaatccatatttagatgaacttttacaaattaaaatcaacttttgcagacctctagagcaaacttttacaagatagagctatattttaacaatagatcaccattaaaaaaagcatcaatatatatatactagcaaaaaattacgtgcgagacacgtatactaaatttatgctagtctttttctatattatatgaaagtgatacaattaaaaattaaagaaaaaatattattaattattaggtgagattattattatgtaggggtgtacatcaaaccgctcaaaccgcccgcaccgcaccacaccgcaaaaaaaatgcggtttgaaattcttcgcggtgcggttgcggtttgaatttttcccaaaccgcgcggtgcggtgcggtttgcggttttgaattattaaaccgcgattcaaaccgcaccgcaccgcatcttttaaaatttcaatttttatatttattttattaagcccatacatatgagcccaacccaa

SEQ ID NO: 379185 - DNA, 2202 bp, Cannabis indica
gaattttgataattgatatgcatcagttaagtcattagagaagttttttttaccatgtatgcttagagttgagcctcaagcttgattgaatttttattggttttattttgtaacctttgtcgtctcctctcctccactgaatttgctctttgttttttctgtcaggttaattcttatactgctttgttaatatatgtagcttgaaaactcaattgacatggacatgatgcatatttgactattggcaacacaaaatgatccctttggcctagtattttcactaattctctttgtaggcatatgatattgatatgtttttatggaaataatgagtttttcttgtggcaggcctactttcctccaatttctcagcctgaaggattacctcttaaggtccaggatgccaaaggcaaggaatggatatttcagtttcgcttctggcctaataacaatagcagaatgtatgttctggagggagttacgccttgcatacagtccatgcaattacaagcaggtgacataggtaatcaactgctgtcaccaggttaattcttgaattttgaagcatggagttgattgttacttctgaatatggattagtggcactttaatattgatttagctcatcgagcacccttccatttttcattttagaaggtttgttggagttggttatcgctgtcttggatttactggatttttctgtacatgttaaaattaatagaatatctagtcaatattaaaatgccaactgtggcagtgtggtgggtcttaaagtttctccatttaggctgagtatgtttttttcatttttctagtgcatgcagtgtcatcttatattcacatatggtttttcttctcccactttggatctgagtgttgttctttgtttctttttttttttcagtcacatttagtcgtttagagcctgaaggaaaactagtcatgggattcaggaaggcctcagcagccccaccatcagatcaggtttgaccttttctcaaattgccttccattacgtttattctgactgttgatggtggcttggaactttgttagtatgttaggttgggataatgcaatgccatgagctgtagaatgaactaaattctttattctgtactttaattttgtgtatacttggaggatttgtttgaaataataaaagagaaaccggagaggactgtcaaaccatttgtgtggtattatctatctcatccaaatgtgtgagctctcaaaagtaggtagagggtcttctatttaaagttctagtgctagtagctctttttttttttttttaagaaataactggaataaaaaagtaaaagaaaatactaagtattaattaacagaaaatagtctttatacaatccaatagtgcaccaatcacaagaaatattgactttatctcagttcaatctgtatactctaatcatgtgcactaaatgtaaacctagctcacattgatctaaggtttgttctattaagtgttcattgacttgattagtgagtcaagtatgcatgtcaatggagcttgttatcttgtgttgttaaatttctagggttaacatgaatatctcgggtttgtgtactatttataattttagcatactatttactttttctaatcgctttaatttgcaggagaacgaaacaaacaagaacgcaaatggagttttagcacgtggagatgttagtatttcaaagtatagagctaagtttaattttattcatcttttaaattgtacctcagtataacctagtttttcatcaatcaaccaggctgaactggctgatcccagttgttggtcaaaagttgacaagtctggatacatagcaaaagaagttctaggaggagcaaaagcgttgatctctagaaagaggaagagtagtactttaggttccaagagtaagcggctgagaattgaaaatgaggacatgatggagctgaagctaacatgggaagaagctcaagggctgctttgtcctcctaccaatcacattccaagtgttgtagtgattgaaggctttgagtttgaggaatttgaggtaattagaaaaacattgtgatgccactatatatatgtatatacatatattaaatgctagcaaggaagatggaggttagtttctactaaagttttgctgttctagaatggctctaccatgacttttgttttgctaatgaagcccaagtcatat

SEQ ID NO: 379186 - DNA, 3042 bp, Cannabis indica
tggcaccaagagagagcataggaaagcgcatgcgcttccattaataatgccgattgagtgcctcgccatggtgtagctactgacagaagcaaatcccccatgttgttgaagagcgccataccaaaacctgtcttgtttgttgttgtgttctgggcagcatttacagacagttttaagttaaaagatgaaggggcttcgtaactatctgctactgtataagaaggatgggtccccgatgtgagtgaatgcctgttattttgttgatacagatccaaataatcagaggttgattggatcacatgagttggtgtcgatagcttctggtgatggagataatcattcctgcaatgccaaatcttccaaagcaaacaaaggaaaaattggtagtctctatccgtgagagatgaagcggccacatgaagaatttccctgcaagttagttccatatatttaaatataaaagaagagaattgggtcaatttccataccttttggacagttgaacatctgaaaatagcatgctctagggtctccatgtgatgttgacaacgacaacaatttggtgaagggatggactttctcttatgtagattgtagcttttgggaaggatgtcgtaaaaggttctccaaatgaagtgcttaactttaggtgggattgtttgtgtccacatctttttccaccaggtttggctagccatggtatccgaaggggtgggatcatctttactcattaaggaatgggctttatggtaacctgtatttacataataatttccatgtgttgtgtatggccagtaataggtatcagggtataggggcaagagtggaatagattgaatggcttgactaatatcaacaggaaaaatggttctaatacgatttgaatcccattgatgagacggggttataagatctgatacatttgaacttccgtctgagaggtgtttgaggtagttgactttaccgtatccagggatccaagcatcattgtatatcgaagtacttgcaccattacctattgattttcgaagtcctgaaactagaagttcctttcccaaggagatactaatccaaacaagtgaaggtcggcctcctttgctagcctcaagaaaagtgttttgcgggaaataacaggctttaagtatggtagcaacaagagagtggggtgcctgaagtaagcgccaagcttgctttgccaacatcgcttgattaaaggccttcattgagcgaaaaccaagtcctccatgaaattttgagcgactgagtgaggaccattttttccaatgaatttttcggttgcttttagttcctccccaccaaaaataaggcatcatggactcgatctttgaatgaaaagaggcaggcaacttgaaacaagacatggcataagatggaatcgcctgaaccacagctttcagaagaatttcttttccaccttttgaaaagtgctttgagttccatttgttcagatgtgaccagacatgatctttaaggtaattgaaaacctcttttttagttctcccaaaagtttggggaagccccagatatttctcaaaggaatttcgaatgggaatacccaagacagaagtgatatgaattttgatgttctcattagtgttgggtgagaaaaagagagatgacttgctgtaattgaccatatggcccgatgctgaactataatcctgcaatatatccttgattgtggtggcggcacttggagaagaagggctgaagagaagactgtcgtccgcaaagaaaagatgagatatgattggggcagtgcgggcaatcttgagaccaagtccttggttacgtgagttattggtcagtgtcttctgggaaatgagggaagaaagaccttctgagcaaagtagaaagagataaggggacaaaggatcaccttggtggattcccctagatggtatgactcttcccagaacttgatgattaatagagaaggagaaagaaacagtcgaaatgcaagccatcacaaggttgatgaagcgagcaggaaaattgaacttggacatgatctgcctgatgaatctccattcgactcgatcaaatgcttttgccatatccaatttgatggccatccaaccagttcggccatttttttgatgggataaagcatgaaaaacttcttggtcgataataatgttatccgaaattaatctatcaggaagaaaagcactttgagcaggtgatataatacgactgagaataggcttaagccggttgacaagaactctagagatgattttgtacagagtcgtacagaggctgatgggacgataatcagtcacttgttgggggtgggaatgcttaggaatgagcacaataaccgtgtggttgatggcaccaatgttttcatccccattcagaaacctttagcggctagtagaacatcatgcccaacaatatgccagtttttttggaaaaaggtgtcgttaaagccatcagatccggggggctttatcattggcgagttggaaagcatctcttttgatttcagtgtcagtatagggacagctgagggaatcaaattcagactcagaaaggcggtcaatgaagccagaaagaacacgatcaatgatctcctcttcaggattctggcttggaaaaagttgatcaaaatattgctcaatcgtactcacaaaagcctcagtgtcagtggccaaagatccatcaggacttaagagagaggtaattttattttttgctcgcctggaggaagcaaattgatgaaaatatctcgtatttttgtctcccagtctaagccagtttacacgagatctctgcttccaatattcttcctctttgtatagaagattatcaagctcatgttcgagttgccgcccaagctgaagctgagaatcggtcagatgagtgcaactttgcacattcttaagattagattggatatcttagattttggaagatatggaaggcccaagtgacttcttccatttcgcaaggtgtaatcggtagtattgctatgaaggttcgaagtccaagcatgacgaagacaatcttcaaaat

SEQ ID NO: 379187 - DNA, 5278 bp, Cannabis indica
tttttgacgcggtgatcaaaatctcacatgattaacaacgcagctctccataattagtggcgccaccttctcgacccaggatagttcatcatctaaccaaaagcatatttaccaaacttgacacatttttaaataaagataatataacatatcaagcaagaaataattcttttaacacaaatccgtaaataaaaacaagataagctcatatacaggataaccattaagataagtttatgtgactaaaactaatatttaattatctctatcatatatttaattatctctatcatacttcttctattacggaagcatttacactaattataggcctcatgattgtctataaatataggaatagggcaacatgtaagagacttttctctcttttgatattaagcacacacaataccaaaattaaagatagaacaacatctttttcctcttccctcaatacaaatgacttaagtggaattaagttctcattaataagatttgaaatactccttgtaacttgcaagtgagagcatctctaatatagagtactaaaagtgtgatacatatacatattttaactcactttgatagtggataaaaaaatctaaatttaacacatactaaaaattatatcataaaccaaattttacaccataataaacatcctttttttatttactatcttgtctcctagtgatgtaattaataactaggaataaaattggcatcctaaaaaacaaacccttattattgctgtatacaattttgcataataaaattcatagaaaactgaaaagaagaaaatgaggtaaagattttcaggtcttatttacatggtatactatagtgtccggacttataaagcaacaagtcttagctatctacaggactactgactacatataactcataacaaaaactaaccccaatctcaatacctcatgaggattttctcccaaaatactaataactacattcacatgcaatcgtcttcttaccctgtccaaccatcgatgaaaaactacgctttcagtgacaccgtcgtcctccttataacctatacaattaaaaccttgtaaatctgatcagtcaccagagttaagacattcttaaacatataaacttatgtttacatatgtttattacattatcaatggacctatcgtttcgtctatacccttcaggcaaggggtccggtctgatttagtaacattagcaactggcattttgaatgggaacagagtgttgtgttgatgtgacttatcttcaatgcgttgcaatgtcaacaaatttgtacgaaattttagaggtgttttttggccattgtctctttcagaagctgattgatcaagcaacctgtattgcactatctatctctacgaagattctcctaaaagctttgactctataatctggagcgacgggtgcttttaatgccaatgaaaggtgaatgtttacgagcagaagcaaatggttgtcggttcaaagagccacagaatttaatatcccaaccctcaacattcttaggaacacatgcatcaaataaaagccggcccaaaacactatgtgcattaatgctcgggggtgcaggtagatggactggtttttctttcccttcatcttgtaaaggctcggattctttaccattttgatattcagaagagcttggcaagtagaaatggtcagcaggcccacgggcaactcttctaagactctgatttgagttaactgctgccttctgtaggtcacagattaattgggatatctcatcatgcgtaccttccatgtaaattctttcatcttccagttgccgcattttttgagaaaaaactaaagtagccttctccagcagatcagacacagcagccctatactggattggataatacttataatgacctgaaatgaccaggaaatcattaatttagttctaatcttctgaaaatatgacactgacatagaacacagtgaagtgaaataattccacaagaaaatggttagcaaaataatttcattttccaaatctagaagacaatatataattaagttgtagacgaatatataatcattttcctagcttagctgtgtttttttttcagggtatggggactccaaggcgttccgcaccagggttaatataatggagctcaatatatacaatagtgttaagagatgaaccttgaatatatgtctaatggtttcctgaatgccaaagcacatagcttgacatgcaagataactttgaaggtattatacacaacaatgagatgtaaaaataggtttatagaacagaggtaggattttagacaaacctatgtgacaggaacctttcattttcacaaacttgacatctcccccaagttcttgtagacgttgagtgaaattgcagattatatgacagggagcgagatcatctttttcagaacccaaaatgagaaatggtgcacccaaattctaatagtagagggaaaaaaaaagttcaagaaattttccaacaaatgaaacgaataaccatcaatcaggttgataatacacaataaaaacttacaacagaggaatatagtgcctgccaatactcagtacgctgagattcaaatctagtaagatataaagcatccaaaccagaagcaatgcctttaactacccaagaagcaagtttagaagatccaggcattctctgaatggttggatgtagtgcataacgagtacccaaatcacttgtaaaatcaactggaccggaatcaaagatattcccagaaatacaatttctgaccaatcgatattcacccttcaaaatggaaaaaaattatcaacaaaatatcatctaaacaaggttctgtcctcccactaaaccaacaaaataggtcattaagtttttctactcaaaactgaaatgaacgaaagcataccggataaagctggccttcacttattccctcaataatctgcaaatcaccaccaccatagccacaattaaaagagaaatatttagaataatgattcttaaaataaacaagttcccaattatctgtacctgaaaaaccttgtacatgctagctttcgttccgccagaaaaagccgaaaaaactaaaggacatggcttaatccttagctcctgcaaatgacaaaccccgaaaacagaaggatataatttacagacaacttaaaattgaagtttaaaagagaatatctacagcatccttgtatcaatcttatcataaaacattctcaaaaaggtagagtaaaacttacctcaacaagctcattgagaatcacaaaggctgacgacatggctcgttcaggataaaatctgcaaatactttcattgccagttaacatcccaataaaacctcaattcattggttttgataccatctactttagcaactataataaacaaacttagaaccaattactcgtaacattagaacccaacaaaagcaaattcagaaccatataattcaaaaccaagtaagaatgatcaaagattagtactttagaatttagttcatcaaattgaaagaaatgaatgattaaaaaaaaaaagcttacgcatcgagaaaatgggcatggcaaacaagagaattccaaccgagagaggcatataaatcgatatagttcttcaagtggtggtgatgaatcgaaacccaagcgaaaagaaccacaattcctttaaagtcggatacttcttttcgtccccaatagataccaccaccaccactaccaccgctaccaccccacataatttggttattttgggggtaaattcagaggtggataaattctagggttgcgagaaattgagcttgaaaatggtgagagagagagagaaccactcgggcgtgggtagtgaaaatctgtaatggtggcttgtggcttggatggtgggtcccattcccatccgcaagatttacttaccattcccacgtgttccaatcaatacggcatcgtttcgttattttatattttttttatcattattgctattaggcactacttatggtgcctaatacgtctaaaaatttcgttttgtgattaactattgatattatttaaaaattattacattaaacaatatgaaatttgatacttagttagactaatagtgatatttatacatagaaatgtactaagcattaccagtgcattttagcatttctcttataatatattctgactttgaatatttacaaatgagaattgttaaaaagtatcacttatctagcactttttttggtgtcataagtatcggatcccataaaacttaagaaaatagctttcaggaaatatcgctaaccaatcctagagcgtcacctataaaaaaatactacgtgtacccaaatacaaaatttaatatttttattaaaaattaaaataataataacttcattattaatattattatattaaaataaatttaagattgccataaaataaatataaagtaataaatttattgtgatgtaaattttgtattatttataatttaaatttgaattaatttttattatgtgacaaatttgaatcaatttttgacacattattatagcaaacttttaaagtgagttatattttagcagtaaataatttgaatctccatcgaaaatgttctaaaccaacaaaaatttaatgattttagacactaacagaatctatgataataaagttggacgaaattatttaaagtatttataccactaaaagaattattgaatatttataattttcaaactcaaaaatttaaatccttatgccacaaattttcccttttttttttttttgagaaattatggagaggtttaatgtagagtacacttctttcatgcccgaactatagtttggtgtctactaggcaataaatgtttttgttacacattcttaaaatggtgttccaacaaaaattacatatttaagacacaatagtaaatttggggacctaagtgatacaaaattgaatttgggaacacaagtgacacttttgagaaagatttgggaccactactaatataaacctattttatttttatttgtactaggtttttgcatatttctaattgggtgcttataatcttattatatatatatatatctacaatggtatatacattttttatatgatagtgttatattataattatttaaaatattctacttaaaattttaaaaaaattaaaataatttatagtatgaagggtaagatttaaggaatatattttacacgcatgtatacacattaattaaatataactgtaaaatatttttaattgataaatatatattt

SEQ ID NO: 379188 - DNA, 2972 bp, Cannabis indica
ttttacttttagaaaaatgaacacattcaaaactgagaggcaatggcgtacacgttacctgaactaaatgttccatgggcacaaatggattctactgcctgtaagtcttctgcattctcatttatctctggtgtcaatgactgcaaactaccaagcaaagtctgattgaattgtgtccctgaattccatgatgccgaataattagccaaaatcatagcatcatagaacaaaatcccaaatgagctaaggaattaaattaaattaaataccagtcaaggaaggagctggcatcgcgacatccatgatagccaccatattctccctggcttgagctgctagcatctgtacaagctcattaacatttatggagcctgaaatatcacgtggatccgaagtaggcccaccttgttccattcgaaatgggaggctaatgctatgtagtgcggctgcataaactgcgcttgaatgatacagcatttcatctttgatgttaaggttcattgcagctttaccttcaatttgcccaaacaaaaaaatgtaatggtaaataacagctttcataagatgaaaatgcaagagaatcaggagaaataatgagttttgcttacttgtactcaaagaaggtaagccaataggtataatcagtttacagaagggcgaaagccttgaaaatgaaactgcatcatgaagatccctagagacagtctgcttccggctcctgggattcacgtgagaaacagggccacgaacagtatataacaatactggaatgttcgtgtagtcatcagcaatgttctccaagaaatctgccgctagaccagagaagcctcctgaatcatccacaatgaattgaaaaccctgttccgatcaccaagactcatcagcaaaaaaagattatcttaagagttgagaatgttattattgattattgtaaaattagataagtgaaaggaccttccataacttggtaataaatttatagtaacataatggaaaatgggaatatgtaaattctgtcagtaaaatgatggaatcatatgtacctgaatatgatcacactcctctacaaaaaagcgaagcctgtcaccaatttcttctcctcttaaaccctcggtaaaagcatctcttccagccccataattatcgaattcttgtgcatccattcctaatccagttaattcatacaaactctggtgatgatagtgaacttttgagaagtctgtccaaaattgtacatcgttttgtaaactttcaactacatcattatcatgaatctcttttggaagactactattcccatcatttaggagagttgaatttccatgttcttcaacgtgcaaacgttgtaaaaacaaattcttcttatgaggttccaaggcatgggtagaaatattaccatccctgcacaatggtacatagataatgaattcgattaaagattgttgtaacacaacgcaacaagatggccataagcttgataaatacaattatccaaacgtacgtatataaaaactaatcaccaagaacatcatacgaagccacagacacctaattgaaagactaaccatgttaaaacatttgattcagcatgtgaattttcaccgtacaatgttccacgcgaactcatagacccaagggatcctgcaatttccagacatttaaatttacaaatttcttaaagagaagcacaaataagtgaaactagctgaaagtttcaaactcaagtttgcacgattatacattctatgatgctgctaaatcctaaaagtacttataaaaaggctatttgtgtctagtggaaataaaatactcagcattctgaatctacatcgacaaagaaacagtatcaagaatttgttatatactgctaagagactaagtaagtaccttgaaagtcaactgaaactaagcgaggagtataagaaacagtgccctgcacatttgaacagaaaaaaataagcaagacaatacaataatcatagtgaattctgaaaagtaaatcaataatcatgccattatctcaatgaaacacaaccccattaaagaaaatgacctgaaaatgttgatcttaaaaaagagaaggaaaaaagtatctcacctcatgtgtctcaccagtacggtacagcacatccatgtttaaattttgattactgaaggcttgatcagcatgagggtccaaagccaacccaagtaattcatccttcatcattgaacacatattagtttagacatgtaagccctaatcatatactaatctatgatcttaacaagaacaattatagcttcaaatttcttaaaaaataagaaaactaatatcttaattcctctacttattttgggataactaagctagttccaaaatctgacccagcaaaataatatgagcaaaaccagctcaatggcaaataaatcacttcgatatataccaatcccaactgagcccaacagttaagaaagtttaaaaaacaatcatttcttctctaattctttaattgggaagaaagtaaaaaagacttacaaatgaaaattagtttacctgaaagttccagaaatgggagccaacaaagtttgcgaagcctccaacttgaagagtgacgatttctctcatacttgaaaacccaaaatggagctctagagtagggtttaagtaccaaccttcaacttcaagggtttaagcttcggaagagcagagaagccataaaaatgtaggcaaatgaaaccatctacagagcgaatcgacccgagcaagaagagtgagtaaaagccattttgttagctttgagttacctaatcttcccaatatccaaaactaagtaaatccacaaaagccaatattaaatttatcattcgtcttatcgatatcttacaagagattcaacaagtaatgtaaaaaaaaggtgttcattggatcacatctaatggatttggacccatcccatccgatccgatccaattatttattggatattgga

SEQ ID NO: 379189 - DNA, 3111 bp, Cannabis indica
agaggagaatactcaatatactcattggttcatcaaaatggctggccaatataatgcttgtttcatcacatttgtgtatggttacaacactcatgaggaaaggaaacaactttggagtaatctcttaaagttaaaattcacagttaaaccgtggcttattgcatgagattttaatgctctttttgatttggaggatagagaaggaggcaatgtagtggcgcttagtgatattcagaatgcttgtttatggcttgctcagaaccaccttaaatccatgctcaagactggctctaagttcacttggactaataatcaagagggcataaaaggatttattccaagatcgaccatatatttatgaatgaggattggaatgacaactttccaaactctaaagctcactatagctgggaaacaatatcataccactgtgcttatgagggttcggtcaaggtgagtgaaaaaattagagttaaaccttttaggtacttcaatttctgggcttatcatcgtgaattcaaaaatgtggttatggaaagttggaacaaacctttgagatgtacagggatgacggctctttacttcaaacttgttcgtcttaaacattgtttcaagagattcaataatcatgttataggtgatattgggaaggaatatgaggcaacaaaggatatattaatagtatcaaagatgaattcacaagctgatccaaggaacctagtgttacaacagcagtaaaaggaggctacagagagatatagcatggatgaaaacatgtatcatagcttcttgcatcagcaaagcaaggttacttggctgaataagggagacggtaataatgtgtattttcatgggagcttgaagaagaggaaaatggagaacaagattgtctcttacactaatgaccaaggagaaagtattgatcattttcttaaagttgtagatcattttgttgctcattttaagggctacatgggaactcagagcaagcctttgaaaagtataaactatgatagcattactaatgaaactcggcttaatcttgatcaggaactaagcttgttgaagcctttcttgagcaaggagatcaaagaggctctctttagcattcctgactcaaaatctccggttcttgatggttatggagcaggtttttttaagcagatttggcctgaattgggacaagaaatctctaaggaaatcaaagaattctttgacacaagttatattttgaaggagtttcatgcgacaatgatatccttagttccgaaaaatagatagccctattaaagctgtggactataggcctatagcttgctgctcaacggtgtataaatgcatctccaaacttctttgttcgaggctagctcaggttcttcatgtcttagtccatcaaaatcaaggagcttttattaaggggatatcaattgctcataatgttatgattcttcaagatcttttgaagaattataatagaaggaatgtttcctctagatgtactatcaaagttgacataagcaaagcatatgacacggttaactggggatttcttgaaactctcctcacagcgtacaacttgccagctaggttcattacttgagtgatgacttgtgttagagctactacctactctatcatgatgaattgtagagtccaaggaagcttcaaatgtgaaaaaggtctcaggcaaggtgacccttcatccccctgttgtttgtattaatcatggaatatctcataagaagactactattagctgccaataactctgcttataggtaccatccgatgtgaaaaggattgaatattataattctttgctttgctgatgatctcatgttgtttagcaaaggcaacaagcaatcagttcaggtccttaaagagattcttgatcctttaaggcctaccaaatggaaagctgaagactgtggaggaatcataaagaagattaagcagagactttttacttgggaaagtagacatctctcctttgcaggtagagctcaatggatttcattttagattacttggacttcgtaattactggatgagcatattcattcctcccgcatagtgttacaaaggagattcaaaagctttgcagaagtttttctttggggcctaaatggcaatagaagcaagatacatgtggcttcttgggaaaaagtttgtcttcccaaaacttatgggggtttgggattcaaagatgaaatcaagctaatctttccaaatacatttgggccatttcagccaaaagagatattccttgggtgaaagagatcaataatgtgcatttaaagaatgcttccatttggtcctatgaactgaagcttgattcaagttggtattggaagaaattatgtcacttgagggataaattctcaaacagggacataatggcagctggagcaggtgggaaatttaggacaaactggttgtacaacagtttaattcctcagcagcagtttcactacagcagtagcatatggagttctttaaatgtgcccaagcattgattcattctttggcaagtcatgaatattcaactcttaactcgttataagctcgaacaatttaacattgaattggacactaaggagtgtcgtgcgggttgacagaacgaatctcagcagcatctttttttaactcgattctgttgcgaagaattgctgatctggtgtttgattagattggcattagattttggcctacacactttgaaggatggagaagttggcttgcctagaattcaacgagcaggaagcagagaattaatgtcgttattttggctgctgtgatctatagtttatgaatcaatagaaatagatgcatatacaacttttactcttattcggctagagcaattgtaaatgaagtgaagaaagttgtcttgtttagattacaatacttaaaaaatagaaagttgaaagattatgagagagtttacatagagaggatttgttagtgagccggttgtggccttcatgttcaggttggtttgttagttgtaactaggggtgggcatccgatccaatctaacctttttttcctcatccgatccaatccaattagtaattggatttggaaaatcatcatccgatccaatccaat

SEQ ID NO: 379190 - DNA, 4186 bp, Cannabis indica
agaggtttttctgtgattatgttgacctttcttctggtactcattatttatcaaatattacaaatattataatttaatcttatttttaccgtataacagagttgtggttaaatgttcacatgctcagctaatgaatttagcaacaataaaactttatctataatttctatatcttaacttcgtaaatttgtcaaagttttgataaatttatctacatgttcaatcataaaggtactatttttaagtcggttagtctttttttaacagatatattagatactaaatgtaacatgtcaatttttaattgatctaaatcataattttaattaaaataatttagaataaaaaaaatctaaaaaaattattttaaaatcataaaattattttttttcatgtaacttcacaaaacaaaaagaaattcaattaggaaaaaccaaacacccacctgactctcaccccaccctcattctcagccacggtcgtcttttccagaaaacaataaaatccaaaccctgatcttaatccactacattgggaaaaatcaaaccatacataaattcaaatatgtcttcatcttggctaaccaaatctctgtttaggagctctgatcataccaagggagagagacaaaagatgatttgggttttaatgatatccattaacattgttggaaaagaaccgatcaagagtaatagaactagagaggtttcaacagacgagggtgctgctagtgagagctgattctctcatcgaacacgggctctgggaacaatgtcagcaaaaactcgagtttagatctaagcatggtgcaatatggattttatgcaggtttgatggaatgatgataatgagagagtgaggtgagggaatagtaagagaaatttaggtctgagtatttttttatgcaagcatagtttttgggtatgaatatttttttaggcatgcaaggtaaaagactgaagaagaaaaaaaaatatttttttataattttaaattactttttttttaattttaaattatttttcattaaaattataatttggattaataaaaaattaacatgtgacattttattagcatctaacgaatcaattagaaaaatgactaataaacttacgaaaaaataatcttaaaaactattaaaccgtcaatttacaagattaaagacttatctgcatcaaacataagttttacttatgctacaatttttgtttcacagcaagtgaagttaacttgaaagttttaatgcaatgatttcttaggatttcacaatatagtgattttttatcagcaagtgctgaaagttttaaataattttatcactatatatattttaaataaaagaggtgttatgcaacaacacaaatactgtaaatacaaataaagtctcttttattgaacctaaaaggcacaccaaacaattgagaattgacaatgctaaaacaagtcttgattgaggaacaccatgggaaagaacaagaaagcactaatattcttaattaggtcttatatattatcttatacataattaacaagtcctttgtctaagtcctatagctaattaaagcacttacagcagcagggttgatttgccgagaaatggtagcgtttagcaaagtgttatctgtatcggtttctttggtaaccaattcaaagagacaagaatctccaggctgcaaatggttctcctttacaaatttaggccatccaccacaaaaaaacagtccacctgaaccaccagacaaattaacaccccacaatttcttcccaacctgtattgttacagctcctggctttccttgtagaaaattatttgagatatacagcggaatacgctgcagtaatttcaaatacaacaagataaacagaagaattaaagtgagaaaagagagaccatgccaatatttgtataattaagcatatgtatgataatgtttgcagtgctttttaaactgaacgtcttgtcatgattacctttaattttccagcagactgccctaatataatttcgaaattgggattagattgtttaacggttgctccttcagaaaatttgccaccccttgaagatgaaaacgcgccttgagttacctggtcgcttgtgtgatctttagatttggcgccaagcttcacatttccttcaatatatcatacaaacaaagaataatattagaatagtaaaatgaattcttttcttctgatgaactttggtgtccatcccctgtttgttgttgcgactaaccttcggattgttggttgttttgatcacacagtcttgctctgttgatggaaactttgaacatcatttcatttttattagtcagttcaaatgtacaaacatcgctcagtttcaagcaattttccacggcaaattcccgccaacatcttatcgagattacagctcttggtgagccatttctagcttttatctgaagtttcccaagccaagttctcccattatgaggaacatatagagtaatatcaagatcagatttttcaccgacattttctctccaaaattctgctggtagggcctgaaaccaattaaaaaaaagtaagtgaaaaagaagtacaaattgagggaaagaaaagaaaagtggttaagaaccagttcaaaggccaaattttaccaactcatatcgatcatgcagatgcatcttctttaagacaatcttaaaatatgggtattgggatgttaagtttgtcatcctaaataaagcttcatctttttcttctacagtcatcgatctaaaatgttcttctactctactaccaccctttttggcaagagccttaagcattcctgtatacataaggaaacgataataatgaacaagaaaacataatgttaattaagcactaacatgtaattatacataaaacaaaacaaacctgttttgttgacagattcaacacactctgaatctcccatgttcacttgatccttaggtggtggtgctgctgctgctgcgtactcgtcatcatcattgtcactactaacaaaaagctcttttttccttctcttgggcgaagaaaatggtggtgcaagtttctcctttctttttctgttaaggttttcatgagagtcaaactcttcatcttcttcttgagctacaataatattggtgggatttaaggtaccatcagaatgtttggaagtagtaataactacagcaggatagcatatctctgaaccatttacatcgattatgaccacatgaaatctagattgaccttcatatctaaaaaacaaggaatatccacgttctatggagtaatgccttgcaaagcttggccaaccttcacccagccaaatatggccatcacatttggtcaatttcattttccatgctccaccaccagggactttcaccactattggctttgatgtatcaatattactaccatattttaccataaactctttgggaattttctgtagtgcaaaatgagaaatgttagctttaatttagtaagaaaaaaaaagctaaaaagtaaaaacaacaagggcaatgagagaacttacaagtttattgtcaaaaagagaatcttgtaagatcatcctatgaaaatgaggagtatcaggacagaagttggtagattccattgttggattgttgattaacaaaactccttgcttattctctacatcattaattataaatagatacagaacaaaacttaagtcaaacataaatccacatcacccttttgatgccaaacataagaggatttgttttccctcaataattttccaaaatgttttataggtaaagtgcatacataataacatttcttctatgaaatggggtaagtttgttttatagttgatgaacattaaaactactaccataaatataagttgaaaatagcttcaagttgggaaatttgtttgtatattacaacaaagctatacaatcacttgtttttttagtatccaacttgtagttacaatcccaaatcaggcacttacataccctcacatatacaaaaatcataaaactaaaccccagttgtcaaaaaagggaaaaaaaatcataccttttcatcggtcctgtttgtgaaggagcacgatttcggcttcaggggtctttggggttgctacgaggggagacggtggtgctcgtcattaaagccggagagagagagagagagagagagagagagagagagagagagagtggag

SEQ ID NO: 379191 - DNA, 2416 bp, Cannabis indica
tgtgggactctctaacaataattggcttcctatcaaaaaagagataaccaccatttaggacagcatctctttgtttctctaattgaaacctaatgaggtaaacaccttgatgtatcatccccaccttatcaatccccctgcttttccaaaatcttttgcaaaatccctccatcacagataatggcggattcgccccaagcacataacacactaaagaagaaacccaataagtaacctcttcttcaatgttttctctctcaatttttactttcactccactagcactacctttctcccccataacaggaccatcaaatttaagaataggcaatggagatcgacacccacagctttccttttttgatggtcctccaatctgagaagtcattgcggatcgattgctttctctgttccagctctaattccttcagcaaagcatcatcaatctctacttgtgcctcttctaattgctccagagttgcctttgcatcatcttatttatcagaatttgagaattccattgcattgtagcttaaaatctctgctaatgccctcgtcttctttacttgatctgaagactgaggcccttcgcctttccagatgttttggatcctttacgaggatgcctcttccctaccatggccagccacttctggagaggagaatccctaatttgatctcagaagtttgccctagcagagccttgccactctttctattagagacttttattattattattattattattatttattactttatatgatgtacctttgttcatttggttgtacagcgtatttgtaccaaaaaaaaaagtatataaattaaaaacaataggagcacatgcttgcatgtgtttcacaactagcatatattaaaataaaaataaaaataacaatgcagatcaacggattaccttaattagctagccattttttcaagtttgaaattgtacaattgacaattcagtcaatattcaagttcaacacagataatcttttatctctcgatcttttctaaacgagttactcatatcatatatttttttaattaataaataaaggaaagaaagaaaaaaaaacgcatatatatatatgataaaatttgtccaaaatgatattaaaataaattatatatagatatatagatttctcaaaacaaaagtttttattattacgtaccaatcgcatagagtaatgattgttctaaagcaccagcacctgcaacaaagatcaacatatatataaattagaaaaatatatttatattaaccataattgttataaataaaattatatagaacaatacctcgaaataaatcaaccgcgctccaaactgtaacatcatccaataacttattaattagaactctcataataaataaatctataaaaataaaaataagaacaacttaataataataataataattaccatttttacatcgcatcatgttgtaaaaatcgatgtggcatcgatttagttttccgttcacgaaatttatattcaaccacgaaagctcaaagccatgaacaaggtggttgtgaatatccaaataagaagtactattattcctatctccattcaccaccgtccgatctgatataaaagcccttagtaccgtacgacacccgatcgccaaatcagaaactttaaactcaccatcgaccaaataataattattattattgcaaggagaggtgtttatgtaatcagaagaattatttactgtctcatccgtacatttcacaaatactataatctttgactcttgtttcaacaaagagctgtaaggattggaaaattcaaacatagaatttgctggagaaggaagggaggagcaattgttcttctcaagattggattcggatatccgaatagtataattcccataattgattgaccgtacaaagaattttacagaacctatgtataatacagtaagattgctttcacaagaaagctcgaattctgagtagccacagtgttttggatcggtgttgagtcggaaaggagtggttatgttgatgatatgattattagcacaagaagaaggtgagcaataagggtttgaatttgcttgtgtagttatgataataattaggaacaggaatctgaaggggatcgtaaagtaataaagaagggcagccatggaaactgttttgtagtttagagaattaaggggaactcttttctcccattttacaattggtacgggaaagagagagcttctttacattactagctagtattataaagtctattgtgatcttagtcaatcgaaatatttctatagctatatttaaatattaattttaatttatttatttaattaaaaaatatatcaaacaatatctctttttaaactatatcaaaaatatgtttatatgttagagattttataacaatggaa

SEQ ID NO: 379192 - DNA, 7765 bp, Cannabis indica
tttcacggcttttccatctttttcttctccagttatgtccatcctttctaaagtatcttaaaacattaccgatcaaaacagaaaaagtagaaccgacctagtgaggtggaaatatatgtcaatatgatatccttttaagtggaaatacgttcaaaagaagcatacatgaatgtttagataaatcttgaaagtgaacatactatgtcattaattctaaaaaggataagttttaacatatgtaatatgatataataagactccctttcataggtatgcacgggataagacaattggattggacaagcccaatgcataaagccaagcatgaaatatatatttttttttacaaagaacaagcctatgaaattaaagagggaataacaagttcacgctgtcccgctacaaggattttaaactcagtacaacttgctttggcacctaacacatgacccctgaaggtagatataaaaatgtttattttctacggaaaataagcattttgatgataaaatacaatttcagagcatatgtatctcaaaattgtcttgaagacaaagaatataggagcttaaaacaatacaattgtcttgaatttatagtgtaactacctaacacatgccttgaaggtaaatatccaaaaaatttaaattcttattttaaataggaaaagcattttgctactaaaatacaattttattgtttctatctagggtccccacctaaccctacaatatttggggactacaaaactaaaattgctatgtaggtatctaggaggtctcaaacaagacctccatgtatgagcaaaccacatgcctaactatttgagctaccactcttgggtttaatacaataaaatgttttatgaacagatagatttaaaaggtcttgaaaacaaataatagagcacttcaatctagaagaagtttgattgaggaaattatataaaactagaggaaataaagaatctgctatcaaattatactacgaaactataaatgtatgaacttaatttctaaatatatattacagaaattgctatagcaattgctaaataatctgctataataattacagcaatttctctgctataacaacagctatgtaggtatctagagggtctcaaacaagacctcaatgtgagaacaaaccacatgcctagctacttccactcttgggtttaataaaataatatattttgagggcacatggatttaaaggtcttgaaaacaaataatagagcaattcaagctaatagaagtttgattgaggaaattatattgaattagagcaagtaaataacctgctatcaaattatcgcccacgaaactattgatgtatgaacttaatttctaaatatatattacagcaatatgaaatcaaaattcaggaagagctatcatcaaaacaagcatatggaggtcatggtccttgctattctatgggcagtgtgtttggagtataaaaatgaaattaaagcatactctttctcaatgcttttgtgttgactggtggctatattatgatagatcataaattttgtgacagctacttatatactctataagatgtttagaattataaagcctcttgtgggactgctaagaagataacgaatcatgctcatctattattcatataataaatatcagctaacataatggtttgcaatgttaacagaaacacttataacaccaatccctatgacgaactgataaatgaaaattactttcgtgaatgttggggaaagaaaataaattcatacttggtggcctgcttgggggctctggtgaaatacgaaaagtttgatggttacgaagaatttcacaaatttcagctggtcgcaaccaacgatgttgtgcctcagataataattgttgaatgtctgcatataaagaatcaagaaatctcattaatagagagaacgatgacaatagaggcatcagtatcaggaaagccgccaagaaggaaccaccactaaacgtttgtcttttcttacaaccgtggtagttcatttttattaattagcattgagcaacaaaatgttacatatccttataaaatatgatagttctaaattctattagaaacaaatttcacaaatactttattgtactcaaactactcttagccttttcatttcatcaacaacgggaaagaacttagctttctcccaaaaacctcaattcacattaacgttagttaatatgatctaaaaaagattaacacacactctattttaaggatgggcattatgtgtaaatgttgagatagtaatagatttcaatcatagtagtccagtgaccaacaaaacagagttcaatacagcgcacttatttttccttgaccaatagccattgttctccaatactcaatcatagcctcaccctttttgttttctctctcttccccctacttggagaacttcctgttacctaccatttatgaccaaaaaaaaaaactcacaaaagcctaccaagaactagtaaaaccctactccaaaatccaccattcaattataaggtgaactaaaaacctttctgctaaaatcagctaaaaaaaaacactaaatccaagtctcaacctcagctccacaaaaccatttccacaatttccaacctcacagccccacaaaattccacaaatcctaaaatcgcaataaatctttcaataaattaataagttaaaacattagaagcgaacaaattattaaaaatctgacctaatcgagggctgataccgtacgatccgcgctccgccatgcgaagagaagagagagaaatcacaacaaagtgaatcagagaaacaaaaataaaaagatggaaggaaagaaaagcttgacgcggatgaactgtaaaagaggagagagagtgtgaaagagaaagagagagctttcgcagagacttcgtcgccactagatgtaatgacgtcagacgaagaattacaggtttgacctgaaatcattcgttcctatatgtctttttctttcatttatatttattttaattttttgagaaaaaaaaagttgttttaacgtttatctttggatattaatgaaaaatttattgttgaaaatgagtgttattgttttatttttcatttttagctttttttttttaatcaaaataattaattaatgtttaggtaagtaggctgatgtattttaattatatttgtataattttttaattttgacatgagtgaaaagtcaattttggagtgatggaaagtttgtggtgtgggtttggagcccactaaatagtttagaagaaaaaagagagagaacttcttcaaacaccaaacaaaacacaacagaattggcttatggatattaatgcttcttggcattaatagcctaacaagcaagagagagaaaatctctattccaaatagcactaacactataattaagtgtgtacttaacaacactaattggcttatcaacattaatgatgcttatcggcactaatagccaaagaagtaacagagagaaaatccatattccaaataacactcactatattatcaagtgtgtttttgactagttatgagcaaggtaaagaaatagattagtaagttaccttgtcatttgataaagaaattgctctagcattatggttatgtttgttagcactgaaatcagtgacagttaggatggttattatactgttagagagttagtttgtacagctgtatagtttttgtttctgttattttctgttatgaatattgtatttatactaagagctttggctcagatcaatgtacagaaatcattgcattcaatctctttctctgttgattctctctttcgattctctctgttcttacatggtatcagagttgttcatactcaaaattttttgcttccgcatcatctgttcttggcagtaattctgctctttcttcttcatcatgtcaaatttgtctgcatcaactggttcgactctagcaacaacgttccacccagtggttttttctcacaagatttctgtcaaattggataacaacaactttcttctatggcgtcctcaagtgctctctgccattagaggccatcaactttcagattacatatcatcctcttttcaaccacctcagaagtttctttctgatcatgatcgactcactcacactgtcaatcctcactatgctcaatgggaacagcaggatcaactccgctattcctggcttctttcgtctatgactgagggagttttgactcgtgttgttggcagtgaaacctctgctcaagtttggcaaactcttgaggtatatttctccacttaaacttcagctaaaattgatcaattcactaatcaattgcagacaatgaagaaaggttccttatcaatcaatgagtatcttcttcggatcaaaactgttgtggatcatcttggatccgttggacatcttgttactgtaaaagaacatatagcagccattttgaaaggtcttccagctgaatatgatacatttgtcatctctgtgaattctcgcacacaaccttacaacgttgctgagattgaattgatgttactctctcaagaacacagaatggagactcatcatcgcgatcttgattctgctaatcttgctacgaatcgtcattccaggggacgtagtaatggatctggatctggtaatgctttctttcctcaatctggatttgatttcaaaactaataatagttcatctccgtctcgtggtggccgtacaatgtggaatccttatgccgtgagtccgagaggtactagttcgtcaacacctggtttttgtggtcctccaccatcgttgcaaacttttgtacctccttcagcatcaaatactccaggttcaagacctgtttgtcagttgtgttctaaaccaggtcatatagcagctcgctcctatcaaagattcaactttgattttccctggggttggtgctgctaatgttgaacaatatgctgctcacattgctacatcagaaactgttgcagatccggcatggtaccctgattctggtgcaaccagtcattgtactgcaaatgaaaccaatttcacccaaaaagaaccctactttggtcctgaacagattcatatgggagatggggctggtcttgacattcatcatgttggtaagaagctttttcacactcctactcatctaaaactcttaccctcaataatatgcttcatgttcccaaaatcaccaaaaatcttatcagtgtagctcagtttactaatgataataatgccttgtttgaattctatcctgatcactgtgttgtcaaggatctggagtccaagcagccactcatggaagggcattttagtcatggactgtatgtcattcctcccactcaacttcagtcagccagttctacacttgttccaccagttgtctctttttctgtcaataatgctcaaatgagcaattataataagtctatgtccacttttagtctgtggcataatcgattagctcacccttctgctagaattgttaagcagattatgtctctatgtaacatttgtggaagtaataaaacttttgctgatttctgtgatgcttgttgcaaaggcaaaatacacaagttcccttttcctatttcacacagtgagtacactcaaccacttcaactcattcatagtgatttatggggaccatctcctattccctcctctagtggatataggtattacatacattttattgatgcctatagtcggtatacatgggtttttcttttaaaaacaaagtctgaagctattcagacctttgttaatttcaaaactcaggttgagaaggagtttgaatgctctattaaagctctccaatctgattggggaggtgattatcaagcatttcaatcttatcttcttaacaatggcatctcacataggctgtcgtgtcctactacccatgagcaaaacggtattgctgagagaaagcatcgacaccttatagaatctgccctcactcttcttgctcattcctctatgcctctatctttttgggatgaggcagtgagagcctctgcctttactataaaccgacttcctacaccaattttacaacataaaactcctctcactcttctatataacaaacaacccgactatactcaattgagagtgtttggatgtgcttgttaccccaatattagaccttacaacaaaaataaacttgaatatagatctgtcatgtgtacttttctggggtatagcaacaagcataagggatataaatgcatgtctccaactggtagaatttatatatcaagagatgttctttttaatgaacatttctttcccttcagtgtgcagtctaccagtaattctcctccctcaattctcactggtacttgttccagtggagtgtcagcttctatccctcattctactacctgtttcttcatctggtgtgtttattttagatgaatccactacatcttcacctcctgccacagagacttctatccttaatccacctctcaccaccatcaacccgagtcctctgccacaacctgctgcttcaattgatgcagctcctcctattctcacacctccagcccctaaccaccccatggttactagggccaaggctagcatctctaaacccaaggtgttactcactacttctgaaccaaaaagctacaagttagctctcttgcatccttaatggaacaaggccatgaattgtgaaatgtttgctctaaagaaaaatggaacttggactcttgttcctcttccacctggtaagagagctatcacttgtaaatgggtttttaaagagaaacttaaccctgatggcagcattgaaaaatacaaagctaggcttgttgcaaaaggcttcttgcaacaatatggctttgacttcactgagacttttagccctgtggttaagccagccaccatcaagattgtcttaaacattgccttatcttacaagtggatcataagacaacttgatgtgaataatgctttcttgaatggggaacttcaagaagaggtttatatggtccaacctcctggctttattgacagcaagaatcctcatttagtttgcaagttacacaaggcaatttatgggttaaggcaggctcctcgtgcttggtttgataaattgaagaatgttctgctctcttttgggttcacttgtgccaaatctgatccatctctcttctttaggcacactaatgctcattccacatttctattggtgtatgtggatgacattgtggtcacgggtagctcttctactgctgtttcctctttaattcaacagctgcatcagacctttgccttcaaagatcttggtctgttgcattattttcttggtatcgaggttgctcacactacaaagggattgcacttatgtcagaaaaaatatatgcttgatcttttggttaaggctaagatggacaatgcaaactctttacctactccaatgccaggaggagaaaagctatctgctcactatggagacccttatctagacccccatttttaccgcagcattgtaggtgccctccaatatgctaccattacaagaccagagatatcttatgctgtgaacaaagtctctcagttcatgcagacaccactcgagacacattggaagagtgtaaagaagattctccgatatctctctggctcaattgaccttggtttgcacctcaaatctgcttccactcttaccttgacagggttttgtgatgctgattgggcttagatctactcacaagtatgtttattaacatcctaaataagaactttc

SEQ ID NO: 379193 - DNA, 1935 bp, Cannabis indica
ttattataatttagtgcatttttgaagcagggagttttgagtggcattgagctgaaacttgtatcaatttccccttagttattcctacactccttatttgaactgaaatttctgttcttgttcattctgtagtttttcacactactttgctctgtgttcaatatagtaatctgggaagaattacatttgactggattacttatctcctaacaaagttgcaattattgcattgtaaaagttttgacttttgagtggtcccttatatcatgatatcgaaactgggatttgtattacttttctatacatacgtacacttatttttgctcttatagtgtgtagggttggtaaggtatggcatgtaatcttgaagaatatgatgatgtttccatatggccgcctcaagttgaaagatatttcatcgccttgttgcttaaggaatctaagaaaagtttacatacttccaccctagatagaaaaacgtggaaagccatagacaatgatttgttctcgaatttcggaaggagatatgaccttgcgaagttgaaatcaaagttcaatcgattgagaaagatgcatcgtgagttctcaagtatcttgtcccaaactggtgctgaatatgatcctgaaactaatcttattcgtgctgatgatgatttttgggatgcctacttgaaagtaatgctaatgtgcctcagttactttttgtcatttgtttttatagtctgtttagctggaaaatattgattgcatcggttttgatttgcagagacaccctggtgcaaagcggtatcaaaggaaaggatgtgctcattacaagttgcttgatcaaatcttcaagactctatccacaacaaaccgacctccaccctatgcagcaacccattccccatcaaaatctgaggatgagcagcgggtagaagaacctgaaactgtagcagatgattttgagccaaatgccaacgttgctgataccaatgagtctgggacttctgctactgttgcacgttgtcaagctattcatcctcttgaaaatgttcggccaacaaaacaatataggacctcagagcatttaggggcggataacatacacgggggatggaccaacaatgtgagttctaaaatcgaagtaactttggggccatttgaccgagttcataggagtagtgagatgtcatcagattatgatccatactctgtaactgagtgcatggatatattggaatccattccaaatgtggcgaatgcttcttacttgaaggcaatggatagatttttgattcccgagtggagacaaatgtttgtcaagatgtcagagggaagacgatgtatgtggttggagagtttgaaaagctaatcagtactcttacctaggagactaatgagatatggtttctactattttgtatattcgtaattagaagaacagctatggttggatcatctgccatgtcgtcaatcgagttgtaaatgttggctggacaaacttctaagatcttattagttggtgttgatgtacttcaacacaattatgcaactaattttttttctgtagcattattctaacttgtgaagtgtaatgactcaactaaatttggttggggagtttgtgtaaagtgtaaccaagtgatggggaggtgtaaaaagcattgagagattttctaagttagcagtgacccatgaatcttcattgaactcattcttacaagaaaattcatttatgttataatgtagtaatgatattgtcttatcatgctctccccttaaaaatgtgtattatatgtgttagatattagatgtatattagctgtaaaagaattagatatttagtagatatttagtctcctagctttgtatataaatatgtattattctatgaaatcgatacacaattcgaatcactattttctacatggtatcagagcattgtgattcaaa

SEQ ID NO: 379194 - DNA, 3040 bp, Cannabis indica
cagaacatcatagaaggggcataattatgtaactgttatattttaaagaaaatttttaacaagtcgtatatctttagggataaaattaggtagtgccgaaaatttaggggtaaaaatactaattatttattttaaaaaaaaaaaaaaaaattgtgttgagttatgaggctaggatcctaggtaaggagttcgaggtcaggtataaggaatgaatttagttcgagttcgggaggtggacttgagtccaagtcggggtcaggttcagaagccagagcagggtccagggtcatatttatgcatgagtgtgacatatatataggtttttttttgaaaatatgattgcatgttacaatagtacaaaacatactaatgaatattcctaaatttatttacaaatttcaactcatcacaagtattcatattcatgaggaataaaaaaaatgcctaaaagatatcagtggtgctagacactacctatatcgatatttgagtctcacataatttaatataataatttttatgaaatatcactaactatttttaagacatttttcatagtggtattaaatactactaatgtctactaacaatcgctatttgctaccaaaaacgtgtaactcctttataatgaataggtaggattggtacaacaataccacacatttttttttttggaatcattgaacaacatactatcactatttaaaaaagagatattattagaatgcggaagtgtatgattaaggtagtagaataggtgagtataaaataaggtgcatgatttcatctcaaaatcaattgacaataaaaaatagtccatacatatatataatttcaaggtattattaaatgtgaaattctctaacacatattaccatctgaataaatataaggacaaaagtcataatagttcataaactttttgtaaacatatatgtcattttcttgtaactgtcacctatgacctccatatgtcaaaaatactaaaatccttccaaatttatgctttttgaaaagtacatcatcaatatgaattacaaaaattcaacagatcaatcgatacacgtttcatgcttgcttgcgcctctcacatgttttctatttctagtaattttatgtacacaaaataggaataaaaaaaaaaataaaagcaaaaaagaaagaaagaatgaatgttatgaagatggataagaagaaaccaagtgagaaggaatacatttagaactcttccaaactctagaatgcaacttgagaatctctttagctttctccttagtcttcaaattattctcaacttgtaaaaccaagcacaactttgccacaatgcccacttgaagcatctcttgaagaaccctacaagtagctgagaatctacaaactgaagaaagtattctcactgctctatcactcgccacgtgcgaaacccgagaatctcttcgaaaccaccgccatcccccgcgcccatgtcgcaacagctcggcccggccctcagcacagctgcagagctgatccaaaaccacaagtgcagctcacaaacacgcttttccggggcatcaagaagaatctcaatcaaaaccgaaaccgccccgccttctaccgccttgatccggttcctaccccatggacagatctccattaggagcttcaaactagccttggacgcctgttgtgatatcccatctcttaaaacgctcacaacctccttgaacagttgggatccaatgctcatgattcgaatcggatcaaccaaatcaagaatcgatttgagtaaaactactgcattagctctcgattgttggttcccacatttcaaaacactcaccaacgaatcaacaatgtcagtagaactatcgttcgttacaagatgttttaataatgtgtgagagcttttgataacgagaaggaaaagaagatcgacggcggcttctgttaccgccatcgaatcggttcgattcttaactaagaaagctaagaattgtaccgttcctgctgcctctaaacactgcttgttcctttcgctttgagaggcaatggttttgaggttttggaggcatttgagttgtgaatttggggtgtttttggcttctttaaggagtttaaggatttgggatttatcgattggtgattttggggttggaattcgttctatgccgtatgatgcgttgaaagtgcaccatgattggatcaaacggcggagagtgtggttgggagtgagaattagatcttgatcgatgagaggctgtttggttacagggcaagtgttgttgttgcatgagaatagccaatgctcaatgttttgtcgatcgtaggtgatccctgttgaaacggtgactggatctctcatgagttggaatgaaatggggcaaagaaaatccgatggaatttcaacttcaacttcaaattcatccattattggtcttcctagttttgaattgtaaggaacagttatgttgaagattgaaatatatattatgaaggaataaggtaaaccatagttcaagttgttggaaacgataaagtcaacacacggaaattgagaggtagatagaaattaattaatagaaatgtgaattaattaattataagggaatagctttggaagaagaagaagatggggaagcttaattcgaggacttttcattattcaatattaaattaaatgaaacaaagaaataaagagatgtaattggggtcagcgtcggtgttgcaaagcctcctttataaatatatatatcttcgtatttcattggaccatgttgactttgattcttattctattgaacctattaatcatatttgttaaagatcaaacattgtattgcttccttcttccttcctttaataatctacaaattaaaatacgacatacgtggttccatagttggatggtgttttagaatttaggataaggtgaatgaagtttcatttcaaaattaattggcaatgggaagagtaacccattcttcttatgtattctattatatttccacacattaacaataggaatgtcaatggggcgggtcggatctgatctgactat

SEQ ID NO: 379195 - DNA, 1884 bp, Cannabis indica
tttttatttttttgtcctaaaatttactttgtaggctcccgcttcaagtctttattggacatccccatgaactaatgactatatacataggtatgttactttaactgttttctggattgacaattggccttgcaaaccaacatgagtatttccaacatgttttgtcctcgctcgcacgttttctaagaaaatttataggaggtcacccatcctaagattattctaggttaagcacgctcaactttggatcagttcttaagtaataggtcaccaaaaaataaaatggaccttgtttatataggtagtactcatcaatccatttaagccctcctcagctgtatactcttataactatacagtctcagaatcatcacacacacactactaaataatatgggattgcataacttacatgatatttccccttccagatcatgaaactattgactatcacaactttcttttttcattttagtatgacctatttatatataacttgtattagggaaaagaatgttttgaggttgtttaatttctaataaatttagcttttaagagttttttttaaggaaaatagtatttatggctaattagaatctgagacataatggaggacacattcatggtatgttgtcctaaccatttaaagattagggtaatttcgtctaattagatacttttttattaaagaattgaaaataataataaaaactctaatttcctagtctaccttagtaaaaattacacacactagtaggatcctcttcttctttctcttttttcacgagaaataccttgtagagcaaaaatttactttgataaaaacttttaatgacagaacaaaattcaacctaaaattaagttattttttttatcatcattcatatttttaatcacataattataatttcacatttacaatgtttgcttatcatcaaaactcccatcaaattaaataagataacttaatattttcttaaaatcaatgcattttcttttgacattggagaataggaaatctacaaaatttctttgtaaaaaaaacatatatatatatatatatatatttatatagtgccactcaaaatttggcatcaaactcaacttaacaaaatcgtcttgttaaattgttctcgctttattaagatcattactaaccaatgtgaaactttactatgccccctcacgcgtagtatggaccatgtcaaataactattaacaaatcgatattatgggcacccaatattgtaaagttgggttacttttataccatattagaaaacttatttgacctaattcaacaaaattagcttattagggcaaaattgtcctaatcttattatatattaccaattaatgtaagactttaatagatatcattgatgaaaaaatgaagcattacaaaacaagcaacacaatgaaggtaaccaccaaatcttatgctcatcttccaccaagaattgatagtctcgacgacaagagagactaaattaatattactaattattctcaagatgcaactcatgatagtattattagagactcatgcataattggatattttttttaactaatagcatatttattagttttccttccaaaattgtttgatgataaaaaatgtgatagcatttaataaaaaaaaaaaataaaaaatagaaacaaaagaagacaccttttagttatttttcaataaattatatttgcatccactacaaaaaactgctacttttagtgacaactttttagtcacaacataatttttttatgactaaatgtgacttttagtgacaagaaaatgttacttgtgactaaaatatagtttttagttacaagttgtcactaatttagttttagtcacaacaagtattgtgactaaaaata

SEQ ID NO: 379196 - DNA, 4903 bp, Cannabis indica
actattagagctatttctgtacaacaataaaaaaggattatatattttcttccacattccattttagttattccccccacatttataaactgagaaaaaactacaagcaataagatcaaatataagatcagagttctcattcagtccaaaggttgtaaccggagatgatggaactgatggcaaaggcaccaaaagctaaaaaggacattcccactgaagcacttgccatctcagtgaactcatctttaccccagtttgattgccaatcatccacacgagtagctgccgatgatgatgccgacatcagaagatatgctaatatctatcattgtttgttcaaaaaaaacaagacagcaatcagtacaacaccaaaacttcataccaaacttgagaaagctaaccaaattcttcttattttacttcatgttacttgaaatgttgcactatcagataatactaaattggatagcaacacaagaagtcagagttgttatcaatttaagccaatattttagaagccagcaccaactcacaagctagagttcttacaaagacacaggtgagatttgagttatgtttaaactgtgaaatagatacacccattaacccttgttcaacccctaaattagaattggtctaaaatatgcagcctggatcaaacagcaatgaacctaaatcaaggatcaaggtccatggaaacatgcttaaaaaggacatgaagtacattgtctaacctctcctatagcatatcagattcacgtatgttaatcatacagccatagaagtaaactacttgcctgatccatgaaaaactcgaaatgacaacgaaggtggtggcggatcacgtgtttaccggttgcaaggtggtatgatagatcataggtttgaaatagggcatatgcaaatgcaataacattcacagataggcagtacctgtggacagaatgaaaaatcaaattcaatcaaattaggattgggattaggcttttcacagagtcaagttatttaaatgagaaaattcaaaagggggcaatgtccactgcaagtcattaattagtgggaaaagtcatcactcctaattcactcaatttaagaaggtgggcagcaattagttcttctctttattattataattaaacaaattctttaatatcgaaatcttgatgatggaaactaaaatttccatagtcaaatactaagtcataaaagtagatgacattaatgaatattttagccaaaagaaaagatttaaaaaggaaaatttcaaagatacaccagaatttatatatttatatagcccaataagttcaaatttggaaatatttctaacaaaagaggggagagaatatcactatatgttaatttgaatttggaaaatttgtatatgtatatacctgtattctttgtatcgatcaaaggagtcgccgctccagccttgagttttatcggcagccataacggagaacgaaattaagcagagaatggattcactcacccgaaaccctaaggcagcactcttcaacatatcctccttcttcgacctcctccccgtagaaggcgctaaatttgttcgcctaccaccgccgcttccattttcgcctccactggctccggtgacgggtcctaccttggcaaccgactgagtaggctcttccctcatcgctctattgatcaccgtcgtcggctgcacggtcgcattcggctgaggtttcttaagtgggtgattgatcacctgttgatgattatcagtagtggtagactgtcgcagcgagtgatgattatcctgatagtgattgaccttttcgacagggacgatggctttggagttatccggtagatttcccggagagtaatccggggactcgtagggcggactttcaggtggatcaccggcatccgatcgaagaggggagtggaatcggagaggcgagtggggcgagtccaattgagacgtgtcagagtttcttgatgaagatttcttcatggctcgtctggtttgttgggagtgattggtttgggtttgtgactccattgatttgatttgattttctcgaactttaatggaaaagaaaaagaggcgctgtttgggaaccgggaaaaaagaagaaaagaaaaagaggaagttccatgagtccttctttcacttggtggggaccactgcactacatgatgacgtggcactgattagtttttataactaaacctattttttattgccaactcactaaaatacttgacgtttagtccaattggtgtcgtggcagaattttattggtttatgggtgagaagatagaactactaactctataaaatccgagtaaagtatattgtgagattctttttctacttacaagttacaaatgaaaaaacaagagattcgagttttaattgtttattaaatttaaatcccaacctaaccaatttataacaaacaaggaataattgatcaaattatgaggcatctaatatttttgagtgatgagatagagtcttcttttataaattgtacgtagctatacaaatacaaattacattgttttacaatccaacatggtgtaataaaaatacaaattacagttagtagttatatattttttaacttatttgttttcaattttaaaaatgaaagagtccattgtaatatgtatctgtagatatgtaggattatatcatggcttaagtgtttaccatttgttttgtcaaataataggaatgagaaacaaataaattgatacctagagtttaaatttggttaaataattttttaataaattaatacttgagcttaatttttcaacaataacttcctatctagactaaacatcaatttaacaattgtcatcttgaaaaattatttgaccaatattaaattaagatatcaatttaatttatttacaaaatacatggtctaaattattattaaaaaaaatactagaatgagttatagtgactacacgacacatgcacggtaagagaaatcgtaattataaatacttgacgtgcatcccagactatattgtagataatagatatttactatagttccacatttttaagaaaaacacattataattctgtatcatttcaaagattatctaactacaaaatattattctttcaccatttttatggctactcaaatattcatcatattggcttaacaactaagactctcacagtcttagacaaaggctgcatggaagcaaaataatataaataaataaaaagcaagagaaacaaatttgagacataaatttatacatatatatacataaagcatataatcaaagtgtaaagctttgagtggaaactttatgaggtagctaaagtagtgttcttttggctttctttaagagtgcgctatccttttttaagttaaaggcaattattccattcaactttatcattttctttaccttcaactcattcttctttagttcctcatttcttccaaatgtctcaataatcaacaagacatgcacaaaacaaaatactcagcactagctaaatcttttctgtacagagtggaccttccaccaatccctaaacaccaccatgtgtcattacctaagacacctactctcttactgctcgtttggaacgtcgtattaaggcgtagtatattgtattatattgaattagattatgcatcatatttttatataataataccacatataattttacataaaaatattacataaaatacaatacaatacaatatgacctaatacggcgtttcaaacgagcccttagagaattgttaaaagacaccaatagtgtctagcaccctcatggcatcatcaatcacatactactattagtataattaagtatcggtctcatataacttaataaaattacttttagagaatattgctaactaatcgtatagtgtcacctatagaaagtgttcggcaccactagtacccaataataatactcattttattattctcaattttcaaatagtatatacctatataactaagaaaaacttcaaaaaaatcacttaagactaacttaagtggtcatataaagagtattagagtgtgtgtaaggggatcatgagaaaaaaaatttcaataatgtaactcaaatatgtaatttaaaaaatgcttctaaaaaaagactccaattcttattctttatttttttgataaataattcttattcttcattagttgtacatattttagtcttttactgtcacgctctactagtttaggcgcgccacaataaattctaaatcattgtgctaatatttgttaattaaaaggattagtaaaaaaaattaacaaaaactttcataataaatataaactttactaattatacactataaagtttataaactttgggatcctgaattgattttacaaacatttacaaaatataccaaaatgcattgtatcaataacatattactaactagaaaacacttgagcagaataatgagcatcctatcatctcactgtccggtttgtaatttagaagaagaatcgcatgatcatttgtttatggattgcatctatactaagaaaatagtagatgaaattggatcttggttgggtgagttttttttggccgagaaaacaggttagagcttattgtttggtgctcgaagtcgcaaattgggctaaaaaacaaagttattaatgcaattattgcttcaacgatttacttgatttggaaaaatagaaatagatgtgtcttttggggggttttaaattccaatgtaaaaaagggtgataagtatattctaaatgtaattgagggctagtagtgtatgtgtgtcatgttgagggcttttttcctttgttgttgttgcttcaactgttttgaataaaatattcttttgttcaaaaaaaaaaaaaacgagtcacccagtgactaataaaa

SEQ ID NO: 379197 - DNA, 2567 bp, Cannabis indica
attgtcttgatttcagttgtaccagtctagtggccacattcagagtcggccacagggtggaaaacaagctgtgtcgtatggaccttggggtggtactggggggatgttatttgacgatggagtgtatacaggagttcgagaaatccatatagcacgctctggtggtgttgtttccattaaagtttgctacgacatgaatggcagggccgtttggggaaacagaatggtggcaatggagggttcaggttggacaaggtcagactagattctacagagtgctattttatatatataagaaaccactgaaatataaatacgtagttgggctaacaacttttattgttggttgttgttttgtgatttaatgaataatgaatcagataactttcgattacccacatgagtacttgactcacataagtggatattacgggtcaatgatcttaagaggaccaacagtgattaaatccctgacttttttcaccaacaagaagaagtacggtccctttggggatgaacaaggaatacccttttcctctggccagaaagatggcattgtcgttggatttcatggtaaaaagggttggtttgtggatagcataggagtccatgttcttaatgtcgtagaggggaagtattcacaacctaggcctacttacgacatgaattccacattgaccaacatcagatatggtcatgaccaggtaaaacagaacatgttcttaataactatagtttacatttgaattataaaaacattttaacatattttattattatgaatttatcatgggaaggttgtttcatcgccggtgaaaggaccaattccgttaggtcaagggctgctgccagccatgatggtgaaagagccgacgggtggatgtggttcaggaccttggggtggggatggtggtaagacatgggacgatggagtcttcacagggattagaaagattttcttgacaaaaggagaagccattctctctattcaaatagagtatgatcgcaatggtcaatccatgtggtctgttaagcatggaaccaacaacgatggtagctgtcatgtggtacgtaatactaataatatatatctatatatatagtatattggtgtatatatattttaattataaaattaactaattaatggcatgtattgtagatccaatttgagtatccacaggaagtgttgagtggcataagtggatattatggaccggttatgggagacgcatgcaagattgtggtgaagtccttgactttctacaccaatagaggaaggtacggaccatttggggaggagatgggaacatatttcacttctccaagaaacgaaggcaagatagttgggttccatggaaagagtggggaccatctttatgccattggagctcatatgcagccctggtgccaggatcggtctgccgatcaccaaggacccatcaaaatgattctcaacaaaatcttcgcttaggaataatggatcctaccctatcttatatattgttaatttcgaaaactgtattgtatggtatttgcaaacaagtcatgacttccagtactacgtacaataatgtactcttaccctggaggaaaatgagtaaaataaggaaagaatcatctctatatataatgtaatgaagcagtatatatatatatggtttatatgggtatactgcgtggtatttctttcacacaactacttgtcagtattgttagaaatttataaagagcagacattactaattgatccatataatttagagagtattgcagaaacctatgaattgaatgatatagtctataagaacatatttaattgatccattgagataattgaagaaataatgaagattgttagtgcaaactccaaaggatctctttccactctacatctctaatacaggtaggggacctagcaataaaatcaacacttctacttcaattggattttacatagatattaaacccattaactatagatctaataattataggaaaattgatttttgttgaaaagaaagaattgaaatcagctgaaattgaggaataaagaatattctgtgttgatataaacctccacttacactgatacttaaacttaatacaaaggacagaaaaggaaatacatgcaaaatccctaagttgaccttcggtctctaaaaaccctaacagaaattagttagaatggatttggttaaatccacacctaactaatttctgtaagtacctaactaacacattcagaagcaaaaatagaaaccctagatctatatatacctgcatctaagcccagatctagatagttgagggtattcttcaagatccagggtttgaacacttgaagtaaagacagatcgaagctcgtacatgcacaagaacaagaagaaagttagtgcagttagagagagagagagagagataaaacacagtatatgtaataactaaagagattaccagtcagaaaaaacacacctgacacggaaaatcctcattttgtatgtctgaaacatccttgatagtggaatcaagctctcaaattcgaggagcagctcaaacggagacgt

SEQ ID NO: 379198 - DNA, 2381 bp, Cannabis indica
tgtagtatattgtgcaggtttgacatttcctgatgcacattaatacgaacacatacccaacgagtggagttttcgaagtttcatacttgaataggagaaaacatagctcaatatatgaaatttcatggagggcaactgcttccctaagtttagataatctcaaagtgtgttgtagtaagttcattatagaaactcaaactattgttaatattgataactcactagtaatgtttatatcaataaggagagcttgctaatcgttattcgtttatgtcattgtttaggtgttagatatcgaaaggtatcaactcaagttatggaaaaaattgatagcaatggcattaccaaagagcatgttgatgatttgcaacttccatcttcttatgagtctgctatggaagcactttcttctctcatttctggtcataaacgaggacagaaaccgcttatacctagtaaatatgataaattggaacgaatgagaatgtatctaaaggtaatagcagttttttttctccacaatttttatctacatccacatctgtttcttgcttccttgatatttaaatgtgtaaattcgttttgtttgtagatacttggcttggaagaacacatagcgggactcaaaattattcatgtggcgggaacaaaggggaaggtattctgcttattatatttatataaacatatttgctttgagaattctatttgaacattcaaatagttattagccatccctttgacttaaatgagaattcattcttgttgttgatatctctaatgacttcattttccttcatttgatgctgtggatacttaaaatagtcaaagatgattgtgttctgtcctaatttgtatttgcttcgttttgtaatgaacattttagggttcaacctgcacattctgtgaagccattctacgcgaatgtggtgtacgaactggactcttcacttctcctcacctaattgatgtgagagaaagattccgaataaatgggtaatttttttgtcaattatgttttgttgtagacctttatctcaaacatgttttagactctattttttttaatatgttgaaagtagcccataataggatatggtgttcttaagtattattaaaccatcttaactgttcatgtaagggagaccaatctaccgaaatgcccaatgcattgatattcaaaactgttgttgcaatgcaacacaaaaaatttagcatccatcatgtaagggatgcaagatgtaatgttaaagagtgaaaaacaagaaaagaagaaccttattgctactaaatctacataggaaactatatatctcccttttttgtctttcctcattttagttctgatttcttaacttgtatttttaggttggagatcacagaagataggtttctacagcatttttgggaatgctggcacaagctggaggtaataggctttattttgttagcacacagcatatgattatcatcacgacgaagctcgcttgttcgtttctcaagttaaaacagctaaagaaatatttaatgttttagtgctcttttatgtctcccataacaattaatttatcagctctaaaattgaatttgcaggaaaatataacagaggacctaccaatgcctccattatttcagttcctcactgtattggctttcaaaatctttacttctgaacaggtatgatgtgtattgaggcgtttacatattcgttctttacagttttccatgtcatgctttctatctcaccttgtttttcacccatattttacatagagtatcatggcttaaaacagtttgttttataggttgatgttgctattgtcgaagttggtattggcggaaaaaatgattctacaaatgtggtatgtatctaattacattactatgtaaattccttaaaagtttcaaattttaaaacagttatctttctttgacaagatgataccatgaagtatatttgattaaaatctaattatgagatagaaatgatgatgatggtgatggaatttttaaaccatgcagatcaaagaacctgttgtgtgtggcattacttctttgggaatggatcatacagagactttaggtgtgtgtttcatcagtttgctcggatgaggacttagcgaatgaatgatcttaatttgtacatttttatttgtatgctgcttaaccaacatactttgataattttcaggaaataccctttcggagatagcatcccacaaagctggaatttttaaggtataagtgtcctatgtaagctactcaactagcatgaataagaatttcattgaaaatgagttatttattgcattatttctgttttgattactcaaattggcagttttcattttcaagtagttctgaattggattgatgtcttc

SEQ ID NO: 379199 - DNA, 6161 bp, Cannabis indica
atattatacatcaataatagtattctttataaataaagttgaaatgcaaaagaagaagaaataacaaaataattttagtcaataaatatatattatttatatattcctcaaagttcaatgtatacatttggtaggtctgattgatggtacatatagtgtttttgttttgattgtgtgaagtttttctttttgtttgaaaagtgaaaaaaagaagaaaaaacagtgaacttaaatttgttcatatttatgatgatgatgataatgtcaccatgtgatgtaatacaccaagtttgatgatttatgaaattatgaaattagagtaatcatataaatatatatatatatatatatctgtgtgtttttttttaaataatcacttaatatgaattcatagtttaagaaattactagcatgtgatattggatataatgtttttagtgcatacttgtttagtagaggagaaaagggagaggaaagaaaatggattaagaggaaaattatcccttttattatatattaattaaatataacttcacaataattttaattgataaatactttttttttataaatcaaggtactaaatataatcttatataatttattaaaattagggttcctaatatatataatgggaatgcaaaacaaacaaggaggtctgaaggttgagtgggttcaagaacaacttacatcgggttggtaaagaggatgtcatggcgtttttgatgaggttggctaagggttggactaaggtggactatgagatgtttttggtgttgtgctggcagcagtggtttactagaaataatacgaaacatggtggaggggagccacgggcaactgatgtggtggagtggtgtgccaagttcctaagtgattatcaaggccaaactcagcgggcaattaatactcaactgaggtcagctgcttgctgggctcctccagtgcaaggtatgatgcaaattaatgttgatggaggggtaaaaaagggtgtgcaatgcacgggtactggatgtgtggtgcgtgattgtgagggacgggtacaggttgccattgcaacatctcggcagcaggaggtggctccattacaagctgagttgttggcgattaaagaagggcttctcttaggaattcagaggaaatatcgacaattttgtattgaatccgattgtctacatgttgtccaattaattcaaaaaaagaggatgggtgtagggatgtggatggaatattagattgtattaggaacttaatgttgcatgattttgttataggtatttcctttgtttatagggaagcgaatggggtcgctcatggtttagccaattatgctttggtgaacaaagctagtgctatgtggattggggttaattcctcttgtgtaagtcttgctattgagcgagacatgcctaattctatgtaatttgtttctgtgttcaaaaaaaaaaatgtacataatggcgatatgatctataaactgggtataaattaaagagtggtaaaataaaagtaaaaattaaattaagaaataaaaaataggtatagagtgtaattttttgaaagaaaagctttgaagaaaaagtagagaaaagtaaaaaaaaattgcttgttggaaactagaaaggaaagtggagagaagaaaaaaattgataaaaaattttgaggtggggacccactaaaaattttctactccaatttggagagaaaatagagagaattttttttacaaaacaacatcaatgtaaaattactaatttgtttttgtaagaataattttgttaataaatttaagggtaatatagtaattttacagtaacttaactttctttcctttctactcactaaacaactaagtaagaaggaaatagattttctattcattccttctaattttctattggtaccaaacatagtgttaattagataataataattaaattagttaaaatatttattaggatttttattttagtacccataattcaaatacatccctttttatagacatagagactgcataatatatacaacttttggagaatagaaggaaatatagtgattgtttgatatgtgtttctattaatttggcaaaacaatataagaaggtacaattaattataggtgtggtcatagaaaagtgtagcaatagtataccttttcatgcaattatgcaatatttgctttattttcatctcttgaccttagagctcccataggccactgcatttatattttcaattgttcagtctatgtaaattattcagatttcatatttttgttcttctcttacttatatacatgttagtggtgcaggtggtgtagtttttaggtaattttttaaattatatcgtacgtgtaatatttataattttccaaattgtaaaagctcaaaattgcaaaaattacaccgccaaaatgtgatagagtatatggtgcgatgtagacattttgtactatcacaaaataattcatttttatatttgaaaagaaatagtaattaattgtttaaattttcaatagtttttaaatttatagttagaggaggttgtcttttttctccggtcagacgtgtcagccttttctggacatgtacagcttggttggggttgtgttttgtgttttgatattgtgattcaatttttgctactgtaattagttttgtctctgtgatatgattttgagtattttaaccttgtctctgtgacatagttttgttttgtttcgttgttggttcttttttattcttcgatgacttgccatcaaatcactgttagtggttgagaagaacaagttctctacgaatgaataagttgttagtagtacatttacttaccttctgatcgtatcttcaacgaaaaatgttttttgattaaattatattctattattttaacaaattattattaataaaattatccgatttattaaaacacattacattaaaaatattcattgtaaagaagtggattggtttttataaataaatgaattgttagtatatgataaaattaaaaagtatatttaaaaattagtgttttgtaatactatagtacatagcaatttaaattgcaattattaaattcaaaactacaaactgcactaagcggtttgacaaaaatacaaattgcatagtacaactaaaggtttaaattaatggaaaaaataaatgaccaaatccaaacagtcaagaggacaaagtttatttagaagttaattcttagtactatatttttgggtgaagaatggaggggacatgtattacaccatctcctcaaatcaaaattataatagtaatacaaactaattcaagatatttgtaacttaaatcaaaattataatagtaatacaaactcatttaagatatttgtaaagctacaaccccaccaaatgctcttcatcttcatcttcatctccatgttcattgttcatgattttaccccaaaagaaaaaatgacctgttgaagattcaatgttgaaatattagaagaatgttagtcaaatcaatcttgtctaaaactcaagaacataattgtatcattcataataataagggaaagttcatgaaggaattacatttcgatatggtgccaaaattgcttgctgctgctgctaattttcagtacttcgtttcctcttctgttttgattcccgcttttcatatgccccgagtctggtgttttctagtttaaatttcgattgccgttgccttctcctagcttgcctagacaaattgctctcatcaccagcagattgttctaattctactttactatcttccaacttagcatctgcagaagatgttgccttgttagcatcatcatcatccctcactctcttctttttaccatgcttttttcgatcatgtttatctcctcctcggagaagctcttgtgtcataagcttaaactggtgcctcttactattgggtaccttccattctttatctttatagggagccatctgtttcagagacacatacttgtttagctctttgtcatctgttacaaatatctcagcagcactcaacccgaatctattaggttttattttcgaatacttgaatcttgttttcaagtctccaattgtatcttcatagtctagtttatagtattcctccaacatggcctctttagctttctccaatagagctgtttttcgcttcctcttttcgctttttttctttactcacttcctcttttgcctcttcattttcgtcatcactatcactctctaaaccgtcgatcttatgctttaaacttctttcccttgcagctgagaacccgtcaccagttccaaaattgtcccaatcttttggaagtccaagcaactcatcttctttatcgaaatctggtttttcctcgtcttcatcagtgccaaaatctggtacagcatcttctgcctcgtagtactcgttaccaaacgctttcttcatcattctatcgtactcctcgggatcaaactcatcctctatttctttggcactcaaggggagaacctcatcgtctccaattccagcaatctccatgatttttttaactctttcatccatctccttcttcttcaaattctttaaatgcctcaattcctcttccctctccaaccttgcaatctccatcctctcctccttatgcttccgctgctctttcctggccttcaatttcttcctaaccgagccctccacttccctagcatgacccaaaactcgatccccgggattctcttgaaacctatactcatactcctcttgcttctcaatcgccttctcatcttccgacaacagttccaagtcctcaccctcaacaccctcatcattgttcttatcaagccacatcttattcataaagaacttcttcaaaaacattgacttttcatggtcttcatcgaaaacctcatccaatgtcttatgatactcctcatcatcactcccatcctcatcccctccactcttttccttcaacttcaacaaatctccttcatcctcttcaacctcacttccttcgacggcttcaagaaaagccttacgcaactcctcttgctcctcattgtaaacaagtttagtcttgttattcttttcatctttatcatcaaattcagcaccttcttcaatcaaatgcttagctaccacatccttcaaatacatagccttctttttcttctctttcttcccttcttcaccttcttccccatcagactcagattcggattcaaacaacttgacatccttctccttcaaactcggatcttgcttcctaaccttaagcaaagcattaaagaattccaaatccttcttctttatatcaacatcgtcctcatcatccgacgaggatgattcatccgaagaatcatcctcatctccatcagcatctggacgtgctcgacgaggaataagtcccttcttattcaactcctcgtacctctgaagatcctcgcgcttcttgttgtgctcgtaccttcgagcaaactccttgtcaacctcaatcttctcaaattcttcattatctgaatcactaccgtcgaacagctgcataaccattgttcctaaaaaatcactgaattaaaccaacttccctagttctggttcacaatggcaatctgcaaaaaacagtttcaatataaaaatatgataacaacataaaatcccccttacatatactttgtttggcttaggagcatctggataaaaaatattgaatttttcaattcaaaagtcctttagggagaagctaggatgaattattttcaaaattacaataatttaaatcattcatgattgtttcacaagagatcatccaaaaaatttagttaaaataaaagtagaaagtttagctaaaaagtccatagttttaattaattaaaatattattacagcataaacaaaagaatcaaatcagtatattatcatatttcaaattcaaatccactaactaatgctcttgttctgaactatttttcacaaaggtactgaatcagaatgacagattatagctcaaaataacattgcaagatatcaccttttcttttcaaataaacatatattacttgcacataatacaaatctctagctatataataccaatgcacagaacaaaagattaaaatcttaactataaaatataaactaactctatatctatgtatatatatacaaagccaatgaaatg

SEQ ID NO: 379200 - DNA, 5493 bp, Cannabis indica
tatatatatatatatatatatatatatatatatatccaaaaaacatgtgtgtataataacacaatcatgatcatatctgatatttactacatcaaagaacttttataattaaaaagaaaaggacaaaatagcagaatggaatcaaaaacaaaaggcaaaaaaaaaaatctgcatggacagcagtagacgaataattctagaagatcaccaaaggattaacatgaggcttaccgtatggaaaaatgttcacacttagtccccacataactcttgtcaataccaccatccagatctatagatattgaatcaattttaacaaacgatcccgcattcttggaggcagtagtaccagaagttccctttggattattctcctccatcacaacactactggttgacttcatcatcttagagtacacccctaagccagcttattgtgtcttgccaatctttgtttgctaccacctagatagggttcacacaaaatctaattaactacatatatatatatatatatatcatggataagaatcattatatatcacatgttaaatgagagatgataaggaaaatgatagaagaagtctaactacaacatatacaaagatcttagtcaaattcccaaacattaatcgaactagggtttattgccaaccaccgtgaaaagctcattagccaatcacattcattagaaaccaaagaagaagatcaaaacacatccaatgatactgattcatcacataaaataatagcccattttcacatccacacaagcagattacagttaacttactaaaagtaaaataagaaaccctaatttgacatcacacgaaatacacaaaagattactacaccaattaatttgatatcccatcacgaaatataatcaaacatacagctaaacccactcaattaacttcccacataaaccataaattaattaaaataaagcaaaacataaattagggtttttttcatataaatatcgattaacaaggcaaaaaaaaaaagtagcgtgaatctcgggaaggtatatatgcaatcgatataaaaaaaaaaaacaaaaccccacttgaaaacttaccatagaaaactccaaaattacgaggtgaaaggattaaattagctcattaaaattcaaacccagttactaaagaaatggaaaccaactaattccaataacaagaaaacaataattaattaaataaataaaaacgctagaattattatcgaaacgcatagtttaatccctaaaaacgaaaaccccgataagaaaatgaaaaagtaaagaccaacttaatcttgacctacttttgaacacagtacacatctcagctaaaactaaatcagctcgcaattaaaataaaacacaaaacaaaaaatatcaatctgatcttaaaaaaaacaaacctcgaaacgcaattaaacttcacatgaagcgacactacataagcagtcccccaccgcaggcgcgcgcgtcaccatcatcatccgctcgtcctcgtcgtctcggggctccgaatcaacacgcgcaagctatcgatcgagaaaacggcaccaaaatatagagcaacccatggcgaagatcagaagccaagctcggagaccagattcgaaagctgcctcagtagaatttcactgcgaactttcgagaaaccctagagagagaaaagagaaccgaggtttttcgatccttttagagagagaaatgcgaatagagagagagtgtgtgtgttagaaaggggtttttatttttatttatttatttttgttttttttatttttaatttattttatttttgttttttttttttttggttcttcgaagaagaggtttttgttgtattaattttgtccacaccatgatgtcatgggcatccaacacatacatatatataccatttatattaacacatataataatcttttgtcatacatataacatgtatatatagaaagagaaaatcgataaccaatacaatatggccacgtggacagaaggtgcggttcttatcacaatccatttcatgaaaggaaaccctaggaagggaattgcaaatataatttattttgtacaaaataaaataaaagttactgtactgacgcgtttattacacgctctgttgcgtgcttattgtttaatgttattttttttacctgtcgtgtcaaggagggcataagatgcctttgcacattaacggttttgtattggtgcgtgtgttgcactgtcccagtcagtagagtggaactaataagaagtcaaaaccctaattttcttttctttcaaattatataaatatatatattatttttctggtgagtaatgagggcatctaaccctaaagtggctaagatagatacccttccatgaatagagggtaagagattttttttttcttttcataattagaaaagaatgaatgaaaaaaaaaatcagcacttaataaggatactgtatgatattattgtaaaaatatgtataccatatataaatgatgaatgtaaatttactgtaataaccatttattatagtaaagacaggttgtcaattgtaaggatttaaatttgttatcctttcctacattggattttttcttttttaaaacaaaaaaaaagtttagaatatattattagcagaattgtaaatgacacaaatttgttaatacatgcaattgttataataaatctacatagttatcctcatatggtaggtaaattaccagagattttttttttttttaaggtattattacatatatatttatgtgacaatcaatacttgggttattgggcaaatcatattgtgcagttttaggtcgaacataacatatgtatatatatatagatagatagatttccgggaaacaaataaattttagtactgggtgtccgatatgaattaatctaagactaatttaagtactaattatatataatatgtaattttgatggtaccaataaaaggaaaaacttgaaggactgacccttttctagtatataatgtttgaaattaattatggctattgagtttttgatgattatatatatattgatcaggtagtgattagttaatttgtaaagaattaattatgtgaaggagattcttattacaaaaaaaaaaattatatgaggagatatatatatatacataatgttgttttatatatagctgctattgctctataaatataaatataagtggctagccttataatggggatgagggccctatatatattttttcccatgtatatgtatatattattacctgtaatcatggaggttcatccaaaagcgatatatattatcctttaaaacaaaatgttttattatataaatgtatatgtatatatataagtggggaagtttttccatgactcaaggtccctgtctgcatgcactctaaaactccaacattttatatatactacacgacttcttaaaaagaaagtaaagaaaaaaaagactcatcactaaaatatattcttaatttcatatatagagaaagagagagaaagctctatttataataattaataatagtgaattaaaagcatgtatagaattcgaaagagagttttataaattgaatatatttctttttttcttttttctcttgagattatagtaatgaatatttacatcgatatatatatatatgtcatgtcgcaattaaacgtcaatttctttaatttgtaattgacgatttagaaagctcaacgagattgtacctatattattattaacttgcgaaccaactaatgaataatattttctttgctagaaaattgtacatgtacgtgtagctaactaggtaccaaaatttcttaactcaggaaaacgtctattataaaaacatatacatatatataattcatacacgcgcatgtatacaaattaaagaggatataaagtttgtgtaactactcagaagaagaacgatcatgattcatgatgttgtacatatacaccccctatatatatgtatgtactcaataactagctagttaattaggtcataatattaaccattattgaatattggcattatttatttaacagttttaattatacgtacgttataatatatgttatatagataataataatcgtatatgcaactgatctttgatttatacgttctatgcatgcgaagtaccgcggatctcatgatctacaaaggattctattttactctttaatttttctttttttttattacgcataattatgatatcgatctcaactctctctccctcttaattggtttattcttcgagttcacgtctctcctctggtttatgtgataattaactattattatttatatatattgtacctaattgagttgtttatatatatatatatatattatataattaattaagaccagaaacccattatactctaattcagttcatgatatatatagacttaacacataaattatattcatatatatgtgatgttaatatattataagagataaatttgtacattttgggacgcgggtatgtataatattaatataatattaaaagaaggatagaaaaaaagatacgttattccattctatatgtatactctacgtctgtgtatatacttgtaattagctaatttaaactgtgtacgacatgggggaatccagtatattgtttcttaactacaactaataatcaacaacaacaattattattataataatcaagaaattgggttagtatatacacacctccacaagtccgaatattttattgtttaactaaaagacatacttagcgattgaagattgcaacaaacaaagatcactagccatctaatattcccaataaaaagatcaggaactagcacacaaaaatatatatataaaaaaaacatctatcattcaccataaaaaatcttaattttagtcaaaataaaacttgtgattaaaagttttaaagttgtaactaattataaatcatcattcctaagttgtgattaaaaggtctgtagctaaaagtattagtcacaaaaattatagtttgttgtgactaaatatagttttagtgacaatactttgttgtgactaaaactaaattagtgacaacttgtatctagatactatattttagtcgtaaggaacattttgttgtgactaaaagttacatttaatcacaaaaaaattatgttgtgactaaactattgtcaccaaaagtaataattttttgtagtaattataaaatgaatcagcaccttaaataataataatgaaaaaacactattggaaaacaaattaatttctcaatatttaaaagaaatgtgtccccaatatatttttattgaaaattaaatatactagcaaagtctggaagactcaaaataacaaataaaaccaaatgcctacaaaaaataataataaacaaatatttattaccatgcaatattttataataaaagaaataatatatataaaaaaaaatgttagcaagaaacactacaagaaatgtcact

SEQ ID NO: 379201 - DNA, 3759 bp, Cannabis indica
ttttttttctttttctttttgtaggaataatattttaattaattaagaatttgttatttagtgttgtaagaatttactaggtgacaatttttatattgctatttagtgatgtaaatacgttttcttattttaatatgatacgaaattgacatgagtttgaaatgtacgagtataacttgtgaaggaaaacaagaaaactcaaaattgtagagaaacagagaaaacgaaatggaaattaacagaatcactaaaatcacttgaactattgagatagctttggtatttatattgataagagaaatactgagtacaagaattaatgagctaaaaacagttgtaacaaactttaactaactaaaataattacaccacaataatatcagattaactaactttcactatcagtgtagtcatcttcaactattccaatatcctccctcaagttgcgtcggtgaacaccaagtgtcaacttgtgcctaaagtagctaaacgaggttgtgggaagtggtttggtgaagatgtctgaaacttggtttgtggagttgacatgtctcacatccaatttgtttgctagtcacaatctcgaacaaaatgaagatcggcttcgatatggtttgtccttgcatggaagaccggatttgaagcaagagaaccagctgctcgtcgagcaatgattgcagccatattatctcagaagtggctaaagcgagtgctctatattcagacttggtactggacctggcaacaacttgttgctttttagtacaccagcttatgagatttccaccaaggaagatgttagccagaggtggattttttgttaatggaacaacatgcctagtctgcatctgtgaagccttaagatcaaggacctttgttgttgtgaatgtgaggcctagatgtttggtaccaactaggtatttaagtacacgtttgtaagccccccaatgtttagtttttggttgattcatgaattggctgagacgataacaacataagcaatatctggccttgtgtgacataggtattgtagagctccaattatactcttatattcagtgggattagttaaggcagttcctgagtcatctgtgaacttagagttagaacacataggagtatattggggtttggaatccaacatttttgttctaaggataagatcattgatgtatttttgctgagtaagaaagattgtattggattctctctgaacctcaaatcccaaaaaatagtggacacagcctagctattttagagcaaattgctttgtgtaaagctttgattacttgttgtaatggttgattgtctcctccagttataaatatgtcatcaacatagagcaagagcaataatagagttccttgattgttgttgtagaataggctagtgtcagattttgattcctgaaaatgctatgacagtaggaactgtttgattttgtcataccaagctctaggagcttgtttaagaccatagattgtcttatttaatttgtaaacataattgggaaactgagggtcagtgaacccttgtggttgagccatgtcaacactttcttgaagttctccatttaagaaaacattgttgatgtcaatttattgtacttcccaattgcaagtggttgcaatggtgaatataactctaattgtgcaaggtttgacaaatggactatatgtctcaaacaagtatattccaggtatttattggaaccccttggccacaagcatggctttgtaggtggagatggaactgtcaacattatacttgattcaaaaaatccacttgttgcttattatttgagcatcaaatggttttggaacaagaatccaagtatcattcctttttaaggcactgttttcaacatccatagcaattttttttactttggatttgcaagagcagcagaaatcattgttagttatagattagtatctatggtggtgatgtatgttttgggtttgaaaattcttatttttgcttaagtgagcatgggatgcacattttgagtaataggtggagtgatggagctagaagttgaggactgatgtgatgatgaggagtggggactatggtcagtagtgatactatcaaatgtggaagtaaatggtgtttttagtggaggatagtgtgggggaggaggagggttctgtggtgttggtaaggtaggtactttgtatgtgtttgagtcaatgtagttgtgttggacagaaggggtggaagtgtgagtagaaaacatgttattgtaaggaaattccagttcattgaaggtcaaactttgagatacatagacacaaccactagggtgtaagcacctgtaccctttggagttgagatagttaccagcaaacaagcatttagctgatctgaaggacactttgtgagtctcataaggtcttaacatgggaaaacaagagcacccaaaaaccttgaacatgttgtaatctggtttttgtttgaatagcttttcatagggtgaaagaaagtctaatgtatagttggggagtctatttatgatgtaggcagctgaggtatatgcttcccaccagaaagttaatggtatttgtgccttgagctaggagagttaggcctgtgtcaacaacatgcctgtgttttcgttcaactctatcttgttgttggtgagtgtgtgggtaggaatttcttttgactatacctagagactgaaagtttgtgaagaggttcatattctttagtcaaatcagtttgcacacttttaatttttatttggaagagcctttcaacataggcattaaattgaagaaataagctattcacttatgattttgttttcataggaaataactagacatattttgtaaaatcatctacaaacctgagatagaatttgtaacaatcattagatgtgtgaaaagagggtccccatacatcagataaaataaattcaaaagacattgttgttttattgacagtacttttaaaattgacatggtgttgcttgcctatttgacaagcatcacagaaagtagttttattacactttgtatgaggtgctacacgagaaagaactttggttaagacatttaaagaggggtgtccaaacctacaatgccaaatatctaatgtttcgtgtttgtcatgaactggattgctggtagtggtgtgattgtaggcagtaggactgacgattgtggaatctggtatagctgaaggttggacaaatagcttgggatttgtgacttgaagttggtagagaccttcatgaacttgcagtcgagatttgtgagaagtgagcttgaggggtttcagttagggtgaaggatgttgaaggtccattttatgtaggtggtccaatgaaattgatatcaaaattgtgaaagcatttcacaacaatgtgccctattcttccacagagttgacagataggtctgttagttcctctgcctctgccaccatagctagtgttggttgttcttccccctcgatttgatccacgataacctctaccaccatggtttcgggaacctcgattgttgttgttgaaggataaatttgcaagatttgcttgaacacttgtgagggaatctaaggtaagttgattgattcttgttagatattagatgtatattagctgtaagagagttagatatttagtagatatttagtctcctaactctgtatataaatatgtattgttctatgaaatctacacacaattcgaatcactattttctacatggtatcagagcattgtgattcaaaattcgaaattcgaaatta

SEQ ID NO: 379202 - DNA, 1381 bp, Cannabis indica
tgagatgtttagtttcattagttatattatatattaggttgttgaacatattaatttttagttcatgatatattcattgttttcaaaaaaaataaataaataaataacaatgttgtctttaaagttaatctttagtaacaagcaacaaattaagtcacttctagtgacaactcgttacaattagcaatcacattatttcctaatctaaaaaaaaaactgatagatttagattataatatcttttttagtttacgttattcaataataattaaaaaaaaaacaaaatactaatcaaataaaacaacacatatcaataacctaagtttacattgcatatatttgaaatattatttgaaagtattgtcttaagttataagtagaaataattaaaactaaatctaggcacttcaaaaaatcttgctcgaaagaaaggcaaagacaaaactatgaagaaggcaaagatctcgaggctctcgtagggcactcaacatacttctccatagttttgctttgtttgcatttcctcgccaagagcgatagaggcagaggaagtgcatatgatctagtctatcatttcatatgctaacatggcaaccaactcccgttgtatatttgtggcgagtcccaaacactatagaagaaatggagtcaccatctctttcgattgatcgtaacttgatgatgaagtctcatttagctaaaaattgtaacaagaaatcaattaaaatttaaaattaaagtacaaaaattaaataatacaaaagtaaaaaaataaaattaaagttatataaagttattttaaagatacatttaatcaaacatatatgaaatgaacaaagtccatacaatactaactaatataagctaataataataataatccatttcaaattaataaatggaaatcacgcgatattggcgcggctcaatcaaaccatcaaatcgagtttcacatcgatttttttggtaagattaaaccacaccaatgtcgagtgtatgtgagaaagaaagattttgtgtctcaactaatgaacttagaatgagtgtaaataacattgtaataattttcaagtatatatattaacaatgatttaagttacttgggaatatgagtgtaatcaacattgtaatttttcaagtatttataggttcaaaatgtggacttataattgtaaaagacaaacacaaacttatgaagcttaacatagtattaatattgacaataatccaacaacacatgtactaaccttaatctatacaaatttatttataggccggccaagtcaccaaaaaacaaaagccggctcttctttttctttctcaaaggatcaaaattgattttctctaaaaagtgagggatatatatagggaaatttacatg

SEQ ID NO: 379203 - DNA, 3133 bp, Cannabis indica
tttaacctttaaaagtaaaggccgcgtgtcgcctaaagctttctcctttaaaaatagaggtttgtaatattcgtctattaaaaaggtggcagagctgtgcacactaccatgcttggacgtaggggacaagatttgatctttgtcagaaaagcataaccgtcacttggtgatctggcgtgcatataaggtagacatccatgacactccaaggcggtcgacatccgcattaggctcttcaagtactcattcgggtatcaactgggtaggcttctatgtttagacccctctgggtctgggagaggcaatacgccttccacatctgggaagccaaggtagagtcaagtaaacttccatgtactcttcaatctcaacatgttctagattccaggaggcttcttcgtgacaggatcacagtggaggactttaattagggtgttatcgggctaatcccttccataataaggcacatgtcatatgctcaaaatcatgtataacaattacttattgaagagtataagcgtcaagcacgtgatcccaataaccgccattgcgcctctcagtccatttttcaaggcaagacattaaatgcccaagatatcaaacaaataaccatatcttcgtatcccgtaattagatcacatcaaatcaagatggagtacgaaagccaaacacgtgtcacccatctaaccaactcaatagccgagtaagtccatgtacgagcaaatggttcccacacggacttggaaagaaaatgttattccaattttcacacaaggtgatgtggcattaaataaaagtgacatgtaaagaacattttaaggcttggacgggtggtctcccctcaatagtccgtctagagagatttgtatgtgactgtccgagcaggtgctcactattcaacgatgtcgaatcctctaagcagtataacgcgatagaaagaggtcttgaagatcccttccatatgccgcatttatatctcaattaaatccctatttttatgggatgggcattttcctaacttagttttcccttttatttctaattgttttgggaaacttaattcatgtattttttttcctataaatagtggagtcatttcattattgagggatacgaaatcatatgttctagagagctatgacgctgtcaaaataattgtaagttttttcaaaggattattgagaaacttacttggccaactccttgtgatcttgataattctccaaactaatacaagaaaaaatagagtatgctattatcgtaatcaagggtcgaacctcaataaattttggtattcttattgcatgattatatttattattatctattatctcatcgctttaaagatttagcgtcattgactaaaagcgagttcaacaaatgtaattaatgtaacaacaatcatgtctagctaattgtatgaacgaaaatattacttgcttgttatataaatgagtatccccatatgaataaaactaatcacaaatctttttcaaaaaatggattaatgactgtactattataattctcttatctctttatacatatccactatgtatattttgctattcgttattttagttttttagtttaaatattcgccactctaggtgaatattcacatattgcttgtgagtttttaagctttgctcgaatactcataatttttaatgtggtttaatttcctcctaataacgtatagtatttttatatttttatagattttaatttttgttttttacaaaaataggtacttgtttttacattaattttacaataatattatattatgttgtttacataatattattatatatatacgtttttttaaaagaaaacaactgaagaaaaattctgaaaaaataaattataatctgtaaaaatataaaaaaaaaattcttttatcaagtaaaaaaaatgtgtatttataaatatcctttaatttaataagtaattattgacttgtttatcgaaacaacctttaatcaaactggacccaaatcagtgtagccagctgttgctgcacaaatcttcacacgtattaacttcagttacattcgcgaaacacacaaaactgtatagtggcagatttgtaggcccacagaaaaaggagaaggaaaaaaaaaaacaaaagaatattggtaataaatatctttttaatataataaaatcgaaaaaaacagtttatttctatattttattattttttcgaacaaatatattttatttattttgtttattaaataatatgtaaatgaaagcaaatgtagctatcaaaaattgttgtcttgtttagaaggcagcactgtatactctgacgctgataaatacccctctttatactttctctctctttttctcacctttaaataaatatatatttaaacaataaatttaatgttgaattaatttgaagagcatcattatttttatttttctatactattttcagttgtatcatcagactgtacagagctgagaaaagaagtgttgcgtgtttggccggaggattctgttgtatcgttgttttgaaacttcttccgttgtatgcggtttgattctctactcattatactctttttcaatgtctataattaaaatttgattttttttgtaaccatgattatgtggtttggatttttttttctttttatattttgattgttttggattctgaatatggtggtttttctttttttatttatttattggtattaatatgaaaagtgatgggtcaagttgaatcttgagtgagtggaggtttatgggtgttgctgctcttgcattgggtttttcaaaagaagagaaataataagataatgaaaaggaaaaggagattgtttcttgcaactagatgaatgtgtttttgtgtgagaaaacccagattagattctttacaaaagctacataattattaatggcttagtatccaaaccagggattgaggtactctttttgctcattgtggaaaatggccatcatagaaaatgtccaacaatggaggcgaatgcatgttttttttaggttccggtagaaagggaaatttgtttagtattgctgggtgtggcaaaatatggtatgtggtggactggattttttgggttgtcaaattcgctctttttttttttttttt

SEQ ID NO: 379204 - DNA, 983 bp, Cannabis indica
atagtaataatgatattaatgatagtaataataacaacaactttaaggatggtaggacaagaaggagaactaatactactagtacgtgggattgtagcgagaggagagagaaggggaagcaatggagtgaaaagctgaaacggggctcgtttcggccagttgggtacagcgacgacgttttggatgatgtcaaggctttgctgaagagatacccacctgggtggggacttgttcatcatcaacctcagtccattattaatggaccagatcaacgacaacaagaacagcaagaacgacaattattagtgtatgatgattccaactctattacttctgcttctgctggaatttacttaacatggaaagaagagcctgtagtttgggcttcagcatggaaaatctaattggttgatcatcatatacatatatatttcatatacgttgatgccctagcagaataatataataattagaccgaccaactttgatgtatagctagatatagctagattttaatagtagtgttcatcatgcatgttgtgatgatggtcatttgataaacattactactacctagctagacctagctatataaccaaatataagtttttatgtgttgttgatagttataattatagctattttcatatgatctccatccttattatatcttctttttttctcttcatatatcttattgtgtaatcacctttttctagtattggctttatgtttgggagtttgtgttcctttgttttgcttttatttcattgttcttgtttgaaggtgtttgaaacttatatatacatatgcctcctcctcacataattaataaaatatatatagcactaatatatgtatttaatttatttgtatacgttagataattataaattatttaaatatatttttttgaaactggtcctgcattttttcgatgaatatgtacatattacatagttttacatgtaatataaagagat

SEQ ID NO: 379205 - DNA, 1543 bp, Cannabis indica
aatattataattaagtaatattaaataatttctaattgcagtctggtggtccgatctatgctgtgccacttggaagaagggatggcctagaatttgcgacactggaagtaaccctagccaaccttccaccaccgactagcagtgccagcgctatcgttgaccaactcgctaccaaccaaaagctcgaccccactgatgttgttgccctctcaggtggccacaccattggcattgctcattgcccttcctttggtgaccgcctttaccctaaccaagactccaccatggatcaaaactttgccaagaaactcaagggtgtgtgccctaaaaaagacacagacgctttcacctttcaagatattttaacccccaatatctttgataataagtactatatcgatctcatgaatcgccaaggactttttacgtctgatcaggatttgttcacatttagtaagactaaggagattgtgaagagcttcgctatcaaccaatggttgttttttgagaaatttgtgattgccatgacaaaaatggggcaactcaacgtcttgactggcaatcaaggtgagattagggcgaattgttcggttagaaaccctcaaaagacagctttcttggcatctgtggttgagaatggggaaatcatgacaaacttttaagatgttttaactctttaaattatgcatattaagtgttttgtaaaaagaaaaagaaacttaatgttgtttacacatatgttttatgttcagtgtgtgaatgtgtgtatgtttttttaatgaaccaagaaagtcttatatatcaatcaaacttttacaacctatccaatacttgtataacataacaagtatgcttttctatttacaatgaatcaaactattctctatctatatgggatatctttttaggcatatataatcttgttctagtctttacattctctataccatagtagccatacccgttgcataaacttgcttctagaatctacttaaccttgcccgatttgtccaccttatattagttgagatattgtagtgagttttttgtgccattgcaaccaatttttaagctccaaaagacacctaaaactaccttgacaatcaaaaaataaatgttcaacagtttcatcaatatattctacacacctagaatcatgacatttattgaacttggccaatgttcctctcgtttgtagtcttcctaaaacaaccaaccagaaattaaaactattctttgaggttttaatctactccaaatcatatcaaactaataatactttagttgattggattctatacttccttgaagaagttgctaacaattagtttgggtcttgaaatgctctttggcatccactactctcttccaataccagttgcttgatggtggagccttgtagtgccactaatctttgtctcctatgtatacactgtgaatccaacactcccataagttgtcttgctttgtggcaattttccaaacatatttctcaattgttgtcgcatttcaatttgttgagaatcatggggttccatctcaa

SEQ ID NO: 379206 - DNA, 3170 bp, Cannabis indica
tgctaggcacatttttgcccaaaagtcccttgtcatattaagggtcggctagattatgctacatgtaagtgccagtcagatgtgcaaacttttggataacaacacctaataaagaagtaccaatagttcactatgcagataatatttctttcatggtccaactaaaaagaatgtgcatcaaaggagatacaattaaacccatttgatcaaaattttccttacacacgatctttaagagagtggtaatatcgactgatgttaaacaaattcgatcaagtgaaattttttaacgagaaactagaggtgaggaatcagtagtcatggaagtcatgagcatgcctaaggctgctagttaggtagaccaccttagagtgtttctgcagcttataaaaataaatcttggttttattttttgacataggctatgactttacactacaaatgtaaagtatctcatttagcattagaacttcaacctttcggtctctacagaggacataccaccctgccatcagcttgtacacttgtgggatgaattgaaaaggcaaaactcccacttctgcgtagaaattgacaaaataacccttgagaggtagctgcgttcctaccacaatgtgcgcccaactcctagcgctaaatccttctgtacacacacaaggcgactcccccttgtgcgaaggtttattctagcacagaccagggatatcacgtaccacacgatccttttcgtaagacaataacacttcgtagctatggaatttgtttacaatttgatccatctcccatggagattaattgtaaatttcttctgaggttgtgtcaccggattgttccttgatcagatcctcttcctcaagttagatgatgtctgccatggtagtaactggtaaaggataagaacaaaataagtagttaataccacactagaaaggatacgggagagtcctcccccaaaattgcttggagaagtccccgtcagacctgtcatccagaagtaaaatcctcagagaacattgctccagaatgatcacattaggaacacaagaatttgatggaaaattctcgaagtatttcattcggagccataagggtcctggatagaggattaaaacccatccatgctcaacaacatttttctaaattcattttttcagcaaaaaaccaccaaaaagatagagtttcacataacctaatattgtctgtcaatatgatacaagcaaatcaacactttaatttcaagatatttgaagacaaccccaaaagcctaaaacctattcaccatctcctatggcagacatgcaagcaacaaaaagaaaatcaaagtcggccagatacactcatgcaaattattcgttacaccctaaatctcaaacacatttcagaatttcaaaaacgtaaaagatacttacgtaatgaaggcaaagaatttgggaaatgtgacgaatttggggaagacaaagaattttgaaaaggaatttggatgttgtgagttggtcgtaaatagaatcctatcatagaaggttggccgagacgcacaaccctggttctaagggagcaagtttgatttatgagtggttcaacctttaattaaagatccaatggttttgacggctttgagggatcaatggtaagaactggggatgatgctcctagattttctcgtgcctgaatcaaatgaagaaggcaaagacacttgttgaagtaatgggacattcaccagaaataattttcctcttctctctcctaaaaagttcaaattctaaataaaatatgagcaaaggtggtgaatggaggttttacgctctatttataagaaaaaaataatgattcgtgtgccattgaattggtggctcacattacatctaagaaaacaaaaaatcaaatccaacagttcgagaacgaaaaggtctgcatgaaataatgagcattggatcgaagaggtttcaatgataaaattttcctcagtacgcacgttgacatgattcagatgtcattatgctaatctaggcatcacatgctttcctagcatgcatgaagttcatggattaagaagctaaagccacttgtgatccactcggtgaaaccacaaggctcatagttgtccataactaaagagtaaagaagtcaaaaaggtcaccccctctttttaaatttcacgcgtgcctataatgatctggaaggaagactacaagcctttgcaactgtcaagtttcaaaagcttgggggtaaatgttatcggtattttcgaaagagggacacgtggcatatccaagtaaaagatagtcaactgaagcccaaacacgggcctaattgaggtaacaggccgaatccacatgaagagatgggccgaaaaaccatcttgaatataggccgcttacatctcgatcgggacctctccagcttcgggaaggtatcatgcccagaaaagaagaaataacagaggccctttgaatgagccattagggtaattctagaggggcatttcaagagatgtcccagaagccaaggctgttgtggtgatcctctgacactgaatcccacaatgtcagtactttgtcccctgcgtcagtccataagagtgctcataccactaaagggaacataccctttgtctgacgactactaatctgaaagctacagtacgcagaggcgacacatgcatgccacctatcgacatcatatgggcatgagggaaatacatattcatgttgtactctttttctcttagttcaggttttgacccacttgattttcctaatatggtttctaacaaggcaactttaaattatgttgagatacttgcaattcatgagcaagtagagaatgtatgtgattgagatcattggttgagtatatatgaattacacctaataaagaagtaacaatagttcactataaagataatagggtaaattgcggcgtaaatacttaatgtttcaaattttatacacttaaatacctaatgtttattttgaaggcaaaattacctaatgttacaattctcttataacattactaccacttccgttaacttatcatagatatagacacgtagagggctaaaatacattacatttatttattttattttaaaatttaatattcttaatatcaaaaactaaatactacttgtttttttttttttaaaaaaaaagagatacaatactaaa

SEQ ID NO: 379207 - DNA, 3681 bp, Cannabis indica
tggttcatcccttcgcacgaaatgataagctataaatattaagcagtaagtataaaaattcagaataagcagagaacaaaacttcttttctatctgtctgaagaaatattctggaatccttaaataaaatacaattcttcagggaaataaatataactaaaaagataaaaacaagagaagacaaaattttatggcccaattcaagtttagttggacttttgaccctcttcaacttttttcttccgttccttgagaagattaatctggtccttctttcgctgtttgcctttctggttaaccgaagagaatgtaacattagtcacaacacaatgttaaatttgtacatagaaattaagaaagaaaagaaagcatttgagaatcaagcgaagatcttacagtaatggcctcaagaagacctctctttttacgcgacatcataaccttggacatgctggtggtatcctcaacaacttgttgaagatcaggaagaggttcctccccaacttccatcttctcaacgggagtagtttgaatggaggttgacgatcgaagttccttctcaatctcctcattatacagcatttgatgggcaatcatctgcatagagttagaatttgtcatatcaagacccaaatgatgaacaagaaaaaacccaataacaaccaaatgttcccagaccaattaaaataacagcctgactgtttaattaattatgcgaaatccaaaaaaaaaaaattgcatacctttcgctttcgctcagcagcttcattagcctctgctctatcaattacaccttcagccaataaactctgaggatcttccatatcttcttcgcccacgcctggcaatggaaggacttgatttttggctgcagcctgcaatcttttaatggtctcggcatagtctggcacataaccttctgcatcattgtcaacgaaaggtgacaagtgtggaggtggaatcctgcttgcagaacaaacttgtcaatgatctaagaactcaaaacagatattgaagaggaatacagagttatttactcatgtttgttaggatcgcctaataataataaaaaaaggaaattgcgttcgaactcccacccaaagtgttcccaatcactgtaatattgtcgctcataagttgttactggtttcaaagcttttgcatattataatgtgattaacatgatgtagccaaaatcacaagtattaccttccaaccaaataatcctcagttggcaaaataatccgtgcatttacagaatcaaaaacccattgtggttgaacataatctctggaaagaattctgcgggtctgtgatggcctgtcaacaatctgcacacaaaaccactttcgatgttgataaagacaaacagcatatcaaccttttctaattttcagccatctggtatcaaaaaagcaaacctgatgggtaatgtcttcatcgttctcatcatatggagccccatcgccctcccacgataccataccaccaaaagcaggaataacaaacagcagtgactctcgtggaacctaagaaaaaataggttttaactcagtttttctcacttccttcttagcataaaaaagtagacaatcttaactataaaaggacaagcacaacagaaatcatctaaacatcaattaggtgaattaaataaaacaccaaccagcaacaatgagctttactttcaatgccattaaacattattagctttcttatttctcatccttcagttcatttacaacactagaatgctcatttcaactgactgataagttatagaaagaaacatgaagggtaaagtaatattgatctcacctcacggctcaagaagaatttcatgtttttaaatagtttcttgcattcctttgtgtcttcatcctcttcatcctcagcaacatcttcaacaagatgcatcaaagcaccaggttcattggaagggagctgctgctgaagttgtgctaatcttaattcagactcttcaactgaagtctctttatgctggctttgaccctgttcagtaccagacacactagaagcctgaccatctaccaaggctctagagctagcagaaaaccatcttgatagcgcataaagatctacaaaacacaaagcataaaataaaataaataataaataacaaaaaatatgtgtagcttactgctaaaagactaaatgagaaccacagataacacataccagctgctaatgcttccagacgagaatcaaggattggcggatactttacatttatggaatgatatagatgacaattcacaaaggcaagaagagtctacacccaaaaataaatggattcaataagataattcaagggtggtttagtgattattcatcatttttttttttgtatagaaacaaacttgtattgatgacagaaagataaaaataataaataaaaggaaatatatatataataacctcattgaattcaagatatgttagcatgacattgtaatcaatgtcttcagataaaacttgctgcaaggcatgaggagtcaaccaagtgaccttttgtccctggacttctgcctggataaacaaacaccatgtacatgtaaatccataataacaatgatcaaacactttcagaataatgaaatttaaattttactgaacaataagtatgcaactatacctgataatatattcctttcacagatacaaagaccttacgcaacttatgagtacgggagatgtatgcttgccactcatgactcaacctagacaaaagatcataacaaaccaagagacaataataagatcataataaacaaggagataacgtgtcgacaacactacaacagcatacattgatctaaaggacaataagtagcaataataatatctatgttttcacatattcaaaaggtctaccttcgacagttatggacacgtcttacttcaattttttccctctctagtgcaggtaaggccgcaaaaagatgtaccattgtaagacagtcatccaaatctctaattgcatcaagaaatttcggatacctattttccaaaaatacaaaaacaactatcttcaggcactttttgtatcaagtatgagaaggatgactaatttaaaaattgggcaaagacaaacctctctcggataagtctatcaagtttgtaattgggtttagatttttctagtcgctttgcacgttcctcattcttcttcgccttggcttttttgatcttcttttcataaacccttgtttctctaaatgtctcaagtaaaggttcatgatgaagaaatgcaatatccttcaagtgataatatgtatggtgatttcctttcaccttcttctttggctcccgggggaaaacacccttaagtatgcataatttcctacaacacatacaaaaacatttaaggggcaagcagaaaagaacttaaaaaaaaaaagtaaagttcagtctcttacaacataaaaagaactcaaacccaaaaccggaatctaaatagcataagacctcaaaaatccttgacccatttgcccaagataacaaatatgcgtgtattaatatccacataacgaataacaacccaatatatattttatactaggaaatccgaaacagcaaatataacatagtgaaacccaataaaaacaaactccacccaacacaaatgatacccaaaaacctaaaataaaaccccttaac

SEQ ID NO: 379208 - DNA, 2369 bp, Cannabis indica
caaaatgacagctagtccaggaaatggagaaaaatcatggcttgactatcttcctagatccagccagaggaggacgtgtcgaagacttattaaagataacaggaatggctatgcaagggtcggtgcattctcctcggcaggaaaggtgaaaataagccaccttcaggaaacattattagaaacgagcagcttatggaaggctacctaaaaggtcacgccgctaaacgtagaataggggtaggagctctgtacgaagtatatgcgccgacagtctactggagcctcccttgttcaagaggccgattccacctacgatatcatgtttgctttgttagtacttgttcccaaaaccttgagcactcagactatcaaggatattcctgcatccagtggcagtgcctatgcatacatgtttctttaggtacagtgcgacagggaagggatggaaaacagttcccaaaaagttaaaagtagggttcctagaacaaaatttgagaaactcttaaaaaatgagagataggcaaaggtcaagatgagtttccaaaaggtataagaaagtctgccggcagaagatatcaaagtagtaagatccctgaaaaggactatggaaataacatgggagacagaatgttgttcaaagtgcggacatcttgtaaagtgaatctaaagtaattgtcacagagacagatgcctgaggtcttatcttgtgcatcagaccgaaggctgcacttggaaggatgcatgctcctatatagcagggtaccgtgaagtctccctaaggattaggtcagcttcaagctcctagaatgcatcttttggttttcccagatctgctggcttaagatggaaccatgcaaagagttgtcggaccaaaaacttagcactacttagtagtcacggacaagagctccgttagtggaccctgtggaaatggcaatctgtggggaattacatcagccatctgattgatcacttgggatagaaacccaatcacctgaacataaagccaaggtgggcctatttagcctggagtactgatcccggatcacataggaattctaaaaggtcggttcgtgagaggtgaaggtcatccgggaaatgcttaaacatcccctaaaaaggaaggaggttccaacaagtgggtcagggccattgcacgaagtcccatgctggattgcggagaaccttttgggcgaggattccacgattgctttgtcttctcacaggtacgtgtatttttaccacgggtgaaagatcattgggggtctgatacgtcctccaacctgcttcccggagagaaggattgcttgaagtctatcacaagcccagtggggtttcacaccttttgtcttaaacgtgaaactattgcttgaattttagtgcgaccttagccttcctttacggaagccaaagtccaccacataacttaatatggttctcacgggcacttgtgattttaccgtgcctaaaagatcactgggagttcgatacatctttaaccctctttccaagagaaaaggatttcttcaactctatcacacgcctcgtggggcttcacaccactggtcttgcacgtgaaaccatttcttgaattttagtttgactttagccttccttcaaggaagccaaagtccgccacataacataacatggttctcacaagcacatgtgtttttaccgtgtgtgaaagatcactaggggtctgatacttcttcaaccctccttcaaggagagaagaactacttaaagtctatcacacgcccaatggggctccacacatttggccttaaacttgaaaccattgcttggattttagttcgactttaccattctttcacagaaagccaaagtcctccatataaatcaacatagttctcacaggcacgtctgtttttaccatgcgtgaaatatcgctaggggcttgatacatcttcaacccaccttcatagggagaaagattgcttgaagtctatcacacgcccagtggggtttcacacctttggctggaatgtgaaatgattgcttgaattttagtggacttcaaccttgcttcttgaaaggcaaagtcccccacataactcaacagggttctcatgggcatgtgtgtttttaccgtgcattagagatcactgggaatccgatatgtcttctacattcctttctgtagagaaagattgcttgaagtctatcacacgtccagtggggtttcacatctgtcttgaacgtgaaaccattgcttagtgaaacttcagcctttcttcactgaagccaaagtctgacacataaatcaacatggttctcatgggcatgtttgtttttacattgcgtgaaagatcactgggggtctaaaatgtcttcaaccctccttc

SEQ ID NO: 379209 - DNA, 2055 bp, Cannabis indica
gcattttaattttagtgaatggggttatcagggaataatatatcactgtgcgtttctggttaagatttctttaatttttgatgtcattgtgcttcatattttaattccttcttatatttaatcatttctaaaccattcactagatcgagaaatgtttaattgtttgagaacaacaatccactgggactataaataagtcagaattgagtggcttgggaactattattaatgaggatgatatgaagtctcttgtaagttttttgggtatagttttcttttttttttttgctggaacccataatgtggtatagttactagcagaccttatctatggacaatgacagaagaattagtgggcttggcgataatattcagaaaaaccgagcacttaacgggtaataattttagatcttttagtaatgttaatttaaagtatctattttggttatttccttgtcctagcttgttgtcgttttactggaatgttttcaattaataaataatatgagatggatatgctgtctaattttatttgtggttgattcttgctgcccaatgtttacataacattatttggcgcttagaatttaaaacattttaaaaacaaaattaattaaggaaaaataacgttatcaaggttcatctgtttttagttacaagcttaattgtttaagttacatttcttttatatctgtattaggatctctacctttcccttcagtttcctatctgtttttctcttctaaattgcaccgtgtttatatctccttgataattcattgtcaactttaaaagtttggaggtcatttaacaattagtaactctttatgtaggaggactagtgggcctacaaggcgatcaactaaagggcaatggacccctgaagaggtaattgtgtacttgtgcttgcaaacttgcaaatctaataagaatcagaagttgcgccctttcttctttattcttcaagttataattttagggtttttttcaagccatactattatgttatatgatgctttgctctcacttaaaatgagagaaaataatgaattttattgatgccatggcttgtcggcatacctatcatttcatttaaatttgaagtgtaattataaatacgtcatttgtgcctttgatggtcaaacaaatacttaggtgatgtctcaatttagtcatctgcatgtgaatctgaaatgttctcctgtcaccatttatcacgatttggtggtttaagttctacactttatagatgcatgttttaaactttgaattagcattgtcaagtttaaattgtaaagtgaatctgatgaattttacatgcgtccaggatgagactttgcggagagcagttcagcgtttcaaaggaaagaactggaagaaaattggtaaggaatctatattctgtcttcataagctgttatagatttggaagaaaatatgttatccttaaatactttatcgtgacccttacttttgtttcattggtgtctctataaaattggtcataggtatgtatgtgtatacatgatgctaattcaagagaaatgttgatgtgcttagacgaaagaaatggttggaaaaactcaaatgttgggtgtcaaatagatgacatagccgacaaaactaagatatatcttttcagaatcatttcactgttaaaaaaagtatcttgcgagatctttaagttgtttgaagttgtgtatctttttgtggttgagaagctcagaaccccatcctattttatgggtttatcatcattattcagaattttcatccccttaagtggggttacttttgtacttttgtgaccttatatctattgcaatgtaattgtatattttggctgtttgtagctgaatgtttcaaggatcggactgatgtacaatgccttcataggtggcagaaggttttgaatccagaactcgtcaaaggtccatggtctaaagaggtgcagtgtttccctttcttgtttattgccttttatatctgcatagtaggattgtcaccaacatcagaagacttaatgtgaatatgtatacatatgatatatatttt

SEQ ID NO: 379210 - DNA, 1789 bp, Cannabis indica
tatttgatgctgctgttcaacttttcatgataaaatattaggaattggagctgtggttacgtaacaacaaaggagtagtaattgctgcgttttctaaaccagtccaagattgtttcagaagtgatgaaatggaagcaaaggcactcttccacagtctaaattggagtactcaacaacaattgccaatagcactagtggaaacagacgccctaagagtatcctttgcattgaattctcttcatagagacttatcttgtttttttaatctaattgatgatgtttgttatcttttattagagttattattactcatgctcgtaggcaagctaatcaagctgtccatggcttagcaaagtacgcactaaaattgaatgaaaatgtatcttgaataagcgaaatattttatcttattttctctattattgtaaataactgttaatttataataatataaaaaatttctaaaacaaaaaaaaaaatagaaagtttagaaacaattgtaacaacgcaatattttacatcacaaattaccgcattcttataaaaataagtaaaatactctatttttttactcgaaagtaatttaagaaaacttcaagtataaatgtatatcaggataaataaaccaaaagatgggtacttttccagatttaaatagtaggtattaaaactaaaaaacaaaaaaaaagacaaaattacagatttattacttttaaaccgtgcccaaatatgatatgtaaaaacaaaataaaataagtttctattttatgtttttatatttaaagtcttaagttattgggattttaatttcccacattttttgtacaaaatttagtctaagctataatttttctattaattatattttaggagttactatttatttattttattttattgtatgctttaataaatatttttattattcttgtagaatttgagaaaagtataatcatcatatttttgcaaaaattttaagtataaaatgtggtaatttcccataaaatgagcaaacaatgtaaatttcataagttaaataatgattcgggctttcccaacagcccacttccttggctatcaatttagcccaacataatgtgtgagaagttgaaatgagcccaagatggatggcccaaacaaccacaagttacttaatgcaatgggcttgcaatattttgttggactatttacaaaattatgggaaaattaacattgtttataaaaatatggcataaaaaataatggaggaaattacactacataactcttttaacttgatacttttaacttttactctctttttcaaaatctattatgtttacctcttttttcaattattctaccaattttacccctattacttcatgatagttttcgtatatttaaattaaactttatttaaaggtcaatttagttaatgtataaaaaaaaaaataattcttcaacttctcccaaaataatgccacaaaatatggcatatctttttttaaaaaaaaaatttaaaatataggaattttataggatacaaaataagattacaataaaatataatcaaaactgtcttttactctcattatttactctattgtgtactgatcactatgtttagttttttttatctaaataaatgctacaaatataatgtacttagtataattcatttagacattattttgctattatacatattcgatgtacttaaggcttgtttggtatgtcgtattgtattgtgttagattatattagtattatttaatacaatactatatttagtattgacttgtattaa

SEQ ID NO: 379211 - DNA, 2577 bp, Cannabis indica
tttacttaaaccataccgaaagtttctgcctcaaatcaaatttttaaattcccaagtcgtctcttcaaccttgctattgctttatattaccaacatcttgttcctcagaacttctctctcctttcaagtattctcactggtcatttataacgtccatgtttcaagcctctattgtgttcttacacccttaaaataatggctcttatacataggtacgtcgctcaagttaaagttttaaagcttcatagctcataaatataagatgagtctctcatacacataatcccaaagcatttaaaacatgcatggaatatattaggtacagctgctagcgttgagggcatagccaacttgtttgtcacttgctttgtcctcttcaggatttcaaaaaggatccaatgaagctagggcttaatttccttcttctaccaaagcgttttactcctttcatgagtgcattatgaagaggtaccatatctccaaccggaatgtcaatattctgccgatttggatccacatacttttgtgtctactctgaatagtgagcattcaagttctaattttatccattgcctcactcattttctgaatagttttaggaccaaaaatccttatcccacctaacttatcctagtaattagggaactacacttgctgtcatagagcagtataataggggtcatcccaatgattgactggtaactattataaagaaaacttgatcaagggaaggtactttacctaagatccttcctagtccaacacgtacacccaaagcgtgtttctaaatactggatagtcctttgacactgtccatcttcttgaaaatgaaacattgtattgaaattaactgtgtacccataactcgaaataaatttttcccagaattttgaggtgaactttatatttatgttaaatactagactttggagcattttaaagatgaactatttctctaacatataactcagcatactaatcgatggagaagttcattcgaataggcaaaaagtaatctaactttgtatacctaccgattacctatacaaaatcatactgccccatagtcttaggtagttcatcgatgaagtccatcataacatctttccatttctattccaatgaattcaatggctgtaataatcccgcaggtctcttatactctacttttactgataaacaaatcaaatacaaaaaaaaaaaacataacctattatcattgcccttcccacgtagggcatcacctactacattagccttttcaaaatggtaaaggatttcataatactaatcgtttaccaactctagcccatgtctttatcttatactcagatccttctgggtgaagaaatctcttaatcttttatgatcggtgtatatttcacatctcttactatataggcaatgccgctcaatctttagtacaaatacaattaatgtaagttcccgggtaagacatctttattcatactctttcaactatcgggaagcacatgctatcatttttccatcttacattaatgcacagcctagacccaatcttaaggcatcataatatacagcaaactttctccttactaaaaggaaaattcaatactagagcagttttcagccactgctttaactcctgcaaacttttcacacactgatctatcaaattaatctttgaacacttggttcataaaatccataatggctactagagctttaatgaatcccaaagacatcactaacctcttagtgcccataccttgtacagaacacagtttttagaacataatccacttaggagccattcagtaaggaactttatataccgtttctgctcccataactaaatcaatgacaattttaatttcccaatgaataactaatctaggcaaatctcatggatacacttctaaggattcacaaataagtcttatacttttagatccatccacaataggtcgtccagtatcactactatagctaagaatcctatgcagatttgcgcataaggtctctagatttgagaactataattctaggtatacgagatccttgtaccgtgcccacaacacagctaggttggcattaacaggttcaaacaccaccattatcgcttacaatcaattgttgcttcatcttcgaacaagaagtcccttcccagaattatatcaaaatcatgtaactataacctaattaacgtgatgattatctcccaaccgtcagttcagcagataaggatctaatccacctagtggagatcatcaactcttcatatgataacaaggttccaaaccccaaaacataaatcttgagaagtttataaaaaatttctgtcaccgtacttgacatatataagattgtataacccctaggatcaaatattactatataagggaagtcgtttatagacaactagcctatcacaacagatgaactagtgttagcatttgcctatgtacaataaacatgcatcctaaaatctctaataatgtggctcaccaaatgtaacgccctaatgctaaggcacgctatagtgctttttcaattaatgtgcaatctttgctaatcaaagaaatttctcgaaaa

SEQ ID NO: 379212 - DNA, 1964 bp, Cannabis indica
ggagtttgtctttttatgttaattattatttaattaactcaattaggtaatatctaatttgaaaagtggttatagatatatcaaatttgttgagatattctctcaattaattaagagattccctcataaatatcagtaagcgaacttggttatatatatttattatttaaaaaattaaatataatttaattaaaggattttaactactataaatagaagcctaatttgagaaatcagaccatcactttactttataattttaaaaattaatagagaaaaagaaaacagttttctttctcaaagtgttctttctcatgtgttgagaaatcaacaagaacacattatacactttatcttcatatctgacactattccttatgtatggtggaaaaatttggaagacactggtgtgagtccaattgcatcatcctcatcaactagattaagggatacaacatacgagaagttttgaggataccctgatagtcatgaagaggtatttattctaaacttaccatttatgattttcatttaatgtacacacatctacagatctattgggatatggtacaatgataatcaaataatatgaaactctttcgctgcgtacttgatttagttccataaaaccaacattgaattcattaattgctctgactgggtgaccctgcaaatcatcccagaattttcctcccatggttgacagagcaatggttatactagcttggagtagtgttaactgaatgttatcattcaggtttcttagttttgttgttactatactaaaatgacttagataagcctttagcgactctcctagttgttgcttaatatttgttagtgaagattattcttgccttctgtctctcacagcctggaattatttcttaaattctttgaatatctactcccatgatgtaattgagtggttgatgaatttatcaaaccaactgcttgctgccccagtcagacatgttaggaataatatgcaacgcaagttgttggagtcattacttgcttgaattatagtatgaaagttgttcagatatgtaactggattggttgtcctgtcatattgtgcgaaatgtggattcttgaatccttgagggaattggtaattgagtatgtcagggtgacatggttttgtctcttcattagaattataccctgatagtttcccataatctccatcttggtatcgcctgaacttatcttccaactgaatcacccttagttaggatccatggctagttgttcaacttgttgttgacgagctgtattttaatttaatcgatctcaaagatctagagcattttaattcagatgctcacataagtcagggtatctataatttaagtgttcaccaatatcgggttcgtattgccttccattcctttgatcgtaattgttaaccgaccttgttgcagaaaatcttttagattgataactctgggagttactcatgctctcctgttcatcgtgataatggcaacgtgtatcctccccactctgtgtttacctttcatatgaatgagttttggttgatctactttgaccacaagtcctcaaccttgacccactcaaaccagtgcttaatcctatttcttgaggttcctctcacatagacctccgtctttgaaagagatttgacacatgtcccctactcaagtaggtatccatgctatctatgtcattatggtttggtccctatgagtgtcttggtggattcccttacccgggtcattcccccacacccttcgcatcatactgagtgaacccatagtccccaagttatgtttacttggcatctacattcatgcgagatgactctgggttttcaagttgcaccttctcacaatttttgttaccacgtgaggttcctatattatttggtatagtttctatattgttggtgtgtaaagcccgcttagttaatttggaaattagcagttatttatgttaat

SEQ ID NO: 379213 - DNA, 1291 bp, Cannabis indica
acccatctcaacctctctaactctgttttttctggtcagattccttctgaaattactttattgtccaatatgatttcccttgatctctctggtaatgaaatgagtctcagtctttcatatagtacaacaacaaaacttgcccaaaacatgaccaagttagaagaacttcacttggactatgtggatctttcttcaccactgcctaaatccattgcaaatctatcctccttgacatctttatcacttagtggctgcaatctgtatagtgaatttctccaaaatatttttcatctacccaaaattcaagccattgatgtgtcattcaataataacatcagtggttttcttcccattaattttcgatctgatagtaaactaaagtcattgaatcttcaatctaaatagttttttttggcagattaacatcttcagttaaaaatttgtcacgtctctcatttctcgatctgggttctaataactttaatggtcaacttccatcaattttgttcgaacttcctagtttacaatatctagatcttggatttaatcagtataggggccctctaaccatcccaaatgtgttgttctcatcccaattgacaaatctttatttgtattcgaacaagctaacacaaaaagttccaaggtcaatttttgaaatgataaaactggatgaactcaaccttagtgaaaatgacttaagtggcacaattgagatgagcatgttctcaaagttgagtcaacttcgagctctttatctttcagataacaatctttctgtagtgacaaatacaataacaaattccactctaatctttaagatgaattatttgggtttggcttcatgtaacattacagagtttcctaagttcctaaaaacccaaattgagctaaaacttttagatctttccaactacaaaattgaaggcaacatccccaaatggttcttctgcataggggtagagaccttggattcgttagatatgtctgcaaatttcatcactggttgggaacaagagttgaaagtgcttccgtggaaagtattgcaaactctcgatttaagccacagcaggtttcgagtaacatttctagtaaactaaatagttttctttcctttttttaccaaagcaaactaatagacaactatataagcagaagattgacatgtaaattttatatctgtatgaacaataatattaagaattacattcatgtatgactttaaagtaggtggtcaacattcattttagctatcataaattttgttttatacatataattaatatattta

SEQ ID NO: 379214 - DNA, 3196 bp, Cannabis indica
agacgccacctctacttcttgatcatttgctgccattgccatgctggctaaaacaagatgctccagggctgcttcatgatctccctttgtttcatatataagacccatcaaccttctatctgcagcttcttcaggagaagcaggggcaccattttctctatgaatgttaagagccatctggcaaagcttttcagcttcatcaaactgcaatgcttgaacatgagcttcggccagatacctacaggtctcaccaactcttgggtctgtttctcccaacatttgtttctgtatttccagtccctttgagtagcacatcagtgaattctcaagcatgcccagcatagcataagtatctcccaactgcatttgaccagcaaatttagcaagggcatgctcttggccctcctcaaccgatagaatctcaatggagcgctcaagaacaggaatcgactcattgtactggcctaagctacagtatattgctgcagtaacatgtaaacacatgactagttccaaactgggctttccatttgcacacttttcaaatgactttgcagctcgaagagcaaaatcaagagccttatgtaaattctctccagaggaaaccaaatgccttgcttgcttaagtaaaaatgggcccagatctggattttctaagcctaaatcagttggatcatccattccattctgcaactttgaccccaaacttcttaccttcttccctcccgaattttgtttccgcggattcttatcacctttcttatcgagtggaggcttctcaggagatgtcttgcccttagaacttgattttggtgatgtttcagattccaactgcacagcagaagctttctttgatttccctgaagatacagatttcgcacttgcaggttgagtcttctcagccttttctgcttttttacctgcagacgagctttcctttttcgaacctgaatcactacgagaatcgtccgtgggcttccctagaatttcttcttcaagtatctccacttccctcatctctcctccaacaagatggcgcaactccgaatcgatcctagactcttcaccatcagatccaaagctacgtcttgatggtgactgatcagaactctgcatgtcacaaacattttcatatagctgctcaattgaggtgtcaataacctcatcaccttggagattggaacccatgttctgaggactatgtggactcaaaccactcttttgggacttatctacagctgggttttcctttggaggtgtagaacttccattcatagaattcagtaccccaccttcactcattccctccataactattccaggcatcttatgcacccagaatatagaaaagatcgaatgatttagctgcaccaatgtttgaatcggaagtatacataagaatcaaacagttgataactaataatagcaacatgttattatatgaaacttcaaaacaataacaacgatataaatcaaccttcagcattaaagccaccacaaaagcacataaaacagaaaaccaaaagcagtaacaacatcaaaacttaatctttatcattttgcttgtgaacaaaattttcagcagccaacgaacttttaatttaagctgaaacccatcaataattaataattggaaaaccaaaaatataaacaggaaattaaaacgaaacccaataaactaaaagttctccagtaagatctctgcaaccaagttaaaccaaaaaagaaacaaataggtatcgatatttcaatacatcacagattgaaacaaaccagctacgaaaaatccgtaggatgaattataaacaaaaacccatatacataaccatcaaattacgataaacagttgaacagaacaggcatttgacctctcaaattgattcaaaagcataacacgatgacaaaaacggaaagataacaaagcttttcacctgaaacaataattttataaaataaaatataaaataagaggaagtgggaaggcataccttttcaatgaactatgaaaagaaaagtccaagggggtttattctcgtggtgacattcaaaagattagtgtatatatatatatactataaatatctttaaaaaaacagccattttttggtgggtgtatagcattattagctagaaatggagaagacgagaggaaaaggaaatattaaacaaatggtaggggcaaattgggaaatattgtagcaatatttttgggaattattaaaagtaaaataaattcatttttttttccttttgttttaagattaggaatgtcagatgggaaaaatggagaaggcgacttctctcccaccgtctcagccaaaaattgccacgtggaagacgtagagtggtgatttattattcttgacggttttacccttcaaaattttggttattgacttcgtgtgtaatttgttcatattgattattaggtaaaagaaaattaataactttttgtatttttatggtgggattgaaggtttatgtggacgaaaagtcataatcttgaagtttacttggcttcttctaagcttgattatgaagttggtcaaatatagatgtgacacaaaaaatttaggaacatatttagggataatatggaataaaaaataaaatacttaacacaatttttatttctttcatggaacaagcaaaaatgtaattattattattatttggtttaaggaatctagctagttggagaaggataatgtcaaggatatattattcctccatattgggattccaatggataatattgcatttattgtagctgtgtatagcacatgaagaagtaattaaaacccttggcatttcatcttggttgagttttattaaatatatataatcaaaattttaaataagggacaaaattatttaatgggattattattattattattattattattattattattattattattattattattatgtttaatttttttgttaatgagtatttcatgattcattattattatctctttcaataaatttagtactctatcaacggtgttatatatactaatattgttttaattatatatctactttatctagattctattatatgcatgaactatgcatgtaggcctataaaacaatatctttaatgttgatattcagtactatctaacactgttctttaaacactaattttttaattaaataaattaaaataaacttcgatatt

SEQ ID NO: 379215 - DNA, 3964 bp, Cannabis indica
ataccaacaagtggactcatacgattgagcagtaacaaacagctgtctactttatgttgtatgagtatgtaataaataatatcctcaaagtcaagaacttttcatttatatgatgacaaataatcgattaattagtaacagtgttgtttctgagttgagaatgacaaaaactctttgtaattaactagtcatcaaacaaaggtagtttggttaattagttaattaatattataaaggcaaaaagaacattgaaataaactcatcagaggctcatgaccagagatcatgcatgcatgggattggaggggttgaggaataacacaataaggcgcccccacctactcaattgggaaagtgacctttcttctcaactgggacccatcttaattatattatgacataaaaagaataaataatatataagattcattgcccaaatccggaccacaaagccattgaaattaagacaagattatcaacagacctaaactcgtgtgtatgctcacgtaattggttactgcagtcaaaactacacatatatatgctttatgcatttaaacatttcatgagggacgtctccttattattatatcccccactttcactttcataccaactctttctctctatataaatatcaactccctaactcccttattcattcatatattaatatgccctttcaccttcactttgattgatttccattcttttctggctttcttatacaaaagtcaaataccaaagaccagaaaatgattgttacgtacgtacactgacaaatacaaatacatattataatatggatcacatcaatttgttttgcgatgaggtttggccctcgagccctactgcttctaggaatgatgatgaggatgacaatatttctgtacaaatgacagaaaatattattacaagaaaacgtagttgtactagttttgatgaaattagtagtcatgatgatgaggatgatgttaataataatggtgataatgatcagtttcttcatatcatgactaaggaagacattgagttggcttttaacatatgcctagataaggagaatacttaccttcctaaacctaactacttacaatatctttactacaacaacttgatcgttgctaggtttagaaccattcagtggtttatcaaggttagtatataatattatataatgtcctatatatataatatgatcgagttgaattccattcattaattttagcatttctcctttaatattattgattttattgttgatttgcttttctttgcatgcagtgccgaagtcggtttaatctctcgtttggaactgtttttcatgctacaaactacctcgatagattcatatcaatgaatcagaatagtattaataatattactgtaagtaaatatatatgaaacgtttgtataatcaagcactttttaattttaattattataaacttagtaattataataaaataattaaataaacatttattgggttttaattaggaatggaaatactggatgattgagttgttgtctattgcctgcttttccattgcctctaagttcattgacaccaaccctcctatgctccatcaaatcaatcaggtttgtatcaatttcatcgatcctatacctacgttttaaaaatttctgtctctctctctgtatatatatgtacattatatcgagattgaaataggatgctacaaatatcacttctcctatatattatgttgtatatatagaatgatcatatacatatataatgataatgattagatggaagatatggagcattcatttgaggccagtgccattcagagaatggaattgaaagtattggagacattagattggcgccttgcttgtaccactactcattcttatctccaactattcattcatcaacctcaccttcaacaacacatcattattatacccaaaattaatcactttcttcttcgagccatttcgggtatatatacaattaatatttattattaatgcctagatgtgtctatctaattgtttttgcttttgattaattattaattaattaatacaaaattataataataatcatcatcactactacttattaatagataccaaactggtggagtttagaccaagtgtagttgctgcatcagccatatggttttgcctagatggatttctttcaacatcatcattaaatatcgatcattactctcttctcactcgtttctttcaccaacatcaaaaggtatatacatacatatatataatagtgtaaccacacaattttttatgttttgttaatcggattaattgtttaactgattgatcattttttttggttgatgtaggatgatataataaggtgccataatatgatggaaaagctgtggagtagtagtaatgatggtgattattattattattattataattataattataatggctgcccttcaagtcctactacagtgttattgaaagaccgtaatagcatacgtgatgatcatgaaatctctccattcctaaaatgttacgattgtccaaatagaccaaggaagaagctaaggacatgttgtgatcaagagaagatattattatgattattattattattattatgtttgaaaatggtccatcaagcataaaagagataatatataaaaatagtaatagtgaatgtattgcaattaattaattaatgttggtgtcttgtctttttcaaaaattaattattttgacccatatgcataattagcatatttgtaatatgtattcatcatgtgttaaataatggaaacttacaaaattagtactgttgggttaggaaaaattccattcaataattacggtttccatatcttcctattgaaaatattaaacttattttttttaactacaaaatttattcaattagaccaactgagtctcaataatgttaacaacattaaaaggtagattatactttgaataaatacgattaacatataaacgagacactctagccataaagtgaacaactcagtcggcagattgtttgacagaatataaagaatcatcattaaaagaagatgaaaattatttacaatcctcaatggtaccaccaaaagttgatgaaaaagtattaaatttctaacaacttgtaccaataccaaacaatcagattcaataatattaacacctggaaaatcgcgcttcaacaacgaaagtacttccttgagagcaacgacttcagcaatctttggagaaatacgctcaagccgcaatctcaaaatgtcagccacgacccaaccttggtgattttgaacaactccaccaatatcatgtcttccctcttcgtctaacaatgtaacatcaatgttcaccttgagttttcataacctaatttagtccataactcagcccatctgagagataccaagtatcaaacgaaggaaacaaacatctttctttaggttgagccgtatatcaagtaaatataaattctataaacagtaactaaaaatatttaacttcacctcaaaaattcttaacttaccaagtgcatttttatgtagtgagcacaaggagttgcttcaagctagtggtgtaggaaatattaaaaatgtgcaagagattgagttctctaaatagtttaaaagttgagtaagcattgttgcctctcaatacttataatcttgttcacactaactcttgaacttttcttaataactaacacttttcctgaattgtagattaatgaactacgattgagtaaccatggtgcagtgtcagatgagttgtatgttattgctaacccatcaaatccaataatttatttttatccttggtgcatagtgaacgatattaaatttttggtcaaagaaagggatgataaccgcaaagcacaaaatagcggtgctatggtgcgcttgtgaagattgacaaaaattttatggcacacttgaaaaaattatggagttcacttatt

SEQ ID NO: 379216 - DNA, 4225 bp, Cannabis indica
cttaaatttatgattattttttttagttaacaaccaaaattacttgatgccaccacccttggatggacatttacgactaacttggattcatctattgaaaccaatcttccactcttaaaactactctatatatagagaccagaagtttataaaactggtaaacccaaaaaccactttcagctccaagatccaagagagatatagcagagagagtgaaactctcatggtgagaagagagtacatgtaaaaagaaaaaaaacataaagttagtctgaaagagaaaaaaaaaagaaaaacatctattcaaagaaataaaaaaaaaaaatcttacctggttgattcttgtgactggaagctcaaacttgtataatcgccattgttgattagtgaaaactcaagctagatctctaaaacagcttgacagagacgtagcctaagatttggggtgaactccaaattcatttagggtgttttctcttcctttctcatttatatttttttatttgtgccttgacctattgtgtgtgcttattgttgtgtgtgttcggatagattcaagcaagttcttggcttctagggtttcaaatcttttgctaggtgtgaatgttttcaaatctttgctgggtgtgaatgttttgcatttgtgtttttagggggtttctcgatcatcgaggaagagtttttgaatttcggggatacgatacaatatttgtggttatttatctctaagctttgcttagaatgggaaaatgttaattataataacgttgttagtacactgatggggggttttgttggggtaggaatagtgtaaatttctacactctcaaaattaaatcgtcttaggcccaatatgtaatctcaagaccgacccatagtatcacaacaaaatcatcaatagaaaaagggataagttgagaaatatttttttttattattcattatttaaaaatatcctcatattatatttcattaaaatatactcatttttttaagtagattgtccaatataatctcacttttcacttaaatttagcacatattttacattaacttaaagggtataacgagaacatcatctataaaaatgagtatatcttaaagaatataaaaatgaaggtaaaaattaaaataaataaagtaaacctcataaaaaaaaataactttagcacttattgttttttgcgataactactcacccaacatcaactttacaaaaacaaactaatattaaatatatttttgaattactacaagacagtttgattaacacaactaaataacatagttagttacacactcttgaatacatataagagatactcgctcatcaatttttaaatttaaaaacctaacaatttattatataaatatatgaatggccttaggacatgataaaaacacatgtagatatgatataattcattagtacattaaaacattcacaaagaacatgtcttcaaaggaacatcttcaatgggcaacttatcttgaggatatggacattcaatattcttggaattagcatggggcaacaaatcccaactctcaactttgaaagaagttttgaggtctgggaaaattgtcgccgtggtgttggagaagcaaacaccagtgaaggtgtttccaggtataacttcatacttagctggggcagtaacattttctaccatcatatcacggcacttgatagaagaaatttcagatagagcactcgggtcataatcatcagcatggttggtgttaaaagcattcactcgaaccacatatctgagggtcttaagcacaaatcttcgtgtgaagatgtccttaatgtacccgccacgacccgacgccgttctgatggcaatggcagattgtgcggtgcagcggtgacatcttcagctctcaagtccttgattccacctgacatttcactgcccagggaaatgacattgttatctcgagaaatgcatgttagccttcggattatgatgtgttcgcttggcattcccatcttaattccattttgatccaatccgctctttatggtgacacaatcatcatcagtgtttatgtaacagtcttcaattcgaacgttgctacatgaatcttcatccacaaataaaattatgaaattaaagtcttaattttttattataaaacataaagaattgtaataaagcaattaactcaccaggtgtgataccatctgtgtttggagaatctaatggagaaagaattgtaagcccttggaatataatattgctgcaaatatgtatcatttatttgcaatgtcatatatgttattgttaattaatgagaaatgagaaaaaaaaaagtgtggatttgaatcaaattaaatcaaacctggaatagagaggatgaaggaaccaagaaggagaattaagcaaagtgagattggagatttggatatcagtagagaacaagatttggagtatgtgtggccttcctacgttgtttaattgttgagccttgtactttgcccaccaacttgcaccttgaccatctatggtgccattatgtcctatttttcaatttaacaaattaaaaacaaaatatataaatatattaacttcaaatttaagggcaattctatccatggtttacccaaaaaaagaagagagtgtaccgtacatgtttttcagttttggtatatgaataatcaaattttaaaaaaaaaattaagacagtgtaaattatagtttctaaaacatcctgaaactaaaaaaaaattaatttaaataaatttaaaagaaaaacacaccaaataaaaacaagggtgcatgatcatgcacaatttaatttgcgtacatatataaaatttttgtttcaaaaaataaacaatataaataagttttatacctgtaattacaacatcagtgaggtttcttcccatcattagactactgtgtcttcctgtagaattttttcgtgctccataagaaggaaatgcttctaaaataattggatattctgatgcttcctgttcagtttcataaattattattttagtttatatatttaatcatggaggggtaataattacaagttcttagtacctgagaggcaagaataacagcgtctttatgaagaaaaagagtgaaatgactagtgagattaaagcttccagttagccattttccaggaggaacaatgagttgtgctccaccgtccgatgccagggggctgagatgatcaatggctgccttgaaggccttagtattggaagtaactccatcgcccacgccaccaaaatcagtcaaaaccgcgctgtgttttcgagaacatttcactgttgttgttgttgttgctgttttcaaaccttgggctgtacatgttttactttcatccaaaatcaatactacaattagtaatactattcccacgaacaaacgaaatgattccattgtaagatgttatttctgtgttttttttttgagattattgaaaacaattaacaattgtatttataaataagttttgatcttgtaatgtcttttcttaattgctttatttttggcaacggagactatttgggacatatttagaaatagctaaataaagtagatgctttaattgaaaacgagaaataagggttgagaaatgaaggtcacaattctattcaatgaaccacatgaattatctctaatttaggagaattctattataccaaccataccattaccgatgtccttttgggcagttgggaatttggatggcttacaattctccacattttttcaagtcctatgattttaaggatgatttggtatgtaagattggactgaattgtattagttagatttggatatttgactataaattatcataatactatactatatttgatgcactgactaaataaattacattcttaaaaaaaaaagactataaataaattacaagataacttttattaacgctttaaatataaatattaaataaaaataaaacttaacatcatgtattttatttaattagtagatatttcagaaataaattaaagaattattacataaaaaatataaattaacatgttatttacaaaaatacctccataaggtaaggacaacatttatacattttatgtgattttaattaccaaaataccacttacactatcacttacacaatcagacgatggttgcagggtggttgctgtgtggttacactcctagtctacggggacacgcccagagaatgaaatcaattaataaagtat

SEQ ID NO: 379217 - DNA, 1065 bp, Cannabis indica
gagttacacaaatatttgggacattattggaattcggaatacacatgatgttttatataatacataataacctcacataattttattttcaattataagtgcaaattatgtaattttgtataacatcactatcatttatattttaatgtataggtttaaggataatattagttagaatttaatacttaaaaatatcatgggctatttgacaccaccaaaatgtacattattgtcaatgttaattaattactacaattaattgatatttcagctcaacaacaacattgtgtggatggagtctcttaaaatggatttggaaatcgtatgattatatttcggccaaaatgtttttcttctctatataactgcaagtgtttctaatttccaaaacaatttaattatgctcgttataattgattagctaattgctattataattttgaatgcatgtttttttttttttttttgtaaagcttataactttgaatgttaagtgcttaatttcatatacttgtatatttttattttctcttgagatttttcacacatggttttactcttgaattttaataaggtcatttttttttgtcaatatatatattattaaaataggggttgatgaatattttttatctttttaactcatatagttaatgatttataattaataatatatatacatctctttaaagtctaattaaaatataagtgtgagttttttcaattgactaaagtttttgatgaggaagatcattccaactaaagttttgttgtttgatctcctctctaactaattccataaatatattgtgtcattacaattttctcatgttattgatcaaatgatcttagaaatctagaatggaaaatttagtagattagtattagaattccaatctcaattattttaacaatcaaatatctcttttatatcatttaattactctttttgtatattattattattttttaattaagtttaattaggtgatgctaagtgtaatatatatcgtattttaatttttaattaaataatatatttttaaaaaatttaaaataagattt

SEQ ID NO: 379218 - DNA, 2545 bp, Cannabis indica
ttacaattttagtatcaattaaagatgctattattcatgtgtcataagcaacattaatcactatcatactatactgtatatatgtattgaaatatatatatgtatatatatatgatgatgaatggtataatcaagatcagcttttcaccagattattctcttacaaagcttgtaaccagagaagagagcagagagggctataactagaaaagtggcgaaagagaatccgagggagacgatagaggccttccaaagagaggaagatgattccatgttcttaatggcaggtactgctactgatgaagatgaaaccagaagatacaccaacaactgatgacaacacataataaatatacatatgttatatatatatatatatatagtaattaatcaaatagagtacttaattctctgaccattttcggttttcaacaattaattaaacttacttgatcaacaatgaagctagtgtaatcagagaccatgtctgacataataatacccttgtctgcaatctcaagaatgcctttgaaaagttggaaaactgagtatgcgaaagctaccatcgttattgtgaaacagtacctatattacatatatatatatacacacacaataatatcatttagttgacaaaactatatatattatatatgtaataaacaaatttgttatgcaaactttaattctgtttgttatacaaatttgtccattttgtcaagtcttatatagttatatatatatttttaacaaacttctatggtttttttgaacaactttgatactttgcaatatattataaacctccaataaatattacacaaagtatataatcattcatccaaaaattaagaattttgttaaaaaaaaataaataaataaataacaaattcataatgattggttgtctgaaacagcaaataaaattcttaaatgaaaaccactaaataaaattccaagatcacataatcaaaacactttgttttcttgttatatggaacaagtagtcactcttacagtaattcggaatattccccaaagctagaaggagatgatgatcctttgattttcttctttggtgcatggatgacaagtgaaagagcagagacaaaagagaatagaaaagccaagaacctcaagaagaggctgaagtggttgattgtaggccttgagctccaaccagtagaagctactgagatagagaatggagatggtgtttgaaaattagaactattgttggctgccgaagttaatggcaagcctttggccatggatttagggagactcaagtctttttctccttccattaatgattcttttaatatttggtttaaggttcttctcttgtttttgcttcttctagttattatgtgctttggaaaagtttggtcattgactttgtgaaatgcaagtctttttagtttgttaattaggtaatggtttgtgttatttcaaggaagctgctgttgtcttagtgtgatcacttggtagttataagtttgtaagatattagcttagtcaaggccaatcagaaactgccacgtaagcaattttgagggtgcatgtttagtgattggtgtgctgattgaagaacagtgctcaactcggatagggagaacaggtgatagatagagacatgtccaactcccaatttgggtcaaaattttaaagcataagctccaaagaagaaaaattgtcttccatataagctttgcaattggaactatataaaatatagaggcattggtatagcaattattaagatattggacaaaaaaaacaagttcttatccatttcgtctccctcgctacaaaacaaaacgttaataaaatatgtagagaagtagagttatattatactttaatattgtccaactgatttatactattcgaggttgttctttatttctttttttaacggatgttttaaggggtttttttcccttttctgcttaacgatgttccaaggttttatcctttactaattcatggtgttgttagaggaaaatggacaccaaaaaatacaaatattcggaatagaacctagagtaactaatactcaaagaaaaatatgcgagtatgcaaataacaacagcttaaacataaataagataaatttatagtagttctaaaggtttacttcactacaagaaaaccctcttttgtcggcgtatttttgcgctggcaaaagtacactaactgcgccgacaaagcttgtctgggaatcttggtcggtaaaagactttttaccggcgcgtagactaaatgcgccggcgagaaatcacgccggtaaaaaagaagcgtcggtgttaaaaaatacccttatccgctatgaacctgctttgataagcttttgccgtcgcaatagtgcgccgacaaaactattagcgccaatctgacggttggcgccaacagttttgggccactttttaccggtgcaggaatgcgccgacaaaagtatttatttattctttttaaaattaattaattataattaattaaatataattaataaatttttttaaataattataatattatatta

SEQ ID NO: 379219 - DNA, 1444 bp, Cannabis indica
gatagtaaatgtataatagttagcagatatgtgtcctattttaattgatcctagacaccaagttagacactaaaatgatttaagtactaaaatgttttttttgagatgaagtgctaaaatgttaaaacaaaataaatactagtaaaaattaacctttcaatatcacatattacaaaaaaatgctaaaacgtagtggtgtctaatattattttatgtattaatattgtcattagtccaactaaatatccagtcttatataatttaataatataataacttttagagtattactagccaatcataagacgatatatctagaagtgttaggcaccattagtacccaatatgagaaatactaaagggcaccaatgatacctaacaccctcttatgtgtcaatattattattggtcaaactaattatcgagtctcatataatttaatataataactttttagagaatattattagccaatcacaaaacaacatgtttagaaatactagaactactggtattcaataccaatgctcggccaatatcaatgctgtattacaaatgaaatggtatgtgtcattgggtcaatagataatgttgaatttcgcatttaattctaattaaagtggcgtgatgaacactcataatttggttctcttttacccatacccaacttacttgaaagtgatatatcttcaattgtgttcttccattgattatggtatgttatggaatggaatggcaatgggtatacatgtacttgtgggttactcattaattaggttaagagcataagtgctataataaagtagtctattgttatgggttttattttttttttttgaaaaaaatagtaatgtagcaacttcattcattcaaactatcatccaaataatggaagataacctaacaggaacaaccctcccattataggtacattaacttatacttatttgtatagaatttgaaaacaattttatatttttgaaaactttaaaaatatggggatccacacaaaatattttgaaaactaaacctatttattagagatgttcttaggtggttcatttttttatatgaaaaaagatatcaggtatgcatattttatcctcagctctttcgactttttttttgctctttcaacttaatatcaatctcagagactatcgaagagtagattaagtcttatacacagttcttaagatgattgctagctgagactctgccacacagaaaactatggcctacccaaaggacccatagacacatgtattatatactactgaaggagggcctaccatggttcctaagatagttggttccaattttgatgggcttgtttataaaaataaataaaattgatgggttcatgtatcaaaaataaaaatgattatttacaccattgaaatttttaattttttttactttgaggcggaatttttttcaaaaa

SEQ ID NO: 379220 - DNA, 2375 bp, Cannabis indica
cactagcataacaattgtaaaaggacaatctagagtttcctaccgaaatctgaattcaaatacactaaaacaaaagttatattttggctctaaaacatataccatatggtagagctcgtcacaagcttcgaaacggtatatagaacgtctaaaacggacacaccagtgaaaagttatggcaaaaacacgattctcgagttctcgaggctgcccgaaacggtaaaccggttggccataaccgattgaccagtttttcaggagcgaaaatgtgattttccaagtttatgcactcagcgaaacggtatcggaacctgtccaaaccaccccaaacttcatatggcacatatataccatacatactaccatccttacataataaaatctaaaatcgagcctgtaattggcaaacgccactagtgttcggacttaagttataaaaagttctaaactcaatttttaatccaaaatcacctcaattttagcaaaaaaatatcagaactactcccataactacctgagaacaatcctataaggtcagaacctttataactattctaattcgcaaaactcctatatgaaattgattgtttttaaactcaaaatgaaataaaacaccttaagctttctcgctctgagaattcactattccgttactacttgagcttagatcgctaaattttggattgaaaatcaaagaaaataaatatagaagggcgaggatttcatcaaaaggagaagcgagttcgtatattttctgtttaaatatatatatactgagaatttttatatataataatatattaataatattaatataataatatattaacaataatatagacagtaagattaaaaataataataatataataatattaataaaaattaaaaaaattattaatagttattttatcatttctaagccactaagaaattttacttccagagcactacgccaaatttaatatactcgtaattatcccaacacttatattattaactcatcacaatattctcacaaattctatcaattaaacctgttacgacatttctggcccccaatcgagtcttcaaggttgctaaacttgaaaatatttttattacaccagtaactcatattacattcacatataccatttaaatctctgtaatttataaattacgcttatttatctacttatagcaaatttaaaatttatgttaaactagattagtaggatcataatcctacttattatcttattaacttataatataattataaatcctaattatttatcattaggcatatcgggatattacaggaaaaccttatattaaactcttaaaaaagttgtttcagacactctctatttatttggtttttatgagagttttttaattcattttttttataattgtttacgttataattttttagggctacttgtaattgtttagaaagattctaataatttacaatattgaaagtaaatttaaaataaatacagttgctgcataaaaaaaaacagtcacatgtacaataaaatatttaaactttatatttgaatatatatattttttttaaatttacaaagtagtcataaatactaaaatatagaggatggaaaacaaagattaaaaacttctttagaattcaaacaaataaaatatatatataagaggtgtaatataaaaatttcctatatatttcataaattatttcttgtattatgtgacgaattgattaaacatgcatctcaaagattatatcatattttcatttatatacatatgtatgtttaattttggcattgtttagttctaaaaatagatcatgtattccttaaattggtgtgaattaattgagattagagtagctttatataggttggcattgtcttaataaatatggtaaaagagggtgatgttgttgcctgctcacaaaggcatcacatcatcctataataaatacacaaaaatggcacccaattcatccattccttcaaaaggtatctttgcttttcctcattatatcattagagtaatgaaatgcacgcataaaatacacactatatgaaattgatttatgtcgcaagttatttttgataagtgaaatccatcttaaaaataattggttgaagtaatttgttatatagatgtgtgtcatatttgtgtttgatttatgtgtgcacatatcatcatttttattgttaattatattatatatgttgttttgttaattatatcatctttatgtgtacgtgtaacttatttagtaccatatatggtttattatatatggtagtttattttagatttatacaaagaatgatatgagtaatttgcggcataaatatttaagtttaattctcgattgtaaataaatacttaag

SEQ ID NO: 379221 - DNA, 1612 bp, Cannabis indica
tttttttttgctgaaatatttgatgatcacttttattaattcagtttttcaattccaatgcactatgttaaaagctgaaatttgcaggtgtttttgccataaaaagaccatagacatgggctacatatgctctgtttgcttgtctatattctgtaagcatcacaagaaatgttcaacctgtgggtaagatactttatcctgttaattgtagtgcaacacttttggttcttcttacaaatgatataatttacgagttggtagatctgggcctatactaggttaagaagtttgaatcttgctaataaagaaatttcttagttaatggaaggtggttgagttcatatttgtttgtctatgcaattttagaaagttgacttgttatcaagaggaaagagttggtgtcaatgttactaagtatgggattgttcggtggtttacaactatttgggcacgttctttaactagtcttttggtagtgagttatagtagtttttggcagccatgttgcggaaggggaaacctggaaaaagcccaaactagaatgggctgccatggtggtgtattgttagtatccgtcgttgattaagcatgaaactagatggcatggcggtttgtgactgctttgaaaccctcctctcataggctagtcttgggttgtaacacccgttcttttagcacgactttgctatggtaccatgaattatgttgtgtatacatatttatacacgtgcagtcgtattgtggtcgtctaagtaccgttgtaattgaggagcaatctcatttatcaaggttttaaagatctgcatgaacacatttcttttatgtatgagtttggaaatttgaggcgtgctggggtaagtgtatacctgtgattggaacatatgctcatggaccaaagtttcttttagcaatgacatggttagtttgttaaatagctcatcactgtattcgtttgagcaatgtgaaattttcctctgttgcttgaacactttggtagaatgagtcaatattttatttttgtttaataatgtgaacacagttgaaatcttaacttggtttggtaaccttgtagaagagaactaaatggatgctcatgaaatttatattttactgtgcagatcagtatttggtcaggtccaatctgacaatgggtctgcatctaattctaacctgaagagaaagactacataaacatgattttgcttttctttgaagcacatctggtagtttggtttcttatcattttttcaattttacttccaaaatgaaacaaatgatccgtacatcttacatgacttcatttgcgggtgacaaactcagaagacttctcacaagtcacaagtcacaagtcacaagtcaccacagctcaacttctgagacaggagaaacagcttgatcggattgagagttctccaagataggttggctcgtgtttctttcacataaaaccctttaaactaatgtttgaattacatagccgagaacatatgaatatatctaagagcttttgttgaattgattccctcaaattaaatatatatctttatatattaaaagtgccaggataattcttggtttaacgattctttttttagccttacacgattaactt

SEQ ID NO: 379222 - DNA, 1989 bp, Cannabis indica
atgaagaaaaagaaaggaaaaaagggctttatgatgataaaattagatatggaaaaagcctatgataagatggattggaactttattgtggctacccttaaagggctcggatttcaccaaacgtttgtcaaatgggtagaaaaatgcattgttgttcagaagatggggctactcataaacggttcggttcaaggtatgatctctccctcgtgtggtcttcgacaaggcgatcttctttcacctgctctatttatcattgcggcggatgtcctgtctagactcattacggaaagaaaaatgaaggacacattcaaggattcaaaatctctagggatggaccggccatcactcacttaatgtttgcagatgatgtaatgttatttggcaaagcgactgtgaaggaagctactggtttcctaaaatgtcttcaagaatactgttctgcgtcgggacaagcggtgaactatcataaatcaacggtgtacttttctaagggagtgtctactggggtggcaagggaaattgcagaccttctcaatatgaaaagaatgaagaaggatgcaacatatttgggtctaccgcttttcaaatcactcaatcggtctaaggatctatatttcctagttgatagggccctccaaagggtaaagatctggaaaactaggctcctctcaaaggcgggaagagcctgtctaatacaatctgttggatcctccctaacctcatatgttgctgcctcagacccgatacctagaaatattgctcaaaaggtagataaatgccttagagacttttggtggggggatactaatgataagaggaaaattcaccttattgcctggaataatctgtgccaaccaaaacttcgaggtgggctgggatttagaagcactgaggttataaacaaagcctttttggctaaatgggcgtggaaagcgctcacagataaaaccagtgtttggggccaggtagtgaatgctaaatatattcgaggcagaaacttccttactattgaaagaaatggtggtgactcgggtttttggaaagctattttagatgctcgaggggtgctggaaaagggcctatgcaggaaaataggcaatggtgaaaagacgtcaatatggtttgatccttgggttcctgcttcaaaccgaactcctgtgcctttgaaggatgtgtcccatggagtggcgtgggtaaaacagtttctgactagcaccaacaggtggaaagttgatatggtgcgagagtggttccgggaggaagatgttaaagctatcctaaacatcgatcttcccgatgtcgacggaggactcttgggtttggatgggggagcaacatggaagtttctccctcaagtcagcgtgcagatttatcaagggggagccctccccacatactgctgacggggtatggaaactaatatggaattccccactccacacttgattaaaatttctttagtggcaattatatcgtgatatcttacctaccaaaggcaaattggccgttcacttgactgtgatcccttactactgcccaatgtgccaaaaggggacggaaacatccttccatcttttctgggcctgcaactttgtcaaagccatctggtttagcagtggttggggcatcaggactgaaaatgttgatgtgtcaaattggaaacagtggttggaatggtttcataaagatccaaatcgccctcctaatgtatcgttctatgactttataactactttcctctgcattgttgaagtagtttagggagaaagaaacagacgagtacatggaggaaaagagatggacttgatgcaaattcttgtaatgctacggcataagattaatgatcacctactggtctcctcagaatcggtaaatgaagttctggtgtggaacccgccacctgtgtaacgccctaaataattaggcacgctacccaaaatacttataaagccctaatcccctaaccgggattactaattaaaatag

SEQ ID NO: 379223 - DNA, 9629 bp, Cannabis indica
agaggagagagaagagagcatggaggagtcaaaaggtttttcttccctgcaatacctttctggtgaagagcttgtctttgtaattcttgaagattcaataaagagtttttatggtgggctttcaaaatttgtgtctcaattcttaattagactatttctaatctaagaaaagtctatcaaaatggtgttgtgattgcgaacacgagagctacgaagctgagacgacagacagctaccatggaggccctacaagagcgtttctttgtcgtcctccaagtgttccaacaacatcaattttatgctaatagaaagaagtgtgagtttgggcagcaacaaacaatttatttgggtcacattattttgagacaaggggtagcagttgatcctaataaagtggcaaaaatgaaggagtgggttgtaccacatgtaatgtttggtgaaaatgaattgtactctcattaaaaagtaatacacacatatatatacatagctaggaatctattatataaaactatgtaattcggaaactagagttagagatggaaatgggacgagttaaagacggggagtgctcccccatccccgttaactattttaatacccatccccggatattttcttttagcactttccatgggacattgggaccacttttcatcacaaagataacaaatgctcttgttcatctgaagtagcccaaccagtcagccaatagaattcaccaaatggtttccatttgtgtttaacttgtagtttgtggttgtcctcgtgagaagtatgacatatgttgcttgttgtagtgagttgtgtaaataaaaggaacactgaacaaaaattacattcaattttgtacaccaacttcatcacttgagttagatttctaggctccaagatcctcaagtcattattttcttgaaccaatttaagaattggtttagtgattcaatgtaacctcttctaaaaacattgtccaaaggtggtaacaactcaataagtcttttgcaatattccttaattgttacatcttgtagtacagctagaaattgctcgtacaaagacctttcctatattgaatgaaactggttcagcattgacagattcatttattccattaagatcatcggtcttattagcaatttcatttattctcataacagcatatgcctttgctattattctcgttgataccacagcaaagcaactccttcaaagcttaccaaaactacttctaatttctcgtcattggtgaatctttgtaaggaaaaatagcatttgaccttcataatccaaccatccagatttgttccatcgaaaataggcatttccacactaagtaacaaaaactcttccctatgatcataataatgtgcagaaccctcttatgtgtttcctatcatcaacaataaactaagagtcatcttccttgtatcggttggcgtggtcatcttgctagcttctcttggtttcagaaaagcttatcatatattttccaatggacgctatttattccttaaattgagcttacttcacaactaacctcttctttcacaacctccacatatttcttcctgtttttaactcttgctcttacttgttgagagacccgctcatgctaatttgatacacactagattagataaaatctaaaatgcaatttttgttggtgttgaagaacaaattacaaaggtttgaagctcttagacgcttggtatctccacagaagagcttcaactcttatcatagtcacaataagcacacatccttaaaagagaagctcttgaagtgcccttaactacccaactagttctttaaaatagctcagccacccaacaaccaattaaaataaaacataatgacagctaagtctaaaaataaacaaatgaaccattatttcctttcaaatttcaatacagcttataaagcaaagtgtattcttaccttaagagaggcaagaaactgaaagctatcataacagcggacatacaaaaaccgtctcatgcatagagcatatagttcctcatcataatctaaagtagattttcttctttcatcacacttctgtgtatcaagatgatcccgccccacatttgtcttacccagcaatcctaaggaaattttggatcaatgttaacacacaatcattcaaaacatgaagcttctgaaaaataaagatatgtaaaaagaatcatatatgtctttctaattgcatcgaattggataaatttatggagcgaacataaacttaatacacattttattcaactttttttttttgacaagatattttattcaacttactgcatgattttttttcttttcttccttaattaagacattttctaagaattcaagttgttcaaactatttaagcttgaatctatcatgagtcttacattagcatacaaaaagaatggagagaaagatttactggctgcttcagcactaattgagaaaattaccgttcagcaattggaaacaacacatgtcgatgaataaagaaacataccattagcttgcccaattcggcgcttaagcattgtcgaaaagcataagatgtcgaaacggcaatcgaggtcaatgaacacaaccagccgccccaaccctccataatgaacaccattccagtccttgggaagaatgcaactgatagcagcctaagtgtaacaaatttaaccattctcaaaaattacaaaccctaaactggttcagcgactgaaagggaagagaaatggttggttatacgcaagaaaaggttggaaagcctaaaatttggacctgaattaggatgagagttttggcagaagaagaaggtccgacaagctcgagaacattgcccacgcgtagaggaacgcgatgaagcggcggcagaagaagcaaaaagggacgttcgattgaaaatcgagtgagcatatcacctgcgctctcgtctccgtctatccatcttctcacctccatccccaaataaatggcatgattttggcgccaagtaaattaaaatacaaccacaaaaacccagaatccgctaattatttgaacttagtgacttttggttggagataatgaaataaaatagaaatgaaacaatatatactcgatttggatttggacatgaattaagagtagtggatgttaagatgaaccgatatgctctctcttggagaagagccttccgaaaccgatatgctgcaaaagcctgatatcaccatggatgatctccttgccaaagcttcaaaccttaccgtgctggatgaagatgggtgggaaatcaacgaagctcggggagacgttgctggaggtcactgcgcgaagggccgattctgttccaataaaccgatgagtcgtcctcttctgaagacgattttaggtagggtatgaggaattgctgataataactggggtgtggaaattaaacacagcaataaacaatcaagtttcttggtgtttacattcaaatcagcacaagatctgaacaggatcttgggcaaaaatccttggttcctcaattatggaactctgattcttgaacgtatgacatctttgccacaagattaggaaaaagaacttctgcgattcccaatctgtggacgggtttaccatcttccttcccgttcaataactcaaagtaatctaactcgcttggcaagtctagcaggggaggtaattgacgttcaaatggcggatattccacgaattgtaaccaaggatttctttacattcaaagtctggtgtgatatcaccaaacctctattccctggccttttatttccttcgattgggggaaagaaatggctcccgttcaggtacgaacgtcttccatttatgtgctttaattgtggttttttagggcatgatactcaggtttgtacaggcactcccaagatgtttgaagatggattgggcaattggaaaaaaaaaacatatggaccatggctcaaagctgatgacaaacgagaagcccaaactgtctcaaaggcagcgaccaatgaattacttcagcagcatgttcaaaggccggtgatgtatgaagactcttcgagcaatatgcagaatattatgctgggagctgaagtccctggtgctattattaatcctcctggcaatttggaagcggtgaattcagggttgtttattgttgattcgaatgggaattcctttgcaaacttgtcacgacagcaggataacaaggtgccaatgatggaaaagggggaaagtagtcaagtcaattgcaagaggaatggttcttggaggaatgatcatgaatccttaaagggccttgctgctatggacatggagagtgtatttgattcggaaggcttgaggaagaacagaacgggtaacgaggttgattacaataaattagtggaaattccaataagttatgatgttgggattgagaggttaaacaaggaagacggaccattaaagaggagaaaagtgactccaagaagaccaaagatcaaaggaaaaggtgttcagacagagaactttatagtgcagatggctatgaatgaagggagtactctttcaaggggaatttctaaggatttggatttgaaccttgacgacaatttgaaagcggagaacctaggtaatctaggtcgccgagcaccatgatggccatgttttggaatgtccaaggacttgggaacccttggacattgaatactcttaagtcccatttcaaagattatcatcccgggatgatttttttgtctgaaactcgcttaaacagcagtggtatggaatcggttcgagttcaattgggttacaccgggtgctttacggtagatgctcgtggtaaaagtgggggcttggcgcttctttggactagtgatttcgtagttcaaatcaaatcctttacggtctctcatatagatgctttggttgaaaacgatttggggtttatgtggcgttttacgggattctacggtagcccagatccgggagggcgagtggagagttagaagttgttatttcgcctaaagaatatgtttaactatgcttggatttgtggaggtgatttcaatgagatagctagttcaaaggagaaaaagggagggggtccgaaacccgattatcttatgaaaaattttagacaagcaatgtcggattgtcatttgaaagaaattgatcctaaaggaactgccttcacttggtgtaatgggaggacatccaacttaatttttgagaagcttgaccatgtgctatgtaactcggattggatgaatcacttcaaaactaacaagaccactctccttaaatggtggaactcggatcatagaccgattctattggaagcttttcaaggtgccaaagggagtttgtttagaaggaaatgggggactcgatttcattatgaacatgcttgggcggataatgaagaatgccacaagattattaatgaagtttggagagtcaaagcgaatgggaagcctattgatactcttacgcatttaatctctaattgtggaaagagattacatgagtggaatattactcaaaagaatgccactttttctagttccaaagagttaaaaggaaaaattgattggttgtctaaatcttcaagtatgagtgattggatagcccgtcaaaaattggaaaaggatcttaatggggtggaagaaaaaagggagatgtattggagacaacggagtcgggcgctttggttaaaacatggggattgaaatacaaaattttttcacttcaaagcttcggctaggaggaaaaaaaatacaattgaggggctgttcaatgacaatgggaagtggtgtactgctgagaatgaaatcacagaggtagcaatcaattatttccaaaaattgttttcttcttcaactggaggaattgatgttaaagaaggtcttcgtgggaaaattccttgtcgcattagtgaagccgataatagagcactccgggaacctttcaccagtgaagaaattcaagcttctttgttccaagttcaccccttaaaggcacctgggaaggatggattaccgggtatgttttttcacaacaattgggacttaattaaagatgattttactgctgcctgcctggacattttaaatcaaaatgcggactgcaaggctataaatgaaacccttatatgcctcattctcaaagataaaacagccagcaaagatgtcggatttccgacctattagtctttgtaatgtggtttataaggttatttcaaagtgccttgctaatcgaatgaaacttagcatgaattccgccatatccgacaaccaaagtgcgttcattggtggtcgaattattcaagataatgctattcgaggcttcgaaagtctccattgtatgaggaaaggtcggttcgggaatggaagaaagatggcttttaaacttgatatgtctaaggcatatgatagagtagaatgggattttttggaagcaatgatggagtatttgggctatgaggaggactggattaagaaagtgttgaactgtgttaaatctgtttctttctcaatcattttaaatggatcgatcaaaggattctttcatccgagtcgaggcttaagacaaggagaccccctctccccttttttatttttaatctgtccagaaggactctcttgccttattcaggaagccgaaagggctgggagaattcacgggttacggtttggaagcttggatatgaggctctcccacttattctttgcagatgatagtctcatctttctagatgctaccatggaggagtgcaaggcaataaaagaggtgctggaacgttatgaaactctttctggacagtgtataaactttgagaaatctgaaatgtgtgtgggcagcaagatcaaaacagccgtggcagccactttagctaattacttgggcgtttctttggtggaaaaccatactaaatacttgggtatgccttcctttgtgggaagaaataaaaaacaagtttttggcataattagagataaggtggaagctaagcttcgaggttggaagatggggctcttctcacaagcgggaaaggaagtattgatcaaagcggtgattcaagctattccttgttatatcatgagttgtttcagaatttcaaaaggcattcttaaggagatggagagtatgattgcgagatttcagtggggatctacaactaataaacacaagttacattggggtaattggaagaaattgtgtagactcaaggaacaaggtggtatgggctttcgggatttggaagattttaacaaagcaatgttggccaaacaaggatggaaactcatcaccgaaccagagagtttaatggcaagggtgcttaaagctctctactttcctcaaggtaactttatgaatgctaatataggccattatgggtcaacagtttggcgaagtatactatggggtagggaaatattacttcaaggttctcggtggtgtgttgggaatggctgtactatacgcataaatgaagacgcatggcttccaagaggcagacccttttctcttcgtacaaaagttctactccctgaaggtaccactcttgacaaattaattaatactgctggaaaatggaaaaatattctaatagttcacagttggtttcataaagacgatatcccttgggtgcttggcattatccctctcacttctcgtcctgattggatgtcatggagcttaaataacaatggtaaatattcggttgcaagtggttacaaaactagatttatacatacggatctagctgaatgttctaatacaacccctttgaaagcgtggtggaagtttatatggagttctaagctcatcccaaaaatgaaaaatttcatttggcgtgtgtttaatcaatggattcccacgaaaatagaattgtcaaaaagaggtatgtccttggaaactaattgtgattggtgtcaagagaaagaggaggatatttgccatgctctatggttttgtcctaaagttcttaagatatggaaacttgctggttttgacactcaaaattttatacacatgccgaaagcttctgatgttcttttttacttatggggcaaacttcccaaggaagatttgattcaatttattggtctttcttggctaatttggcagtgtagaaatatcttcatctttaaacaccaagttcaagagatccatagttgggtaagatgggctcttgaaaagttggatgatttttttggtgagtgtaaggaccctcggcaggacaacgctgtaacagcaaaaccaaaatggggtcctcctccttctgactgtgtaatgatcaatacagatgcctctttaattgatgataaaatggggtatggattaagtgctgtgcttagagattcagttggtgatttaattgtggctgaaactgtctttgttccaggtatagcttctatagtttttggcggaggctgctgctgttaaattgggggttcgccttgcgcaaaaatgggctgtatcgaaagccattgttgctgctgattgtttaagtatcattaacagcctccaatcgagttcggctcttaattcagattggggcatgctttgcagagatattctcagcctcaaacatcattttctttctttaaattttactcatgtgcatagagattgtaatgctgtagcaaatgctttagcaatatggagtcgaatgacccattcttcttgtatttggattgattctttgccctcttgtgatgctgcctatttaatggtagataagcctagtgtggttgcttaataagatgttcattttacaaaaaaaaaaataaataaaaaaatagaaatgaaacaatcttcattttacttttttgtttggttgcatattaaagggctggaatgtcattccagtaaaatggcattttcaccattttagtagaatagctattccattctaaaaaattaataatttttttaataatttttttatgcattttaaattttattttattcaattccattcatattcttattcctattctcgatctcattcctgtattttcattcattctaaccacacgccactttaaaatttttaaccctaaattactaaacattcatataaattccacacaacaaataaataatgcaaaaaaagaaatataaaaaacaaggaaaagagattaatcaaaaaagtagtgagggaaagtcattttatagttcgatgtggggaataaggtctcaaaaaattctttattggatactcctaatgcagaggacttgaaccctggcgattctgagatcgaggaataaaatcaaccgaaactcgaaaaaagtatgtgagagattatgagggcatgcaacttgaaaaagaaaaaagttgaaaaattatgaaattctgaagctccgtaaacggtaatggtgaaatagggggaaaactcaaatttttatacccaagcagaaactgttccatcgttatgatgactggtcgaacggatgggaactattggggaaaaaagagtcagagtaataaaggctaaaatgatgcttacctcgaagtactgaaccaccaaaataaagcatgtagcttctttttaaagagggaaaaaacgatcttaccctctagcaattaaaaagtaaccttttatttaaaaaaaaaatactttttcgggaacaatttttatacccatattttgagcaataatatg

SEQ ID NO: 379224 - DNA, 2954 bp, Cannabis indica
ctctctctctctctcttgattttggggatagagttttgcaatgtccctttttaagcatgagcttgggctttagagttgtattttcttccaatttttttaaatctcggtgggttcccttggattgctatttgggtgttctagctctaatacacaattgctcgtgttgagctctcggggttttatggatgtagagggagggggactcgagttctacccaaacagatgcttcccttgttctgtcttcttcaccatttagaaccacaatgggaggctgagtttggacttttctcataggaagatgcacttctttacttttggcctgcttgtttggggcttttgtgtggccttttgtgcatttggggaaggtctttgaagtcgttctatttcttttttttgtttgacttatatttttgagttttttcagtgttgtgcaccctatgtccttagtgttgttagcgttaggcctttttttgaagggttttgtacctttaaatgctcttgcgtaagccttgagctctttgctccttttattatcggcgtggttggccaacagttgatcatctcctagtgaaatttgtgcggttctttttccgcatgacttgagctttatccctttgaagttcaccattcaaaaatccttaaaatataagttaatatattacgagactacttactttacatcattattctaacgtttattaatatcatatgtttgataaatctagattttttttaactaatcaaaagttttattaaataaaaataaaattttggtgatcacataaaaatacttttttataaacttaaaaatccaaaacattgcaagttcatgataccccacaactttgctctttcttttttccattagcgcacacatatacttttgagagaaaggaaataaagtttttagacaaaatattttgagacttgttcaagtctttgctttttctttcttccattagtgtacacacatatgtatatatattcgatggaatattgtctttgaaaattacatacaaataaacaatacaatttacgtagttcaataattgaatttatctagttcacaaatcaatattatttatgaaaattcttcatacaattttggcaaaaatttagtacaagcagtgaacttgataccccttctttcttgttcctatttataaaccttagaaatggttactaatctttaagtgagattgcgggttcatgtgttctaatgcccacattttacattcttaaggtaatacaaatattgcggaaaataaaactttgagagaaaatataaaaaaaaatatagaattgaaaattacccaatgaatacaagtagtgtacaaagcactaatttatacagaaggggagaagagaagaggctaacaaactaagggtaagaaagggaaataaagaaccaactaacctacctaccttaactatctaactagttgtcacttaacaaatataacaaccatgaatacaagatacaaaattctattataattttgttaccccctctcccctcaaggtggactatatatcatatatagacatcatggtagtatgggatgaaagagtggaggaaggcaaaggcttggtgaaagcatcaacaatctagagagaactagctaccagaatgaggcgtatggtggattttttacttttgtctcagatgaagtgaaagtctagttcaatgtgtttggtgcgttcatggaaggtggggttgttggcaatgtgaatgtcagagagattgtcatagtagatgaatgatgaggtgtctgtgatctccctactagttgcagcctagacatggtactctgcttcagcggagcttttggagatggtaggttgtttcttgctgttttaggagatgatatagtcacctacaaatatgcaagagcctatggtcaaaggcctagtgacagggcaggaggcccaatctgaacctgagaagccatgaatatgccatgcaaggataattttgttgagtagaggagtccctctcctagattgcctttcaaataatgaagtaggtgatgtagtgcttgcatatgtggtgtccaaaaactggctaagagtgttgaaaacataggtgatgtctagtcttgatagggtgagatacagtaatcgtcatatgagttgacgatatgaggaaggctcttcaagaggagcgccttgttggtcatctagcttgatacgaggggtccattggaatttttgctagtttcttctcgcatagcatgtgccttctatgagttaagtagtgtatttgtgttgtgagagacagagaccctctagtgcatgagcagtttcaaaacccaaaaagtacttcagtggcccaatagtcatgaatttgaaatgtttttgtaaggaactttaccagttctttgacagcgatcacatgtcttgaaatgttactcatgtctagagttgtaatattggcagccaagaaattcacatagtctgcaaatcatggcactaataagctttcccttaaacgaaaaaagttgttcatcaagagactcttcatttatttgcacctctttcgtgttctggctctcctctatttccaatcttgacaaatgatgatcaaccactaaattctttgtgcccttcttatcttttatttccatatcaaattcttaaagaagaagaacccatcgacttaacctcggctttgcatctttcttagtcatcatgtacttgattgctgaatggtttgtataaacaatcaccttgttctcgatcaagaagggttgaaaccaacatcttcttttcagtagtggcataattcaaatgatcattattcttctactagcatagtagatggtacgaaaaatcttgtcaatttgttaatccaacacaactccaatgacataatcacttgcatcacacataatctcgaatggcaactcccagttccgtgtagtgacatttggtgctgaaatcaatttctcctt

SEQ ID NO: 379225 - DNA, 2509 bp, Cannabis indica
aaaaaaaatacatgttaattgacttgagtttattataccttaagttgcttggcaacatctctggcagaagatccagacacttcaatccatgttttggagaaaagggcacaggcagatagcataaaaaccagatagaacaatgcatgaaaaggatttgcagccatatctgctaagctgcacaaatgaataaaaatcttcagtgtgtatttgaaatcaattaaatttcaagattgttgaaacaagagaaaaattcttttgttaccttgaaggtgcggtgatataataagctataccgccaacggggacatactgaccacctgaatactcagactccttccatatgcccaaaagatttaccagaaagtttccactgtacctcctatagagtaactgtataataaaagaaaataaaaggttaagattggtaaagcaaaaaaataaaactatctaatctgtccatttaaatatcaaaatcaatcacctgagagataaaataaaggttggaaacaagtgcagattgcagaatgattggcatgtttgaggtgtagaacaatttgataggataagatccttgttgtccacgggcattctttgacctcacagggaggacaacacggaacccttggaagtagataacaatcaggaagatcaggacagtagcgaggagattcgtaacattggggagattttgccggtaaaaagcttcgcgcagagcacgaactttgtctgttctggttatcagtagatggaacagagcaataacagcaccttcaaactcagctccacggccgctgttaatggtggtcgggctgaatgccttccatattatattttcgctgaaaaatcatagcaggtcaaaagaatgagatatggttgctagtaacatactgctaataccatcgatctatccaaagggagataagcttagaagaataaaactcaccaaatattggttgcaatgaaaagagaaattccagaacctaatccgtatcccttctgaagcagttcatccaagcatataacaatgatcccagcaaagaagagctgaaggataataaggatagcatttccaactccgagttggtcaacacttccatacatgccagagcaaacataggcaacagcctcaccaatagctataaggattcccaatagcttttgtgctccgtttctgcgaagaataattaaaaccattcttataatctaacaagcaacaaagggattttccaatattcatatattgaatatatttaagaaattgacaaatttatgcaattgataacggctacatacaagagagcccgatcctcccggacattgttgtcaacttcaatgatctttgaaccagcgagaagttgcatcacaagccctgatgtcacaatcggtgtgattccgagctccataacagtccccctgttggaagcaagaatgactctcatccaatagaagggatccgatcctgttgtagagtgaatgccataaagaggcaattgactgcacaccagaaagacgaaaagcgctacaacggtgtatagcaccttctctctgaatggaatctttcggtcagcgctctgcacttcaggcgaagaaaagcgaggaaaggcctcaccagatggaggacacgaaaaccacctcccatcttatcttgtttctgccaaaactaagctaaaccaatctgcataatacaaccaaaatttgaatacaaaatcaatcacatccaagatccatggtccagaacatgaggaatttttgtacagaaaaggataacccagtttttattattgatttttatcatacgtacaaaatcatacagtgtgaactaaccagtgtgatagcagtcaattcaaatcatacgtacgacaatgaatctagcccaaatgtaaaaactttcccaatgaaaaaacaagtttgaaaaatccagctatctatcccagcattcaatttgaaatcataacatatttcacgaaacccaatcgatacaaaagcttgcaattacatataacgttaaaaaggtctggaaaattttgaaaatctaatagatctggaaaaattaacacaaacaagatagaagaaaaagacaaataatgaatgagataataggagggataaattgggcttacaaggttgaagacgtgatatgagaagagatcaaaccctagcttgattagcctaaagatctcggatctgagctgagctcccaaaggggaagagaaattggggaaaagaataggagagacgaggagagctcttcgtttggcctttagtactaaaataagttcacgtatattttttttttttaaaaaaaaaagaataattaacatttttgaaaggttccattaaaagaataaaattgaagggtaacgtgacatatctatacctatctatatctttatagaataattatcttttttacccccttcacttatgacactatactattatgccccttaatctattcagcttgttacaaatagtccttgtataattttatatgcatacatttagtcct

SEQ ID NO: 379226 - DNA, 2853 bp, Cannabis indica
gatgggattataattttgagacttcactaattagctgagtgtgagatttttaataaattaaaagataggttacttattggagaattgctatgtatactatatttttttactttaacgactttttatatttttttttattttaataaaagttgtatacattttgaggttatgctgtttctattctgagattatactgtttctattttataaaagttccattttgaggttatgctgcttatattttaaggttatgctgtttttatttcgagattatacaggtactttatgttaatatgcttcgatttctcatttagcatgggatttttgatcaagtacaaaacactttgattatcacagtacatgtttatgttgacggagttgaatcccagctcatgagtcaggcctttgagccatatagcttccttgaaagcatctacagcagccatgaactatacctccgtggttgagaaagtaaccaccttttgcatattttaattcaagatgattgtgctatcacaaacacagaataccacctccttgtgtcaatgtttgcagcatagtcactatcaacatatgcatagacctttgtattgcttaatctgaatttttaacaaaaactagaccaagctttgttgttccttggaaatatttcaatatccattttagggtcttccaatgaccttcacctagatttgccctaactaacactcaaaacatatgccaaatctagtctagtgcagaccatgacatacattaaacttccaattatattagtgtaagctacattttctatttccttcctttctttctcatatttgggacactaattttgagataacttgaaatgagctattaagggagtagacacattcttagccttttccattttgtatttttcaattaccttttcaaggtatttctcctgatgcaaaattataatttcaggttctggtctttcaagttcaataccaagaattctcttgactttcctaagatttttcatgtcaaactcattatttaaatgcacttcatgagtttgttaatttctttgatactctttccaaccaaaattatatcatcaacatataagagcaagtatatgttttcattgaattacatacatggatcaaaattgctcttaacaaatcaaacttagtgatagtctggggttgaacctgatattctattatctaggagtcgcttgagtccatataagaactttttgagtaagaaaacttggtttggattcccattgtcaaacccttcaaactatttcatgtacatttcttcttccaaagtcccacataggaatgttatcttcacattcatttgcttcatttccactctagctgctttggatattatgatttgaattgagatttgtttgactactggggagaagatttatgtgtagtctacaacttccttttgtgtgaattccccttctacaagcttggcattgtacatgtctttctctactccaggaattctctcttttatcttataaaccaatttacaatcaaccaatttttgtccttctggtctgaatataatgatccaagttttattcttcacaagagataccatctcctcatctatagctttcaaccgaagcttgtaatttggaattttggaccattgacaacttctgcataagctaaagggtctaaactataatgttttgtttagctactaatagagcatagggtatgaaatttgtatagcctaatctatatggtgctcttgtctcctttctctgtcccttgcaatctggtagccttctagacctgagctacttctagtctcttgagtagcaattcctgtttcatcatcaggttatgttgactaatctttatcaatatgctccacctcaaactgcatatcccttatcttaggtggagcaccatctctgatgttcatcttcattggcattttggtttctttgaagataacatcttttcttattatgcatgtcttgtaaccatgttcaaggcaccataatttgtatcctttcacacacatgatatccaatgaaccttgactctagttttgtgttgccttatatgcgcataagttgtgcaaccaaacacttttaagtgttcatatgagggtttcttccctgtctatagttcttggggtgttttgaagtttaagactactgagggacatctattgattaaatagcacccctgaacttcttttctaaactcgctcctttcttcatgcacctttccctctctaacagtgttctattcattctctcagcaaactattttgctaaggtgttttcctcattattttaaatctggtattctattgtctaggagtcgcttgagtccatataagaactttttgagtaagcaaacaatgccattactattctaagctttttgaccctctttcaacaagtttcttccaattcttaaaggcttccaaagcttaatctttgggttttaaaaataatacccatacctttatcaatcatgctcataaataattggctccacctagacatgtaaccttgacaggtccctaattaagatctagtgtatgtaagccaaagattctattatagtgtgctttcttttgctaaacttaacgttgcaacacttgccaaacatacattctttataaaaatcatgttttccactaagtttacccttgaaaactgcatgctttaacagttctgttatgcctctttaactaatgtgtcccaatcttttatgcaagaattgagtcatatcatcattgtcctattgcaactgatgttcatgtaataaacttcgagttttatttctcatgagatggtattacaaaaaaagactaagtatcagaagctctaatttctagaga

SEQ ID NO: 379227 - DNA, 1135 bp, Cannabis indica
gtttttttttttattttgtatttgggcgtaaagtttgtggaaatcaatttagtttctacatttgatggtttgggttttgtgattgttgaatgtatttgttaattatctaactgttatgttatccatattggtgggtagatgtatatattagaagttggcttaatccctcaaaatggtgttgtattttatttgacagtaacataattgtagctgacttaagcaatccaactttttcataaaccttcatgaacaatgatttttagaaagaatcatttgtttttgttcttccatgtattacttcatatcatgatttagtaacatataaagtgatgagaagtaaaataaatatctagcattcttagtgatattacaggttgtgatacataaacatgttaaattgcactataactcttctatctgctataatactcgttgattaatttgtatgcaaagaagcaactcattttgttaattatctactatttcaagcatggaataattgtcattctgaaatacaaatttactttggccattcaaaggaccatgatttagattaggaggaacaacatccaataagtaattggtatatatgactctgatgtaagtatatcattcttcatttgcatttataatttttgtatcacttgagaaggacagtagaaaccataattttatgaataattgttcttcttttaattttatattaattttatgctaattgtaatagtgagaacttttttcttcttccagttattgtagtttcattctgataacgagcggtcttgtaaagtggtcaatatattcacagcaaaatgcaacaagattaaagagattataatgttctacaaagagaatgagagaattaaaagggtgttgtgattctcaacatttgaattagtatgtgtatgttaatgatctagaaagcagttatataaatattggtagtcgatgttgtaattttggctggtaattaatgtttagagtttttctttttttactgtgggtgtgtctccataggtgtggcaaccaaaggagtttggaatatttactttcaattttttttttctcaattatacagttggacatttaggttcatactgtaaaaattgtagtgaggagcgatgatttgctaatc

SEQ ID NO: 379228 - DNA, 4402 bp, Cannabis indica
gtaatctgaggtttcattaaattttttggattcactataattttcttagttttacatattgttttttccttccttactttatggagtacattatacatagatagggaagacaagagagcagagaattgcagagtgcttcttcgttcccctctccattaaccattttaatctccattagggatgtggttgggaattttcgttggggacccctttattaagaataaaatttaaataaaaaagtgaatcacatggttatcaaaattatacacaatgttttcttttgaacgaaaaattatacacaatgtttattcagtataaagataaaatccttttaaaaagttactaataataagatactacaaaacagataaagaagcatgtaaaaataaataaaaattaaaaggtttagttggttgattgttattctcatccgttatgtttaatattcggggaatgaaaagttagatacatccctcatactccattagagacggtgtccagtaaggcccaatccttatgagtaaaacttgcaggtctagtaaaattaaaggtatttgatgttagagtttcacttgatgactttagttgagagagattgagatgaaggaaatatcaaattctaagtatttaaagagtcagagattacctcaagaataagctaaaaatgggactacttaatcataaacctttcactaaaatcataccaaacacaggtttagttttacattcctattcccaagaacttaaaactcccataacaaatacaaaggacaaaacttagtcacatatgccatctgaattgaggtgtgtgcatgtttctatgaaaaggctatgcttatctaccatgaataataaataatcatggtaatgttcatatattatacacaaacacaacacctctataacaatctgagcttcccagtccccatgttccatgtacgatatatttgtgacgtgtaaagtgtaactctcatacaaagtagtaataaataacaataaaacagaatgagtcttaattgtcggtcctcacagagccttgtttgggtctcatattttaatctgggaatctcttcgtttgttggtttggcccttttagatagagatatgttctaaagaatcattataacaactatatatggccgttgcgcagtacttgtatcaaattatctatgattatctttctatctttccaatatatatataaaatacaaatcatgttacaataaaaatttaataatttataaccaatcaggtttctgactggaaagggaatcaaatcgacctcgctgcagatgagggcggacggaggttcatttatccttcaggtggcgtcctggtgacaaatgccaccttacacaatcaaattctagagctgatctcttgtggttcaactgtttcacagtgaaatctctttattcttttagcctccaaatggaaaataaataaatcttggaaatttaaacgagtatttcagggtttttattctttcttttttctttttacttgtatattcagttgatgctattattcagtagtgccacctctgtccaattaaaattatgttatattcttatcagaatattttattttatatatgctgctttccttgtatctcatatgtcagctagtgcagtatgtggtgtgtgcattttaactgatataatatcttaacaagtgcttagttcactgcttatggaccacactgatcatttagttgtctactgaaactttatagtttttaattttttaacatatggacgtaactgaccgagaatcagtcagttttagacaaaataattgtaaataatagacataaaaaaaaccagtaattgtccaagttgcttcgaatggaattcatataggtcggttcccatatatgatatcctttgtgatatattttttttttccctttacctctaatagattgataatttctgtatgataatataattcttaccttggtcaagacttgtactttattacgagcttaattaatcaagtgtgattcgtttacaaaatttgatgaaaaagcattaaatgataacttatctgatctcgtgaatgaaacttcatctgattatttcgagagacagccataatgacaactcattgttaatgcaatacgtgtcccttatgaatgcttctattggacactaaatgtgcaagtatacaaaccttagttacgggaaagttccagtggttttatgtgccaggtgttcttatcttaactatattattgtcatcacttaaataatatttttgaaaaataatataaaaacaggattgatatggacagttatgagtagtatatattagtataataaatttgaaaaggtgggaaaatctgtgcatgagattgcttatcttagttacaatattggtagttcatccacgtacgtacaagcataggatctcgaatccaaaaatagccataaaataatataaattcgactaaaaaactaatataagggcattgagataacgaagacatatatcatcagtctcattattcaaggtttgttaaacttatttaacagctcagaactaaaaataaactaatgatattattagataatctgccaaattacatatgcatttcggcgagtcaactcaaacacgtaggcgacgccccatttgggtgctgcatacacaagcaaaccctagattttggacaagtaattacccttttaagtaaatgtattttaagtatggtttagtttattattatagcctctgctacgtatcaacgtgtacatattgtaaatatttgtcaaattattatgtttaattaaattatcgtgtctccttgataccgaacatggaaacagtagccttagattatgctcgagttaaatattaatcatatatacatggattataacaaagactataattagtaataaaaatgagttaactcgattgcaatttcatatgttccaactatgaaatatatatatgagctaataattgatactataattagggggtgaaaaaggtatatgcatgcatgttaaggttttgtaaacaaaacactaaaagaggcctgcagtggggctaaccttgtagataacaagttaaatgtcattcctgagatctagagatcatattactattattataatatttgaccaatcagcatttatcacttaattaaacaaacgaataagacactttcacactcgtatcatcacatgatttgacgttttgtgataaaccatatatttagtaatttactctacacataaacaataattaacttagaaagaaagaaagaaaacataaaatatcatgggagcaacgttagaaagcatgtacatatagggttgatctgatctggtcgacagctgtcctagtgaggtgtattagcaatatttaaaatagtaattaactagatgattcttttaattaattagtattgtattaattaacatatatatatatatatagcacattaaggcacaagcttcagtgttttgaatcactaaaaattcctccagagtactaccaggtggcgattccagaaagtttcatataaaatgattttggggcttgcccaaattgaccattgatcaagctttgttgatcgaataatcatttctataataattttttagtaatgtaagaaacatattaagtaataaataactaaaaatttatttaaaaaaacacagaacactatacgtcaagaacgtaaagacttattgtctttgcttgtcaaaagagctgacattattggacgtcagatttcacaacgtggttggctattaatggttgaataagggtcgtcgatttccatggtctgaccctacttttttgaatttaacgttttgcattgggacacgtagtcgaagaaaattaggctctatcctatatatcattggtttcatcagtttaagtattacaaaatatgatggaagcagaaaacaatggagattaattcctacatgagactatgagagatctcatgcatgcagatatagtatatatacacgcgaacacgtataactacacgtatacgtatatggtatatatttacaaattaagatctccggttaaaaagtggtgtattatatcatgttaaaccaattaaagtttgacacgtcaattaattttttatttataaaaaaattaaacctctaataaagtcaacaaaattagttaacatatttaatataaattaaactagttgattgtaaaactttgataggtttaacacaatatagaacaccaattttcaacaggtgatcttggggcgaaccctagaagtcaagaagcagttacttctaaaagaaataataaaaaattatatatgtattttagttagttaaagtatttccaacaaattagatgcaaataaatagtagaaagtacttaaaatatagtttattgagtaatttgcggc

SEQ ID NO: 379229 - DNA, 1932 bp, Cannabis indica
ccttcctctagagccaacgagactgctggacaacaagccgctgcctctccacacaatgcatccgagaagtccaaactatccgtgtgtatccgaaccacctcacctaggtggttcctagctaggaatggaatgaaaatagtttcatttccattccattctattttattacctccaaccaaatgtcacctaagttcttacaaaatcatctcaattaaacatactgaaattgatcaaaataactcaagttagaaatcataacacaacaacaacaataacaacaaaattagtcttataacaatgtagtatccataatagactaaaaaataagaatagagaaaaacagaattcgataataagctttggctttcataataaataaagaagaagctttagcacattatttttttcaagtgcaaagaaaaaatatttagcacatcattctttaattatataagtacagttatattatcatataataattttgagtctcaaagtttagaaattgatagattattactattatgaattactctgtaagattattagtttaagacacatgcatatcagtagataactattagaatgaaaaaattttgaatcaaaacaaaaatcaagtagaaaagattgaaaattgcgtaccttcatatttgcaaaagctcttaaacttaaaaactgacatccactttaaagaaaaatatgctcaagcaattagaaaaagaagtattaataagatttagttttaattatatatatgataaaaataaattaattttagatttacatgtacgatcagtgttgttaattttaaataataggaatttaaaaaatgataccacgtaatataatttaataaataacaatcatgaatattaaaagcgtgcattataatatattataatatattataattaacaataatatatttacacactactaaaaaatttatagtgacacttcaacgctcgtcactaatgagactgactagaaagacaatttttagtaacactccacacatgtcactgaaaccttttgtactcattttctgcgcgtcactataggcgtatagtgtcaagttttatcagactaaaaagataacagtcacacacatgaagtgtcactatatcttatttttcttttttattaatatttttaaagatatagtgacacaccaaaagtgccactatattaaatatttttttaaaaaaaataatatataattgttctaattcaaatttttatataaataattactttttttattatttttttttgaaaaatttaatttattaatttgggcagaataattaaatatttttttaatttatcatacacaaaaatttattatttgcaccttaaaattcagaaaaattacaaaattattgtaatgacaaaaaaaaaaaaaaagcaaattccacaggattgaacaatatcaagaataatattaacaaatataacccaatttcttttacagagattgaacaaattcaaaggcaaaccccaaaataaaaaaaaaaaaaaacaaattccacagattgtgattacaaaagaaccaaaaacgaaattacaacacaaaatccaatcaactctcaattttcattttactgtttctttaatttacttattttattgtaaaaaaaatagcagactatagaataaacccaccacgatcagcgatggtggtgctctcatgttcttctttcgctccatcatcgttgatccactctgccggcgttaagtccatcccctcacggagcacctcgcgcgactccttcgtcaacctctcttccaacttcatgaagcccaactccggtgacttgttcgtcctcaagcatagattagcaccgtccacctgtgtaaaatcgtagctccaatggtccgcttatatacttcccctacacacacacacacacacacacagagagagagagagag

SEQ ID NO: 379230 - DNA, 6458 bp, Cannabis indica
gcagtgcggttaggtaaaattaaaaaactgacatggacgtatgttggtttcaaaaaataggtcaaaaattacaccacccgtactgcgaacacccctattaattaccactataaatacttgattactctaattatatttttgtataaataagagttcacttcattgaaaataaaaaaaaaaaatcattcactctctcattctcttcttttttgtcttttctgttttcttatttttcttgtttaatttatatgattttataacattattaacacttaatagtaattattaaagtttttcttttaagttataaaagacttcatttattataaataaaattttgaactcattagaataaaaggttaaaaaaattcttatctctttttattctctttttctttaaattataatattttatattactatgctacttaatttatagtatatcaatatatatttgcaattattccacttttattttacaaaacattaatatttcagctgcatatttttctaaaaataagattataaaatgagcgtctgcccaaatatgtgctctgtggcagttaatttcttttcttacggttaagcagtttttttctggttttttctcatgttcatcagcattatccacatctttacattcataactgcaaactccttacattgatctcttactgttctgggttttcatcttcatggatccttacattaacaaaatgaaagcacctatgacactaactgaggaggaagaatcagttttcgacttttctggtttggcttttgtggataactctgccccttctgaccatgtcttgtatgcaaaagtcctcaccaataagaaggtttggctctccacctttagaaaccaaatggctcaacactggaatggaaggttcccagtcacaattactgaatcttctgagttgttttctctgagtttcggttgtgcaggggacaaagcaagggttctactgagggaaccctttcattttcaaaaccatcatataatcctgcattcacctacactaggacaaagtgttcactgtgattctctcatcttcacacctttttgggttcagatttatagattcccctttcttagtaaaaccaaagaccttgcaaaagcacttgctaatataattggtgagtttgtggatgtctatgaggattctctcaatgaggggtggggaccttttttacgtgtcagagttaacattgacacatcgaaacctttgctaaggggtagaatgatcacacttcaacaagcaagggagaaattttgggttgagtttcggtacgaaagactgccagagtattgtatggagtgtgggaggataggacatccttttgataaatgtgtggtttatcttgaaaaaattgataatggaattgaaccggatctagaatataggcctacaatgaagggttcaccactgccactttcaaactatgatcgctataggacagatttctcaaagggtaatgcttggccgttactaacccgtcttgccaagaactctttaatttctgctattccgagtcttaaaaaccgtgaacccccacatcccagacctctaactgcagaggaatcttctcactccaatattacatctacagtctctcttcctgttgaagtctcaacttgtcacaacatggttattggaggagcacacttatgcactgatcatggtctcaatatgactagcccaactgtttcaacttccataccagcaactatctcaagtcatgggattaatggtatttcaccagcaaccactatttcccctgcttcgaataacattaatttactctcctcaaatgccatgcaactgtccaagccgcagcaagctcaaaatgagttgatcactgatttatctggggtttttactccatttgctgtcataaatcaggcaccaaacatttatgctacatatcctccacagagttctacactttcggctgcaaaaacttatcagattaacactcccattccatcaactactggtcacatatcacagccaatagtcacaccttatgttactcagcatgttggcaaagaaaacaagtcaccaaatcgctacagcaaaaggcattcggatggcccaaatctgaggcaatttcttaaaagatctaggggctctccatcagaaatgttcgtttcacctttgtcagttgaaattgaacctcaccttgatgtttctattgacgaaatggattcaattggtgccaatgacagcaatgcggagtctgatgctcagctccgccatcagccatgaaaatcataagctggaactctcgcgggttggggaacccgagagctctccgtcatctcaaattgcttgttaaagagcattctccaagtgtgttatttattatggaaactaagttaggacctaattctatttctcgtttacgtaatgttttacatttcaataatggacttgaagtcccacgtgttggtcttagtggaggtctgatgttgctttggaaagatgatgttgttgtaacacttttaaattttaatataaacattttcgattgttatatggcttgtggaaatggaccaacttggcactttactggtttctatggcgcaccagcggctcaaaatcgtcaacaaacttggacacttttagagagattgaaagacgttgctcctttgataccatggatggtaattggggattttaatgaaatcttgtcgaatcgtcataaatctggtggagctttgtgtagtgagacactaatggataatttccgtcatgtacttgatcgatgtcacttacatgagcaagattttgaaggagaccaattcacttggatcaagggtagaatcacaacagacacaataaaggagcggttagattggtgttttgttaacactttatgggctgagacatttcaaaacattatcacgcaccatctagattactaccgatctgatcatcgggcaattgctgtccaaattctgccacacaatgcgtcacaccagcagcacactcgccacaccagatttcgttttgagaagatctggttacaagaagaagaagccaccactctaatccaacgaaactggcagcaatgttcaggtgaaaatgctgctgcagtttttaaaaaaaaacctccagcagtgttcggattctctacagcagtggcacagacagaagtttggtaacattaaaaaaaagatttctaaagctcaaaaaaaggttgctgatttgaacaatgttattgatcgaacttctaatgtcatggatgagttgaaaaacagtgaaaatgttcttgatgatttattagctcaggaggagacttattggcagcagcgttctcgcattgattggatgcaaaatagagatcaaaataccaaattctttcatgcctacgcatctactcgcaaaaaaaataacacaatcaagtctcttgttgatcaacatggagctgtggtcacttcaaaaactggtatgactgatgttatctccacttattttggagatttgtttactgcaactgaaatagtccctgaggctttaaatcataccatatccaccataccaacaacagtaacatcagatatgaatgattccttacttcggcctttcaccaatgatgatgttttcaatgctctcaaaacaatcaatccggacaaaagtcctggcagcgatggaatgtcagcaatgttttatcataaatattggtctattgttggggatgttgttactaaagttgtgttgggagttctgaataatggtgactgtatggaagctattaatcactcactcattactctcatttcaaagatcaaggttcctcaaggtatgggagatttcagaccaataagcctctgtaatgtcatttagaaaattgtttcaaaggctctagcggtcagatttaaagatgttcttccagcggtaatctctgaaacacaaagtgctttcctctcgaatagactcattacagacaatattcttgtggcttttgaattggttcaccacttaaaacataaaacaaggggaaataaaagctactcagctctaaagttggacatgagtaaagcttttgatagagtggagtggttttacattcaagaagtcatgcgtaagatggggttccatgacaaatggattacaatgatcatgagctgcctcagttccacaagcttctctttcatgttaaatggtgaagaggttggatatgtcaaacctacaagaggccttcggcaaggtgatcctttgtcgccatacctatttttgatctgctctgaaggtttgtcaagattattacaacatgaagaatcggtccggaaccttaaaggcttacgtttaacacgccatgctccatcagtttctcaccttctctttgcagatgatagcctcctattttgtgaagctacaaatagttcagcagcagcacttaaaaaggttttggacatctaccactctgcttcaggccaaatgttaaatacaacgaagtcagttatgtctttctcacctaatacctcacaagcttctaaggatttttttcatctcgctttagggatgccaattagtgattgtcatgaacgttatcttggtcttcccgctttttctgagcgtgataaaaaagaaatgttcagtgatgtaaaagaacgaatatggcaaaaactgcatgcttggaatgacaagctcttctcagttggtgggaaagaagttcttttgaaagcagtggttcaatcgatccctacctacgctatgagttgtttccgtctgccctctactttttgtagccaattagaatctatgatggctaatttttggtggggttcaactaaagatggatcgaaaattcattggcgaaattggaaattgttatgcgaatcaaagtttgaaggtggaatgggctttcgctcttttgttaatttcaacaaggcactcctagctaagcaagcctggagaatctttgaaatgccgaattccctactaagtcgtttgcttaaacatcgatacttttcaaataacaattttttggaagctcggcttggccactcaccttcactcacatggcaaggcatccattgggggagggaattacttattgaaggattgcgctataagattggtaatggctacaatgttttggctggatttgataaatggatcccgggatataccaactttaaaccagtcggctttaatggggctgattcattaactattgccaacttcataactgaccaaagagaatggaacatccctctacttcatcaatacttccaacccatcgatgtggaaagaattgttaccatccctcttagtttctttccttcaaatgatcgtttgatttggcatcatactacaacaggctgttatacagtgaattcgggtttccacctagctgagaatttggccgaaaatcagcaaacaaatggttctagttctcatactacttggtggaaaactttttggagtttaaatcttccatcaaaggttaaaatttttgcatggagagtgatgcaaaatgctctccccgtagcaactggtctggttcgaaggaaagtaattgactctgcaacttgttctttgtgtcataatgcatgggaatcaattggtcatgccttgtttaattgtaccaaagcgagaaaggtttggagagaaactaaattcaccattgaacacacacttactcataatatgtacaatggtgattatttgatccatttatcatctttacattctaaacaagacttcaaattgatagtatgcaccatgtggctatttggcatgatagaaacaaggtcattcatggaggtttatctaagcctagtcaagaaattgcatcctttgcaaatgcatatctggagcaatttaatcgggcaagatctaaaaaccagcagcagtatgttcactgcaacgtacacaccagcaatggttctgcaccagttcattctcagagacaaaattctgatgtaccttggtcccctccgtgtgtttctgggcttaaaatgaatgttgatgctgctgtcaaccaagaaaggaaagttttggggattggtgctgttgtccgagaccaccaaggaagtgttgttgctgctatttccaaaccagttcaaggatgtttcagatcggatgaaatggaggccaaagcactttttcattgtctcaattgggcgctgcaattgcaattaaagcttacaaatgttgaaactgatgcattgcgtgtctcatcagctattaattctccgtctatgaacctatctagttttaatgatttaattatggatgttagttgtcttttatccttcttctcaggagttactgtttctcatgttaagagaaatgctaaccaagcggctcatggtttagccaagtacgctcttgagttggatgaagatgtctgttggatgggcgaagtcccaaatcctattttctctgttgttgtaaacgatttgcagttttaataacagtgaaatttctcaaaaaaaa

SEQ ID NO: 379231 - DNA, 1884 bp, Cannabis indica
aaaaaaaaatcatattgaatatatacacaattgtgtttgtaaatttgctatagtatgactgactaactaataaatgaaactacatcctttatatatggcttaataggtatgagaatggaagccgaagctaagctacgtacgtaactgtatcctttttatttttttataatttatttatttagttttggtttttgaaagagggtagtcacacatctttaatgagtgtaatgattgaaaaaatgaacaaaaatatgatatttataattaaatatgtacatcaaatatatatgtgttagctagattaaattatttgacagaaaaaaatcgaagagaaattctcaatataaatgtatggattcacgaagccccagcatgaactaaagctgatagtgttttacctaggtgagtcgtagaccaatgtctttttcttagggtgcctctaataaattggtgaagtgtcaggtatttatgatttgtggctctaatacatcactcatcatttagatttgcttatattactttttatacatgttaaacttacattacaacacaaacatttttgcagtatcaattcaatatattaaataatattaattattgtgacaaacacttttggcttaattgcaattttaatttatttaaaaatctaacatttattttaaaaacttaatattatatattaattaaatttaaaagttaaaaaaaaaaacatttttggtattttttaatgcgtcggcgaatgtttttcaaaaataaaaattatcaaggcttccacaagtgttctttgcccacgatcaaaactgtgggcaaatcctaagatggactcagattttaattttgtattgtacacttgcgatgtttgtcgacgtatataattgcaaaagaagtaatatttcgtcacaattataaaaaccgccggcaaaattacattctcatactagctagggacccctgattgttttaaggaaaaaaatgagcaccaatcaagcatttttgtcatattttaatttgtatgatatatttttgcttgcgcaaaattgcgccggcgaaaatatcttttattaggtaatgttttctttgcctgagtcacatcggcgtggaaatgagaacgctgactacaacaccccagccaacaaggaaagaggcaggcgggagctgcatccgaaatcattaattgctttcttatcaatatttaatttccatccttatcacttttgtatcatctctcaataatttactacattattgagataataaatatctatctatattatatgttataatgtatatgaaggattcatccgtgacatatattaagacaaatttatgtgcatgtaaaaataactaaaaatatattatcttccctttttatggtgaatgtggttttgtgtttttgaaaaactccttactgaagatataatgaaagcaatttaattacatcacatacttgaaatttttatttttttgcttttttactgtgtgattgaattttttttcaaaagtattgtgtaagttttatattgtgtattgtgttaagtttttactgttgttctacggttatttttcagttgttccactgttgtttttagttgttctattttatgtttcattgatattttataaaaatacagtattttagaaaaaaaaaattcctgtgacagtatttttataaaagtcaacctgaattctaacatttttgtaagttttccaataatatattgacgtaagatatatgaggagcccattttaatatcaattctatataaagtgtatgtctatataacagaatttttggtttatgagaaatttatgggtgaatttttatttatattaaaaataaaatggtttattattaaaaataaaatggtttatgagaaattcatg

SEQ ID NO: 379232 - DNA, 4770 bp, Cannabis indica
tttgtgatttgatttctaagggccgcacctgaactaagacggactaagcccgtatctaagacctacctaatttaagggcccaaaaaaatattttccttttagcccaataatttttttttcttttcaacacaaaaattgttgatacataatttttgttatgttcattcattgtgatcatctaggtgatattcatggacaatattccgatcttcttcggctattcgagtacggcggattaccgcctcgttcgaactacttattcttgggggattatgtagacagaggaaaacaaagcttggaaacaatatgtctacttctagcatacaaaatcaagtaccctgagaactttttcctccttagaggaaaccacgaatgcgcctcaataaaccgaatttacgggttttatgatgaatgcaaaagaaggttcaatgtaaggctatggagaatattcacagattgtttcaattgtcttcctgttgcagccctcatagatgaaaaaatactatgtatgcatggtggtctttcccctgatttgaaaaatttgaaacaaataagaatgattcaaaggccaactgatgtagctgaacatggtttgttatgtgatcttttatggtctgatcctagtaaagatattcaaggttggggtcctaatgaaaggggtgtttctttcacttttggtgctgatagagtcaccgagtttttgcgaaaacaggatcttgacttgatctgtcgagctcatcaggttcgtgacgatgttatgttatgttggcgtaaaattaaattttggagtccctacacaaatagttcaatcgctattttgataaagtattttaatatttaatattttgtgtatactaataatttattattttgttcataattttggggcaagagtgcacaccttgtttgtctcagtttaagactgaccctggttatgttatgttatgttatgacatgttgagagttatgaatatatgttgtttttttgtaggttgtggaagatggatatgagttctttgcaaaccgaaaacttgtgacgctattctcagcgcctaattactgtggcgaattcgacaatgccggtgccatgatgagtgttgatgagagcttaatgtgttcttttcagattttaaaaccagctgataagaaaccaaagtttggatttggtactattaagccaggtcctcctagtaaagttaaggtacattttatttatggattattacacaaatatacaaaaataacaaaaatactgttttacagaattttaaatatttttacgatttttttgattttatttacagaaaatacgacatttttatgctgtactcttgttaatttgttgttgattttttattatatgtatattattttttgctattatttagatattattttcatgatacttttatgtagttttcttattattttcatattgtatctataaaaactataaaaatgtaaaaaaaattctttaaacgtaaaaatatatttgtttttacaaaaagagtaccttgtgtaattattctttttatctactgtatttttagagtgattaatgttaagattttgactaattgttaagattttcatatctgaatatttgtactcttttttcaattacagtcattgcttgctgcaaagggatattctttttgagcaaaatacatctgtctttagaagcaaaaacagaaattgaagaaccaaattaaaaatatttggtgtttaagaggctgcaattttttataatcatactttcttttttggttctatatatgtatttgtaatagaaatattgggcgaaatagattattttttaatgtcactttacatagtgatattcttgtaattctttacaaaatagtattttcgactcttgcaatattttgtcgaaaaatattattttataaagaattatgggaagaatattactttttgtaaagtgatattaaaaatatatttatttttaattattactcttatgtataatattactcaaatgatcaaattctctttgtaatatataattgtaactgtaaactaattatgatttgaggtttggtgggatattattaataggtatacaggtttcaccttctttatgaaaccatcaaaactcaatttcaattgagacctaatccattgttaaggctatctatacgttgtcgttttatattgttctattgtcgttttgaattacatatgtcattttgcatcagattgttttttcaccccgtaatgattttatttacttatttactaaaggacttatttccttttacatttttttttcctttgaaacaagtccttcattcaaataaacattacataggattagacaagtcttgttaaagcgcaaactttacacaagggtgattaaccccaatctacatagtactcattttgttaatcaaagcgtgattagtttatacatgagctgcctcacttacctccccgtaaaagagatcccaacaaccatataatgtaacattaaattcctaatattagaaatatagcatatctgccagcacaaaatagggtattagattatattaaattcctaatataatctaatattctatcttccttgttatagattaattggacgacctcttggtaattagattcaataataaaacgatgtaaaagttgttgaattctagtttgcaacctttgggattttcctctcatgcttagtattattcctaatataccatatctgctgcacaaaggcattggttgccaaagacacttttaaatttctttggcaagtaaggcttggttgaacaactcgagatctcgaaaatccaaaccaccatcttctttcaatttacataagcgtttccatttgtaccgatgagtttgcttcttttttgcagataaacctcaccagaagctccctggcattttatgaatactatttagagtgctttttagaagtcaaaaacaactcatagtataagtgggaatgacttgaataattgccttgataagtacctcctttatggccattgaaaacatagtgctcttccaccctctcaacctattccaaaccctatacttattccttcaaacaaaagacagcaaatcaaggcattttccatgattatccacctttttcacagtccttttcagacagctcaagctttgtctctgcatccatcatcttcccaaaacacattttagatttataaaagttaacaacttgatctgatgctattgagtactttttcaacagcttttggaacctttggcaatcaatcatcgtctcattgaagaaaaatctgctatcatctgtaaagaaaaggtgggacacagagaggcctcgtctaccaaatcaaatactctttagattaccctcttcctctgcttgttgaatcatactaaaaaaagcttcaacacaaaacaagaagagaaaaagtgaaagcaaatccctttatcgtatcccccattgtggcactacctttccttggatctcacaattaattagaaaggagaatgtcattgatgtaacacatttcataactttcgctaccccttcttcctaatatcccagttgcaacatcatgttctataaagtaaatcttttagcaatcctctactgttatccaaaagcaaagttgcagattttgactttgtggtagagaaagttaatcagagacttcaagggtggagcaccaaacttctttctcaagtagaacgtgttactcttttgcaaaatgtgatacagtctatcactgtgtatagtgtgcctaattttctcctccctacaaatttttggtgggttgagaatgaagacaagaattatcttttggctttatcttcttgggactcgcattacaaacccaaattatgtggtgattgtggtttagaagaagttaaatgtcatgatatcctctttacaaacccttattggttcgggtaattcagtagaagtttggaatgccccttggcttctatggaataagtgggatctcactcgagtttcctttaatccaatcattcctccgttaaatgtcatgatatcctctttactcgatgacaatggtgcttggaacaaagaacttattataggttggttgcattcctatttcgttgacttatttttaaagatgccaaacttcctcctcatttggataatgctcttatttggagaggctttaaagatgggagtttctccacaaaagtggcttgttgatctttgaataaaaggttttctattgtggatagcagtttggaaagtccttatcttggaacgacaaaacctatttctttggaaaatcacatccaagtttttccctacggggatagactaggagagtttactggtaattccgttaaccactacctttgtaatgatgctactgattctccccttcatctctttgtgttatgccctttggccaaggcgatttggttctttagtaagtggggtattagagcaggtaattcttcttttaagttagttgattggtttttcatattgatttcctttctcatcaggataaatccatgagacttgattttttgttctttgtattttctgcctacgagactctctggtgggtctgcaataagaggttccatgaaggcctctttccctccccctccttccttgtgtgtgacattgtttgtagatcataggaactcgactccatcaatgggggtctaatttttgagcaacctactacttcgattgacagagagagtgttaggttatttttagtattaattttagattaagtttagtatatttttaattaagtttta

SEQ ID NO: 379233 - DNA, 1516 bp, Cannabis indica
ctagatcattgataggtggatggaattggttccaaattcttaagtgaaatttacatgatatattaactttgtccatttttttacaaacatactgtcaggcggttattttttatttttttactgtatttttttataagtttcatactgcagtatactgtgttaagttttcactggtgttctactggtattttactagtgttctagtgttgttttgagttgttctgctttgtgttttactggtgttttataaaaacacagtatttttgagaaaaaattctgagtaacagtatttttgtaaaattaacttaaatttcaatatttttgtaaatttcccattctcaattcacattttcaaaactataattttgaaatgagattgttagatagtaaattttttagaaatatttgagtatgatcagaaacaaagaaaaatccaaaaatgtcgtagctgatgtggcggatcagaaatagcatagaattgctttgtaaggtaattcttatctcatcatataaaatatatataaaaaatcatagtgtggaacgtgatacacgagcgcgttgttgtcttctcaaaatggactttatatgcagccgtttcaacagttatataagtttgaggaatcataacttactacgtgtcctctagtactataataaatttttttttaatatttattatgtcgttttggttgatgacgtgtaatcttgtagttgcattatttggctattggaaataagcatatctgtctatttctatactgcacaacatttctcattttcttgtaaattaaactagagtgatgcatcggactggagtataagtcatgactcatgatgccactcaccaatagccaaatattaatatacttgggttcgcaactcaggtgacagtaatcgaactgaacccaagctaaaactttgtatgtacatataaatggtaaatgatactccaaaggtggtgatgcaagttcccgcagattagtgaaagttgttgtgttgctttatgttatttgcctgtccttattccgttagtactaataaaaaataggatttaacattacaattatactaatgaaaaattcaataatccaatagtatataaccaaacgtatatatatcacttaatcttgacttatatataatatataatatatagtccaatcaatagtatgtgatatataaaaccaattatatgtacatttatttatataaataaatatacatatataaagtgcggttatattaaaaaaaaaaaattggttaacaaatgtcttttagttttctttattagtttactattatttaataaaatatttttaattaattttatatattattatatataaaagtaaaaattataaaaataattttataaaagtattttaatctaattcttttaaatatttaattattaaccacataaaacaagaatttgttcctgtcaataatactcagaattcgtagcagttagtttctatagaatgcatatgcagtactagtttatatatacagaatg

SEQ ID NO: 379234 - DNA, 4572 bp, Cannabis indica
ttttttttattatataatattttgaaaatatatggaggaggtcgagaatagtgctgtaaatacatgttaaattttttaatacaacatgaaatcgttatagattcgaaaaacacaagtacgactaaggatgaaaaaatacaagcttaaacacgactcaacacgatattataaattggcataatacgacataaaaaatatttctttaaacacgacatgatacaaaaagcatgaaaggcacgacacgtaaacacaaataaattaacccaaaatgcacgacacacaacaaggtcgaaaaacatgaaacgaaatatgaaaaatattatgatttattaacaacaataataataataataagatatgcatttaccaattataaataagttaaactaatgataaaacttaaatataatactaaatattataattttataattaaaattattaaaacatgtgaaactaagattatagattaatttatttaaaggatgtgatataaaatttgagtatttataattaaatattcaaattaataatgctaataattttttatatgattatttgtaaattattgttgaaaagttatataaatatatactaaaactatatatgttagtaattgtaagaaaaaatatatacaaaattaaatcacgaattcaaacccaaagatgaaaaataggttggcctgttaaagaaatacgggctgacacaagcaaaacacgacatgaatctgagcatgacatgaaaatatcgagtctacgggccgtgccgggcctatgggtcgtgcaaggtctatgggtcgtgccgggttacttaaaatattagcacgacacgacacgacccatatttttctatagcacggcacgacacaacccgttttttaaaaagtacaaataaatatgggtaagaccagcacgacacacacaaacttacaacactagtcgagaatagtctgatgagagcaaaatttatttgtttggtaatagagaaagtaagaggtccttcctcctctaagtctaatcttctttatgcaaaatgataattttatcctctcacataaaataatataataaatttataagatttttacaggtggagtctgtgcattggcatggggtagatcataccaattgttggagtttagtggatttaaatgtctgaagtgattgtattcactcctcaagttgttgtcttgggtgttttcacctgtccttgggcctgatcggttgaagattggcctttgagtggctcgctccccttgggggggagtgtactcccctagccggccagaggcactcctgcaggtggctggccggcccaaggtttgtagatgggggctattattgagcctgagatccctgacttgccccacatgtcactggttgcagggatctggctattctcgccattagaccttcgtgggaaggcctgtcttccttcaggtaagggaaattctgtccttgttcctcaagaaccaggttggttagcttgcttatagagtggatctctaatgagtcctggcctcttccattggttctctgattgaaccgccttattaagtcgtcggcctctcttttgtagcgatccagctctgcctggtgagattgaaggatgtactcttggtcatccatccatctcaataatttgtctttactcagcaaatgcatcgcaattagtagcgtgtggttcttcagtaaggctgacctgacaaacagcctctcatagtctggctaactcgagatcttctcccgtccacatgggccttgccagtagtaggctcaccaattcttggtcctatctctcctacatagtatcagggacgagatctggttccatggggctgttcctcaagggtccttccttcagtaggaggggcctgtagagggtcctcctttggaggcaggggccgattgttcagatctaccaggatgtttgtgtcatcctggccagcggtagtggccaaattcgtggtgcctgctgagatggcaggattgaccacatttgtagtgttcatgggagttccagtcgtagctggaacatggatattaggatctgtagttagaggatcttgaagaagacccaatgatgcagatggtgcaactggggttctccttgtgttaaccatggcatttgatcaaatatgatatccgctcgctctcaatggaagcaccaaactattaacctcaaaaagtggccaaccgatagcggagtcatattaatattgatgcttgccacatgttacacaattagaactataaagtaaaagaacacaaggatttttatagaagtttggccccctttgttagcgggtaatgacctactccctttttagttgtattgataccgagagataatactattcaaatcactataggtgagatctgatatagttctcttcaaattacaatgtatgaatcagtaggcagatctttaatgaaagagagatgaagccttggaggcgtgtgagaaagaggaagagagagccacttgtgcgtgtataagagagatagagagagagactagggtttcagacttagaggcttcatgtagacttagagtgactaaggtttctagcgttgagttaagaccctttatatatgagagtataaaccctacttagcaaataaatcatagacatgtacatattaaattaataaatacaaatgaccaaatttccccttaaaagaagatatttttgtagcctcttaatgggctgtcaaggcttaactcccagcctggcttgctgtccattgaacaaggttgtgcattattgtcttgccagggagaagctggtcagccatacacttgcaggataaggtttggccaaccatgcaaggtctgcatgttgaggtatggccggccatgctcctactaggacttggcaggtcatgtgcctgccaggatcttgcaggtcatatttttgtcagctttaccaagaggaggtcaacttttagatgtgtacgctagcctttggcaagtagaggccaactttgtacaccttttccttgtagaggttaggtacccttggttgaacgaaagctccctttgtctgaaagtgaccttttggtcggccaacttgtgcctagatcttgtccaaccatacaagctcaccctggccagcctatatgcttcccttggccgtctaaacatgttggtacaattccttgatggctcgcttcgctccttttgcttgcttcttgatgattttgccagaccttgtatggagaccttgtcttgctattggcaaggttgtactccacatgtactctatattggcttacgttgacatgccacgttaggtgaataaaatttcggataacataagtgtgttactgatttctcaaatcaggcttctatttatagtagttaaaaccttattaattaaattatatttaattatttgaataaattactatctataactgaattcaagtattgatatttattagagaatctctcaactacttgagagaatatctcaacaactttgaaatatctataataacttttcaaattcaaatatttatttaattgaattaatgaattaattaacccgaaaatataaaaccatagggaaccctgcaataggggtatgcaccctactatgtcttatttaagataaggacggtgtcttttgtcatgacaacttttgtctcaataaatattgtcttaataatttttatctttttcctatttaattaattattattttaacaattcaaaatacatttttctccaacgacattataatgctctttatcacttcccttgacagtattttaaggtggcaattcgaggaccatgtacctataattctaagctctaataaactagattatttattgagtctcaaccaaataatctttgtttattaattccatgattactccactaaaaatatagaattgaactcttaataattatagaattatgtttactgaattttactgtaatgtccattgatataatcaattccaatgattagccctccatgtgttgattcgtaattagttttgattaaattactgttttacccttctaattagttatttatcctttagtaccataaattcactagtgtaagtataatttcgatcccatctaaatttgtgcacaactttcgagttctagaattaacacataaagggaaccagctttcgatccgtcaagaaagtcgaaattctataattgtagatcatgtccccaaccatccacattattagtttcccaaaacaaatttgtaagaatcatcttctctgataaactttaacgagtgtattaaagaaactaataacatgaataggagctcatgattactcaagatttaggccaatctaccattgattatcgttatgatatgaattaggtctttatagtaaatgtcatgttagataaagacaacttcattcatatctttccttgtcatatataatctctattatatacaataccttcactttgatgtcatactacatccataatctgaacctagattacttacaccgaagaacgagcatcagtgaaccgtactagcaaccattgattaaagattcccaaactttaatatgttgctga

SEQ ID NO: 379235 - DNA, 1179 bp, Cannabis indica
ctaaattagtgacaacttgtaactaaagactatattttagtcacaagtaacattttgttgtgactaaaaaagttacatttagtcacaaaaaaattatgttgtgactaaaaaattgtcactaaaagtagcagttttttgtagtgaattcatatattgtgactaaaaattttgtggtttttttttttgaaagaacctcagttcgaattagattgaaatagcaaaggaactgggattcaaagggggaaatccctcccctttagcaaactgtcaaccagccatagaggttctagccgacttggctaaatcatcaacaaaagtaaaatgttctcttttaacaaaaacaaaatgacaggcaaaaaaaaaaaaaagatagcttcattagaataagagaaaaaagggcagagcatttccaatccggaggtttttttgcacggacggcctccaccaacacattcgaatcagagataatggtgaaattatcccaatgttgcagctcagcccactgcaggctcaccagaacatcttgcatctcgacttccaacgcagattctcccacaccagaggagatgccctgccaccaatccatagaatttttgtccatggccaccatagtacaaccataagttccgtccttgaaagagccatccaccatgatagacttgctggttattatcctcggctgagtctccccttcatgattgcttgactgactcccattctccccaactataagttgtaattcggcaactctgctggagatttctcctctgatcagatgcacattaggcacataaccccccatatggtacattttattcctagtgttccaaatgcaatccataatcactccaatgcaattgataaatttgggacggatagaggaatcgaccgagctacagagattgcgaataacctcctgcatgttggcacccaataccctctcgatccttatgggctaaggactagagaaccataaagccatagcaagactgcatttagtaaaaagatgtaaagccgactcaggagcagtatcgcacaagggacaggagtttgcttccatagagaaaaatttgtcccccgtaggcaacacattcgaacatgttaactcaaacttttcgatctccttgttttgatgattagcaaatatttgattattatttgttactaatgatttattga

SEQ ID NO: 379236 - DNA, 7597 bp, Cannabis indica
aaaaataaaaataaataaatagctacaatacatgtaattataagatggaaaaaaataaactaaaaaaccttcctaaggacaaaaacagataaagattctacctgaacaactcttgtgccaagaatttttcctaaagttattactaaaaaaactaaagaaagataaagaacagagagagaagtcatagtaagtagcgagtcggagtccctggtggagggagaaaggttaggcatttcatttcttctctctctctattgttcttctttcaaatttgaatctacatgtgaaaattgaaacctgttctcttttccgatctaatctgaatcgatctcacgcaacaaatttcttctaatacagtcttgctcatcctttttcatgtatcaaatttcgatttgacagggcgatctggggtttcgatttttgtcgaagatatcagatatggcggggccgaatatggatatgttcgaagcttactttaggaaagcggatttggatggcgatggcaggatcagtggagctgaagctgtcgccttcttccaaggcgctaatttgcccaaacaagttcttgctcaggtttcttcttcttcgcttctcatccttaggttttttgtgtacatattttgtgttactcattcttaggtagggtatagaatagataatactcaattgtcattgctgttttcgaattctgtaccttgatatcaaagattaacaatggcagatctgattcgattactattaaatattattaatgttattattacgattcttcatttgagatattggctaacctaaatactctatttgtatgtgtagtcgccgaaaaccgtagaattcgatttgaagtctaatatattattattattatctgttatagttttgtttttctacaaaagaagtctttctgaattaaccatcttattgatctttatcgcctttgaataacagaatttcgaaattatagtgcgatgtttatgattgacagatatggatgtatgctgatcagaccaaaactggttttcttggccgcccagaattctttaatgctcttagacttgtgactgtggcacaaagtaagcgagatttaacacctgaaattgtcaaggcagcattgtttggttctgctgcttccaaaatccctccccacaaacttaatctaccagctttatccgctccacaaccaaatgctctcacagctcgccccatcccccatcccccaacagatgggatcagttgcaccgccatcgcaaattttgggtttaggggcccaagtgtttctaatgccaactttaaccagagcttttcctcccagcaaaatcagtttgtgaggccgccccaagccatacctacaagtacaggtcgtatggtggctcccaatgtcctgaactccagtacctcaaatgattggcttggtgggaggtctggggctccccctactggtcctagagggataactcctgcatcgcctactatacccagatcacaagctctagtttctacgctttcccaaccagcagttactgacccaaaagcactagtaggttctggaaacgggtttgcttccacttcaggttttggtggtgattttaaagaagactcttctaggtctctgtattctgctaatagtgcttctgcctcattggccgtcataccagtttctagtgcaccccagtcttccagtaaaaccagttcacttaattcattgcaggatgcatttgccatgcagcctgcagccaatcaattccagcggccacaagcacctttgaacccaagccagcaagctgtccctggttcttcctctttcacatcatctggtatttcagttggagtgggaaccaccactccaggaaactctcagcttccttggccaaagatgaaaccatctgatgtccaaaagtacactaaagtgtttatggaagtagacactgacagagatggaaggatcactggtgaacaggctcgaaatctatttttgagttggaggttaccaagaggtgaatttattttcccaattttattgcattgtttgttttgatgtttattttactctcatttttaacatggcttcattggctttaccagaggtgttaaaacaggtgtgggatttatctgatcaggacaatgacagcatgctttcgttgaaggagttttgctttgctctttatttgatggaacggtttagggaaggccgccctcttccagctgctcttccaaacaatgtattatttgatgagaccttgttgtcattgacaggtcaacccagggcccctcatggcaatgcagcttggagtccaagccctggaactagtaagagtagttctttatggacttgatttttccctttccccttcatatgtttcttgataggatttttttgttttctttttatgtttaggttttggacagcagcgacaagggatgccaggtcctcagccgatggggcctaatgttaatttgaggccaacagtgcaagaaaatgctcctaggcaagatggagtgcaatcaaatcagcaaagttcaagagcatctgcttttggcgacttgtttccagatcaacgtgacaatgggcatcagagctctgctgtatcaaaacctgaagaaacagcagcgactgggcaaaaggcatgccctttacttcatttatggcagctactcatttgcttgtatgagatttcattctttttcccggataataaggattttgtttctttgattattgtaggttgaagaaccaaagaatgtcatattggattccagggaaaagattgagtactaccgcacaaaaatgcaggaacttgtgagtagcatccattcttaattttttggccaaattgactcagtggctgtttggagggttgaattaacttattcagttttatatttctgtctaagaattaaatcacgtaaatatagctttcacagacttgggtctgactttctctgaacttgtgaaatttgtctagtttattattgcttataatctttgaatcataaagtagagctaaacatggtatttttgggttgaaacaaacccttgttctgacttcagttgctctatgacgtttgttactgttgcctgtcattatcagttctattttggttcgccctttttatttttcatatgttattgtttatgttatcttcttttcaggttctatacaaaagcagatgtgataataaattaaatgagattacagaaagggcatctgcagataagcgtgaggtactctagagatctactgatttttctagaaatagcttgagtggctggctcgtttaattgatggttacaatatttattgcaggctgagttgctggggaagaaatatgaagaaaagtacaagcaagtggcagagatagcatctaaattaacaatcgaggatgctacttttcgtgatattcaggtgatatatttagcaccatgaatttctatgctcaataatgtttagcattgtttcttttgactagtttctcctactctctaaattctactgagtactgacattttactgattttaaattaaagtatttgtcttttgcatgtggaagggtactctatttgcttcttagttagaagctacatcttattggtgaatttttttttattggctactcacatagcataattaccttaaaagagctctcgtattaatgtggttctcaatttattggatgtgtcaattttttttaacattatgtactcttgatgatgtgctcttgattccctcctaggcaagaaaaatggaactgcatcaagcaattgtcaaaatggaacagggaggcagtgctgacggtatccttcaggtaagctatgactaatgaactgtagtgggctgttaaaagttctagataaagtattttttactgacaaagcagtcttataggtccgtgctgatcgtatacaaaatgatctcgaggagcttttgaaagctttaactgaacgttgcaagaaacatggattacatgttaagtccagtgcaataattgaacttcctaaaggtgcgcatgcctttctcgatgtctagtatatgctgctagtaccttcaacaaatgatcttttgttagatatatagagcacaacttgtattattttttggagtgcgcatgctgtctacctgctaacgtgcttacatatttgtgtataaatatatgttcttctccaagaatatttacacctttacatataaatatatatattaaagtaccatctgttttaggatgagcctgtatactggtttcaggtaaacttagaggtacttacaaatggttcattcttggaatttacttcgtcttcatgcttcacagtaagcgttgcccctaattaccattcccattttccattgagtgggagtggttttgagtatgtgaaagtttcttgtcaattggaaagactagaattttgtaacataattgcaacatgttattttcttttttatattgccttaacagttaacttaattgtgtttcatttatgcattgctcaaggctgggaacccggcattcaagagggagcagctgtttgggatgaggaatgggataagtttgaagatgaaggtttggtcttttgtttaaattgttttttggtcttcaataaacagtgtcaattttacagataccttgaagtaaagtatttttggaaaggatgttgactgatacttgtttatttatgtggaaacaaaaattcaactttcaggatttgtgaatgacctcacaattgatgtgaaaaatgggcctgttagtccaacatctcaatcagcttctgttcagagggaaatactctctgccgatggtgcccttgagaatgaatcaatattgtcccataatgaagatgaatatgcaagaagctttcatgatagtccagctgcagtagaaagtccgactcaagaattttcagacgctcattatggtaaaggttcagaagcagatgcagaaactcataggtaggggttgattatttctttgtttatcctcttgaattttatccctatttattagtcattgatcataccatatgataatgctgatttaaaatctctttggcagaagctttgatgaatcaacatggggtgcttttgacaataacgatgatgttgactccatttggggatttgatgcttcaaaaaccaatgtgagtctttgcttctgaagcacttttttgttgataccaaaaccaatctgatttgtttctgtttaacattcacctaaaggttttctaaataagggtatttaattcccaaaaagatttttttttaatattacttgaacttttgcatgatatcttaatgtcaaaaaatgcaattttctttgaaaagacatttaggatcatatcatacatgaaacctttttttttccttcaagaatgtattttccttttaaagactttctacatctggacctggaataggatttgcctacttccattttgtaccctattccctgtattattatattgaaggttatatctggtgcttggaaattttcaagaatcagtgattgggcatgtggttaagcttataaattatcactaaaatccatttatttactatttttgcctggaaaatggatgtacttgagtctaaggcctaattgtgatgcaattgcctttaaatgtgcactattaagctctaaaaatggcattggtttagtttgcaaaaaagaataatgacattggttttatactgctgtgtcatttgttagaaatattatcagactatttcatatttttccataagctcaattctcttttcggtactgtcatgtcatcctttctccttcaggatttggaatctgagaagcatagagatttctttggttcagacagtttttcaattgacccagtgagaacgggatctcctaatgcagaaagcacctttcagagaaaaagcccttttacttttgatgattctgtgcctggcacaccactttccaggttcggcaactcaccaaggtacagtgaggcaggggatcagtacttcgacaatttctcgaggtttgattccttcagcacacacgatgccggattttcttctcagcccgataagctcactcgatttgactccataaacagctcgaaagacttcggccacaattccttctcgaggttcgactccatgggcagttccagagattttggtcagcaccctcagaggttgacgaggtttgactccataaacagcacaaaagactttggcggaggcagcattagtggtggtggtgccttctcattcgatgacacagatccatttggctcctcgggtccatttaaggtctcatctcctaagaaaagttctgataattggaatgcattctagttgatcttctattgtttgtgctatgcaatttcctgattttgttgtgctaattaaagttcttcttgtattatttactttgtgtgttgttgtatagcttgcaatagttgaattagttctactgttttcttaaaaaaaaaatagctctgttgtttttgcttgtatgatctttccttcatgtactatcttccaaggtgtgctgtttttcttttcttttggctatgcaaagatttattgaatttgaaacaaaatattcaatgaataacttcttttaaattatgcagtacgtcttttttaacgtacaagtacagtatttttgggcagcacactcgagcttgaaattttaactacatgtaaatggtaacaaaacaatcatagtcttatttcatattaatttatccaaaaaaaaattacaagagtattttttttttttttgtaaatggtgcaacttaagtatttaacgccagttagataccaacaaaatataagtatttaatgctgtaatacaatttttaccataatttaagtaatttagcagcctaatttgaaaggaaaaaaaaattaagtgaccgcaaatattggtcaaataatatgggaggaaagaagaaatgagtgaaaaggaagaaaaaaaaataaaatacgaattgtttgataaagaataaaaaaaaaaaataatgctgccagactcactaatttttctcttccaaagtgggaagaaaaatatagtgtggaatccacccattttcctcctccaaattgagaagaaaaatagagagaaaagtctcaaataaataagtaaaaaccaaatgactaaataattttacaaaaaaaatataatattaatatttttaagaataatataataattttattacataccttcttttttatataccaaacaacaaagcaaaaaggtttattaaacaagtttttttctaaatattttatattttatgttaggattttttgtttcgaaattcttaattgctggagattgtctttttcttctgattaggttgtcgaccctccctgaacttaagcataacttaattagtgtctatgattttactattgtaattaaattttaactgttagatcaatataaaaacatacatatgaaattaattcatgcatttaaaatataaatcatacatacaataaccataaaataattatgttgataagaaattttgatgacaaataataaaaaaacatacaaattaacataattattatttgggtaaatactattttagaccctgtgttttgcaaaagttatagattggacc

SEQ ID NO: 379237 - DNA, 5114 bp, Cannabis indica
agttgagcagccacagaagaaaccttagcttgaacatagccctcaggagaattagcgtgttgcataacataacacaaacaaaaactgcaagaaaaatatttattaatagaaccatacacaagaatctcaatcaagtactagtttactaaaattatacttatgcattttcatcctggcataaccaaccaaggtacgaactgatatatatttaagtacggtattatataactagctgaaatgtttaatctaaaaacaaaaataagtcaaaaaataaatgtaactgtgatatgacctaatcaagtttctcttgtcatcagaagtaagcacactccattctcttatagctgcatctcgaattgctgctgcagcttgaaatcttgcatttgccaccagagaattctctgggataagaaatcattatcagcattggcatatcaaaagagctgcactgagcactaaactaaaacaaattgttttacaatactgaatagagtattcatcatatttgcacggaataacttatatgagatgtaaatcctctgcagatgcctaagctatatctgcatactaccatataaaaaatgttccacaggccaatggtgacacgatcattgagtgcaaaagaacaatattgaagtttatcaccgcatcaaatatttgtgcaatatcaacttaccaaggatgtatttacaagcttgatatggctgttgagactgggacagcgacaatagagttgcctcagcctcagctggattcatgtgcatctgcttaaggataacaaacgtgtgttagtgtagtttttacatgtgaacaaaaactgcaatgtcattagggattaatgtcaagtgagagtctaagctatagccaaaattgactacaataaatagctcactcggcaaatgaacatcacatgagcaatttaagctcataacttgtcaaacaaaattcaataacatatctcaatccaaatagttgcaaagtccaggtgaaaaagaaaattcctttatgggtactaaactccaatacttttatgttcttctattcaccgattcccaacaacttggattttcgagtcctaaattttttttggcttgaaaataagaaagtgggtttcttttgattaacatcgacaacgctccaaagttcaatctttctaacaagtttcggtaaatgtgaaagttgatttgttgtattatcatcgataacccttttaaattttcttcaacaaccaaaaagagcaagagagacttaacacctgaatggaagtacaagcaagctcgatagcgtgcatggtggacagaagttgggccaaatcctgtgacccacctatctctgaaaacccttgcatcctcatccccaactatctggatatcaatgaaaactaagtcaaagattcaatctttagtttttgaaccaccacaataacattcatattacccaaagagagagagagagagagagagagagagagagagagagactacaaatagtaatattcatttaataccttagtctcactacagagagattacagattggattggacacagaatgatatcatttacaacttacataacagaaggggttattataatatagacaagactgagaaagaaagagtgtaaagaaacatcagttgaaggtgccctctgtgctgctctgtgttgttgggccttttctccctatgctaccaaattttcttatttgctaaagtaccctcatatttcttgtaatttccttttgcccctctataaaagttaacagcttgtgattatctataacctagttactaacgtcccgtcccttgtgccaactccttcactgggacttattccctctcgcagctaccaagttcagtgcgcacacaaattcaaggtaaacactcaactttctcttatgtcatattcaaccacgaatgacccctttcaactagggtttttcagctgcgtatttttacttggatatggatgttgttggcttctttctttttctggtctcctatttcttgttttcacaaactccatgcttgtaaattctaatgattttagcatattactttacgtttgaatgcttatgatgaccaagttttaggagttcattctggcattgaattaccatactagtcattcaactttttatgcaaattttgattttttgtaagtggattttcttctcttttgtgttatagctctgaaagattcactttttgataatattattgttgctttttaatttaagcaggagctagacaaagcagaagttaattgttattgaatggttcagcttgaggttatgctatttccctggtattagaattttctcttaagttcttttgtagttatttttggtgtttatttacttaaaggttggtggagagatggggtatacaatgacccagcagagttctatgattggtggtcatagtttgcatagattttccagacatgatccctgttgcgccactggccgtagctctagtattaaagtatccgttgttcacatgaattgctatagtgagtgtaatcgtttagggtggatagtacaatttgggtccaaaagaaaggtttgcttctcacggttggtaggtttgcagagaagtattagccttagtagtgtagatgtagttgatcaggatgaaattgaatggacctctgatgcatatgaaatgaatgttgagcaaaaatctgaacagaaaatgaatatgaagaggactggtgaaccttcaacgatgaatttgaacggacgctttgttcaaaacaatgagaaaaccaacaatgataatcttcagtatttttgcagccgtggaaaggtaatggaagcgttagggttgattgatgttatggcccgtcttaaccaaattccagacttgcagtgttgtataaacttaatccggggtcttatcaaaattgataaagtagacaaggctgccaaggtcctgaaaatcaccatcatgtccggtaggattctggatatcattacatacaacatgatggtcagtgctctctgtaagagaaggatgttcaagtctgccattgatctcttggaagacatgagcttgagtggttgccctccagatgttattacttataatacaataatacgcttcctgtttgataatggaaactttgatcaggctattggattttggaaggaccaactgagaaagggatgtcctccttatctagttacctacacagttctcattaagctagtttgcaagcacatgggaactgttaaagctatggaggtactagaagaaatggcagttgagggttgtcacccggatattgttatctacaactcactaatcaatttcacttgtaaacggggaaactttaaggaaacgagttcaattatgcgtaatcttctatctcgtagaattgagccaactgctattacttataatacccttctccatgctctttgtgaccgtcgctgctgggatgaagttgatgagattctgaacattatgaacgagagctcacatccccctacagttgttacttacaacatcttgattaatgctttgtgtaaattcgggatcatggatcgtgccattaacttttttgctcaaatggtctctcagaattgttctccagacattataacatataatacactcctaggccctctctgcaaagaaggaatgatggatgaggccctccaactacttgattttctaagtggcaccaactgttctcctgaccttatcacttacaatattgtgattgataaattggctatgctgggttatatggagaaagccatgggactgtataatcaaatgatggaaaatggaattgttcctgatgaaattaccaaccaatccttgattttcggattctgcagggctgatctagttgaggaagctgcagtggtactgatggagatgactaagagaggccacagggtgagaactatctcttacagaacagtgattaattgtttatgcaaagataacaaggtggatacttcaatacaaattttggaaatgatgatatcaaggcgatgcatcccagacgagtcgatctacacaactatcattaaagctatagccgctgctggtatgtcggaagaagctggtgaactgcgtaaaaagttgactggactgaaggttcttagataggatttcatcttactcatgttggaataaactgagttttgtgaaaagctgccatcttggtcaataaatagtttcactttcttaggtgaagttttgtattataatgtcgatttagtttgtttggaggattagtggttgagcatagtcatatttttgtagttttttcccccttgaaggataaattatattgaaaagagtttattattattattttttctggaaaagtgcggctaaattactaaaactttaattttactagcacataagtacaattttttttatatggctaaagcatcaaaacgttactttttctttagtactaatcgttgaatttgacttttagcctgttaatagtcatctgtgagcatatgattttttcatattttggtattttgaccaccagaaatataaagttttagtacttctaccaactaataaatctgctagtaaacacaaattatatgtacttaaattttccaaatttattgtttagaaaataaaaataaattgtaggattttattacaatattgcccaaatttaaaatattacaatatatgtgcaagaaaattttattacataatcctatacaaaatatatactatcattataaatattttattgtgtccattaataaaattaattgtagaacttactatgtagaatacttttcaattgatattattcattcatgattattactaaataaatttaacaatgtatattaattttaaaaatattaaattattaaattttgatcctatggcgaacaataaaaaataaatttgaattttcatgcttaatctagctacttaatcaaaaaaaaatattaaaaaatatttatttttacactatattaaaaatatgtatatacaacatatttaagtcaacgctaaggtggaaaatagccccaaacacatagataagttaagtaaatatcaattttttcaaaagtttagcaaaataatcaaatataataaaaaaaatataaaa

SEQ ID NO: 379238 - DNA, 4433 bp, Cannabis indica
aataaagtagcgaaatccaatacgttagggttattgtctattcaggtaaactttttgttggatatttattaattgtgtaataagaagttttggtgtaattaataagatgatatattaattaaaatgaataataaatatatgcaggtaaaagttgtagattgagatggttcaatcagctagatccaagaattaacagaagtccattcacggaagaggaagaagagaggcttcttgcttctcacagaattcacggcaacagatgggccgttattgcaaggctcttccccggtcgaactgacaatgctgtaaagaaccactggcatgtcatcatggcccgccgctgcagggaacgctcaaggctctacgccaaccctaacaccagacaaccccacccccaaccccatcatcatcatcttattcttaagcaagatcataataataataatcataataagatcatgctcatgactactaataatactaccactactgctgctgctgatcatataaaccttgtctcatcttttgttgacaattacactactcttgctaataataataataagcgccaagactactactaccctttaactcctcctcctcctcatcgtcatcgagattattattccagtccttgtatcacattaatgcaacatcaaggtacttattactttattatctatctctaattatataaggttgattatttatttatagtatgactatataatatatattgatcatttatataatttacagaaaaaatacacgatgaggccgggattgagttttatgattttcttcgagttaatgcggatcagtcgaacgggagcgaagtaatcgatgccaataataataataataataataataataataataataataataataataatggaacaagtacaagattaagaaaaaatgaggatgaggatgaggaggaggaggtggatcagaaagctgcagcattagtaatgggatcatcatcatcatcacaagattatggcagtactactactactgctactccttcattcatagacttcttctcagttggagctgctggttcttaattaattaataattctacctcactattaccttcattattatatatatatttatatatttctctgctgatcgagctggataggccaccactcaaatttcaatgtaaaaaaacaaaacacacatgatcgtcatattcatattatacaccttaattaggctaactatcatgatgttgaagaaaaagcatcttcaatgctggttatatatattaacacatctctacaaaccaaatcctcatgacgaacagttcccaatgtataatatatattatatatatttttttaattaattgatcaaggcatccacatatgtttatacaattgctagctaggtgtgtcaagtgtttcaccttctttccttacgattagaattttggattattactttgttcagtttttttttttggtaaattaatgagaactattattaataatatgtacaagtacatattagttaggcattcctaacttttcaaaccacaatttatcttctaaactaaatttctcctttttaaaaaaagaaaacctatcacaaataatcctatgaaccaaacaaaagtacaatccgcgagtatcatattattatatatatatatagttatatatacatatataaacaaaggacacaaaaaattacaaatcatttttgtttcatattcatattatatatatttatttattttggggtttaaaaccacaaaccctttccagaactcaaaagcacgaatgtaattttggatcaatcacatgaataagataagggaaaatagggagaaaaaagatcacctcaacgaaagatcacctctgtttaccaccaaacgatgaacctatgcaagaaaacaaaaatcgaactcaaaatccttggcacatatagttttattcgaaacaggaaacatgtgtgaacaagcatcacaaacctcatattcaaccttgtgtttctcggaatcctcaaggggaacgtagtactttgcctaatgggtcttgccttgctgattctgtaaaagtatgaatcagatctacaaaattggataacattcaaacacaagtgatattcaatcacacaaatacattaccacaacattttatttcatctcatttcaaattaagaaacatgagatggtaccattgctttataaatgaagaacagacgaagcgatcgagaagggaaagagaagcaataaggtagtattgtggtaatgtaagcttagagttcaagtaatttgagctgcaactgacatatttcaaaattcaaaatcaaaaggatatgaacgaggttcaccttgctgatttactctatatctccttcaatcgaccaatgccttcgtcaatcgcacgctgccaatggcatcgatggtaagaaatggccacgagcattttactataatcacaagagaaaaaaaaatggcagtttctttctcaagatcacacagcaaacaagtatcaacttgaatgcatccaaatcttatcaaacgatcctgagtttgtaatctttgcctggaagctaaccaacaaatgaacctgtatttaggatcactataatgattccatataagagagttccacactctagaggaatcaatttgaggccacattctatcacaatccttagagatcaaaaaatccatgccaataaaatctttacagccaatttgcctcataataatgtccttcacttctataatttttttttttttctattttagcaatatcccaaatatatcttcccaaagtaccagagttctaatgctcaatattcctaaaccccacacctccacgagatttagattgacaatttaaatctcagaccaagagacaaggcctagagaggaagagtcagtcggacctttccataagaaatttctacaaatactattaattctccttataatatatttaggaagaatcattatttgagtccaataggtgtgtggatagccacaagaactgagttaatcaacacacatctaactgcataagagatattcttggtactccatatattcaaattagagtaaccatatttttaatgatactatcacattccactttagagattttttttgaacatataagaataccaagatatctaaaaggcaaaaaactactaacgtatcccaaaaaatctaagatatatgttgaatatcctcatttgtcatacctgaacagtaaactgctattttactgacattagcttgcaaactcgaagtctcaaaaacctcataaaagctctcaacatgagcttcattgaatgaatatcacctcgagaaaagagaagaagatcatctgcaaagcataaatggttcaactttcagctagtacatcagggatgatgtttaaagtcttttctcaaagtgattttagccatcaaccgagaaaaatattccattcctaaaacaaatagtaacagagacaaaggctccccttgtataagccctctagaagaaaaataaccatgacggttatcattaatgattagtgaaaattttcgagtagtgacacactccttaattaagttcacaaatgataatggaaaatttaaagcttacaacatctctctcaagaaatctcattcaacagtatcataagttttcttcaaatccatcttgatcatacaagaaagggtattattttgtctgccatattgcttaactaaatcttgacaaattaagatgttgtgagcaataaaattcgcatacacaaatctcccttgattagaagcaattaaagtaggaagactatttctatgtttggaacaaatcaattttgtaactatcttataaaccacattacaacaagctattggtctaaatttaattacagtattaaggcaattcactttcaaaatgaggttcagagttgtagcatttacctctttaaggattcttctaaattgataaatagagaggacaatggctgtaaactccttcctaattgtgctacaagttttttttttttttaagaaactactactaaacccattatgtctaagagcttttgaatttggaataacacatagagcattctttatttcttcctctataaaaggttgcagaaggtgactagcttgattatccgagatcacatgaccaactctaaccaccttagcaatgacagactttctattatccatcttagctcccagtaaatggccataataatgtaggaaagcatctcaaacagtttcggacatgtcaacccagttgccatattcattatggatggcaaaaaataatttttaattttctcatctttaagcatcgatgaaacaatttgttattactatctccatcaataatccagtttatttttcctttttcagagaggaaagagtgataagcactagatgttgggttttatgcc

SEQ ID NO: 379239 - DNA, 3261 bp, Cannabis indica
taattataaataatatagggtgtaaaaataagctgtcctgaagatcaacaactcttctgactaatttcttgcttattaattaatatgagtatttagtattagcattgtacggtcaatcattgaatttctacttttggtaacataatgtgtatttaagtcattgagttgttttgtgaaaaaaatttcctatgcttgagaccaagcgtgataaaagtctcacaaccaaaaatgataacataacatactatcaaattcaattatttataataataattgtttttttcttttaataatacaaataattagtcaaatattaaagaaaaaaaaaatggtagcagaaagaaaattgacttttgggtttggatattttttgataattgtaatgaaacgcgtgattaaatggcagattctttgtgggctcttagctggtgagttgggtaccaaatgatgaaacataaacaaattaaattaatttcttcaaaaaaaaaaaaaaaaaaaaaagaagaagaagaaaaaaactaacatattattttctttttgtatacgaaaaccagtcaaatatgatagggggtatcaagttatgtgtatatgagaatgaaaaagcaaaagaaagatattttaattgtagttttgttttgaagagaatatatatgttgaatttatttttaaaatactcatatctacaaaatcagtgtgaattatgttatttagtacggttaattttctttttttattttttaaaaaatcacaaaaagttcgtaataaacatttatgtatgtttggtaacggtcgtattatgtttaataaaaataatattatgtttatttttttaagaaaattatatttggatagaattttatatttattaattattacgatcataaattttaatgtagtacaaattatattgtttaatatataagaaatagttgctttcaaaaaaaaaaaaaaaaaaaaaaaaaaaatatataagaaatagttcgtattaacttgtattataatatttagaagcagttcggggtcaaggcttagtgtcgcggtcgaatgcagggtcagggtgcaggtccgaagttcaaatttgggatcaaggcatgggttcaaggtcgagtccagggtttggagccgagttcagcatgtgtgtctgcgattgaggtttgcattcggacctaagggttcagcctggtcggatttggaattgggatcttggtttggagtccgaaccagacaagatatgatcgagtttacgctacaaatagtataattttacacaatttattaatacaaatctatattaaatgtaatattatattaaaataatactattcaatataatataatacaatataataccgtttataagtactctaaataagtacaaatatattgtaattatattccaaaaagaagcatggtcaaatatagggatttgaaaaaagcaaaggcaaagcaataaagccatgaatattgtgcaatatttggtgggcctatcaaacactttgtggcccattcttttataatatttggcccgttctttccgcccataattaagctcctactttattggagttgacgtaatcttgtaaaagtcgaaatttacgacaagttaaaactaaaaatctacttgatcttggtcaataacaaacaacaaaaactaattttagaaaaataaaagtttaagaatattaccttttattttggtatatttttatggattatgtgtatatattcagaataattgactacgtgcaatgtttggatttagttaaattcacaatcgagaataatatatatagaataattcaatattatctgttacaatgtatttgattgaatacatattgaaaaaaaaatcttaaatcaaaatgaagaaaaggaatctttacattatctaaataataaataaataaataattactcattaaaaaaatcgtttcataagtttttttggtgatttattttattaaaatatttatctataaagatataatcatttttacgtttttgggtttttttttctaagtatatatagaaaaaaaatagatattatttacaattttttttttggctattttattagatattgttggtttttgctagttgaaaatattatgctattaattatgttttttttttaatatctgatccgaagtgtaagtaaatgcacatctggacatttttttttaacttttacttttttgcttatgtgggacaattactatagctgtatatatttaacttaaacgattacatatgtttattttttatgtaatatttttaatttttttttatttttactgtttggattactccaataattattatataaattgctatataaatttctataaaaataaaaaaaaaactactttaaaatataaatataaaaaaaatcccatttgtattaaataggatactctttagaatttccatgttaccgacacttttgtatttacctactttatatagaaattgcaaattacaagcattgaatattcactatttttattttatcttttttaaattttaaattaaacaaacaaaaaaaagtaacacagtaaataaaatactattaaaagattaatatttaaaaaaaacaaaaacaaaaaaagaagagtaaaaagtagagttgttgtaagcttgtgaaaaataaaaataaaattacattttccacgtagataaagggttaaagttaaagagagtcaccgtaaaatacgtaggccttaccacagtgaaccaaatgattacatactcaattacacgagaatttatttactacaatcaccgccggcagcttaaataattcggtgcactcagattcaccgtacactcgccacgtggcaactcaaccatattctgtgggtcccatctactgagctctctatctatctattatagctattcatattctcaactataatttctctctctctctctctctacttgtctttttactttctctctctaaactttctctctctaactatcgccgtcgtctagggccaatcggcgtatatatttatatatatataaattattattatatatttatttatattttgtattaaattttttttctctattttccattgtcgtacacttttttaatgctctttggtcaattactggtgattcgttagagaaggctctggatcggattctctccattaatgcgcagcctatattcctcgtgattcgtgttaagagaaaaaaaaacaagaggtgattttgtattttaatgtgtatatatgtatgtatatatat

SEQ ID NO: 379240 - DNA, 5935 bp, Cannabis indica
cagccacaaacgcagaaaacgacgatcgaagccgtgaaaataatccagtcacagatgtagaaaaaatcaatcgcaccaatctaagcgcaccaatccagtcacagatgcagaagaaattaattttaaccttgaaggaaagccaccagagaaatcgcaacaaccagaaaaaagaataaaacagtcgcaacaaaaccaaacacgagaagaacccagccgcaacagtcagtcacaaacgcagaaaccaaaaacgatcaaagactttgaagaaatccactagtgaaatcacaaacaaacagaaaaagagaaaaacccagtcgcaacaatcctgtcacaacgtagtcacgatcgaaaccagtcgacaaacgcagcaaaccagtcgacaaacgcaggaaccagagaaatcgcaacaaaccagtcgatcgacaaacacagaaacgaacgaaaccttgagagaaactttcacacatgccacctggcaagacttaattaataattaaaaaggctacaagcgatatttttgaaaacatttaaattaaaaaaaaaataaagtgtatatttgcagttaacaaattattgacagcacatcctatcgtccactccgaggatagatacgataggtcagtctctgtaaatttacgattttacccaaacattaaaaacaaatttctttccactagaaaagtgatttgactgttgagtgaaggtcaatacagtaaaaacaaaaataacaaaaaaactgtacacaacaaaaatagcatggtacgaattttagaagggtttataaaagggaattctcattctaagaaactttacattgtggagttgtaaactcacgactcgctactcagaagattcggaagataaccaaaaatggcagacattcttgcttcgttgaggtctttaatggcttctcactctccgcctcttgatgctttagttgttccttctgaggattaccatcaggtttctctctttcttctgaattgacttatttcaatcgaaactctgcttattatcagcttttgtcgtagatattgtgttcaatctctgatttgggataagaaattttctcgattgatttttttttttcataattcaattttattgatgattttttatcagagcgagtatgtatctgcacgagataagagacgggcgttcgtttctgggttctctggaagtgcaggtctgttgttttcgatgttaatctttagtggtctgtttgttcaaataattatgggaatactgaattgggtatttttgttatttgaaaggtttggcacttataaccatggatggagctcggttgtggacagatggacgctattttttgcaggcaactcaggaacttagtgaccagtggactcttatgcgtatgggagaagaccctgctgtggatgtctggatggctgatgtgagtcattcttactttgaataattataattctttatagtcaaaatagctactaaatgtatcaaggttttcttctaatatggtttttcttgtgtaattccaattcatggtggttttgtcttttagaatctgcctgaagatgcagccgttggtattgatccttggtgcatttcaatagacactgctcaaagatgggagcatggttttgtcaagaaagggcaaaagttggttcagacatccactaatttggtagatgaagtttggaaaaacaggccagcagtggaattaaatcccgttaatgtacagcctatggaatatgctggccgttctgtggatgaaaagttgaaggatctaagacaaaatcttgcacaacaaacagctagaggcataattttcacatcacttgatgaagtgagtttatcttttcttatttcctaccaagtctggttgtcaatggatgtcactagtctttgatttcttcttgattttgtcttatgattggaatttcgatttcgcaggttgcttggttgtataatattcgtgggagtgatgtgtcctactgtccagttgttcatgcatttgctatagtgactttggattcagctttcttttatgttgacaaaaggaagatctctcctgaggtcagttaaatccgtatatcatgttttcctcatggagacatatgaagcaattttgttgtttgtaaacacacttgaaataaggaggcataaatggaactaccttatccttgcaattgttcatatttttagcttatcataatttaccggaatttgtatagagtaattgatgcctattgaaagtggccttattattaatggtgtctacattgtttaagatttatctcagaaatgtgtcttactaaccaggtcaagcttcacttggaggggaatggtattgaaatacgggaatacagtgatgtaagttcagatgtcaaattgcttgcatctaatcagctcaaacatgttgacatcaagacagtaggtaatggcacatctgaagcagaaaagaatgattatgagcttgtatgggcagaccctagtacatgctgttatgctttgtacacaaaattgaattttgagaacgccctcttgaaaccatcaccattggcacttgcaaaagctttaaaggtgacatttttagtttctttatgatttgcattgcttggagacagttatgttttccaagtgtttcgttaactgactgatcaatacttgtgtgttcttgtatgattaactttggctttcacaattgactggtcaaaattatagaacccaatcgagttggaaggattaaaaaaggcacatattcgagatggtgcagctgttgtgcagtatcttgtctggttggataaggaggtacttcatgaaacttacatgtagacagcttctgaatgttcctttattattctttcatttaaatgatttagtttattagccgatgcaactataacaaagggctcacactgaagctactctacgtaactttcagatgcaggacaattatggcgcttctggttacttcttggagaaggagagttcaaagaagaagaataatttgtgagttaatttatcaaggcaatattgaagactttgttaactgattgcttatacgtttctacatattttcactataaatacaatctaaagtttcttaaaaaaagaagaaaaaaaacagaaataaaaattaaatagcaaggacaacttaatgttggttacttatcaatgtctttcagagctacgcctcaaatcctatagtgataagtagccatgataatgtgatatgctacataggaagctttacctgcatcctatacatgatatgaaaggaacctttctgactgttactagaatattttgaagaagttaacggtctattatataatcttttggtgtgtttcatatgttcaatcattatggcaggggaaccaggaaattgacagaactgactgtaagtgataaactggagagtttccgagcctcaaaagaggtaacctgtagcttcctctacttttcatttaggacaggtgacttggttttgaactattcacaagctgctccagaaataggtgtattctaatatgttgtaggatatatataataagagtaatgattttgacacactcaaattgcacacatcttttttacatgtgtgtgtctagcattactcgtataaatttatatgtatacagtacaattagaaaaagaagtgttgagtaaaaatgatattcattcatgattctatgtttttgcaattgaaattataataaagatagtacgacccaaaaacttaaaagtaccatactattttaggaatggactagaattatactttagtttatcttgaagtcttgcctcagatatttgttgaaatattaatagcatgccactgcttgaacaaccttgtcattttaatgaattcatcgattttgcagcattttagaggcttaagtttccctactatttcgtctgtgggtccaaatgcagcaatcattcattattcaccacatgaagaaacttgtgccgaattagatccagatagcatctatctttttgattcaggagcacaggttcgtcaattttcattactactccagtgtatatatgcctggaaatcggtacacttcaattctattatgccatttaactataaagccttttttgccttttaactgtaatgtcgattgcttttatgaagtatttggatggaacaactgatataacaaggacagtgcattttgggaaaccatcagcacatgaaaaagcatgctatactgctgtaagtactgtttcattttcattctatcatgctttatttaaactttgaaacttgtctgattttgtttcatttctgcaggttctcaagggtcatatagcacttggaaatgctcgatttcctaatggaactaatggtatctcacctgtcgtgtttgtttatttttgattactatgaagataaatggaaacatttatgtatcctttgcgtacaggtcactcccttgacattcttgctcgagttccgttgtggaagtacggtcttgattataggcatggtactggtcatggaattggatcctacttaaatgtccatgaaggtagatgctaactaggagtgtttgtttttcctgaattatccaatagatagtgttacttcagttgattcatgaaaatttatatatttcttgatcatggttgttttttttttctattgaacaggaccccatttgattagtttcagaccacatgctcgaaatgtgccattacaagcttctatgactgtaacagatggttagtatctcggtgtcattgtctttacttgttgaaccccttaatgcaatcttcaattataacccatgcctagtagttagattttcattgagactcagtagcatctgcaagtgttttttctattcttctttcaataatgtatataaattatatttttatgtacttaaaactaaatgacacagaacctggttactacgaggatggtaatttcggtataaggttggagaatgttcttataatccacgaagctgatacaaaatttaactttggtgacaagggttacttatcatttgagcatataacatgggtacgttttcgttaatatttttttgaattgttgaatgttaagtttgtcagctaaactgtcttatatcatattatatatatatatataaattgtacatcaggcaccatatcagaaaaagctaattgacctgaagttgttaacaccagaagagttggattggttgaattcgtaccattcgaagtgtaaggatattttagcgccatacttgaacgaaacccagaagtcttggctgcacacagccactgaacctatttcagtgtgagcttgacttggactatctgtgtaatcgttatgttgcatggtctctttatgaaataagaataatacgaataaattggtctttttgttaataatttaaatatgaattgaatgatttggtttcatttgaaaaattctatttttattttagaaggaagtttcataattttctttgggacaaaattatatattatgtatgacttatcatctcaagaacaccttatgcttgtgtatagtttcttttattacttttttctaattaacgtgttgtcaaacttcattaaattgtcattgcaaaaaaaaaaaaaacttgattaattaaattgtcatttaagaaattgaacaatttgaaaaacatcacttcaaagttcaaacaacactagtgttatatacaatttgatcaacaaggtgggtattaagaaatattcttttgaagttatggcattaagattagagtataaatttgacaataaatggcttgttgtttaagctgtaaaagagtcgtattgtattaaataataaataatactatgtttagataaaacaatgtactgaattaattattatgaccaaattctttaatacagtgtttgttacattatttaataaataacaaatgatctgtattagtttgtattataatatttacaa

SEQ ID NO: 379241 - DNA, 4310 bp, Cannabis indica
aaaaaaaaaaaaaagaagtgtacttggctagatgatgagcaacaaagttagctctctaagaatataattaaaccccgagaaaccacagctttgggggacatttttatgcaccaaataagaccatctaagtctccattgtaagactctgagtgagaggactggaggaatatagtttgggcagagtccaattcaacaatgaacccattcaacttcaagtctttccctattttcaccccttctttaatggcaaacaaacaactcactcgtaaggttattaaagggtctgtcaaaaaacttactctgaccaccgacacacaatccattttcatttctaactaccactgcagcactgcacactttagccgacttatcacatgtcgcatcaacattaattttgaaacaaccaacaggagatggattccatttggttgtccttcttctgattgatgtttgcatctttaaaattcctgcaataatggtcacaccagtttaccaagtctgaggggtgtggctctttctctccttgtttgtgtttgtttcttacataccaaagctgtcaagagatgatgaggaatagatcaatgtcttcattattgcaacaacttctcatatgggtagataaaagacaacgagtctcattctttacagctcttgatcatcggccagtagggagtttttttttccaatattttgcacttgacaagcatttccaaattgcgtacaatgcatctaaaacaaccagcctccctagccactttcttgcaaaaaaaaattgataattgggagccacgaatggcttagcttccaaaaaaaaactatttagggggtgctctcattttccagattgacatccaaagggattttgttttcatagtatctgagcttttagattttttgatttgatctatggcaactctataaccgctacaaacattgtagtccctatttttagtgtaatgccaaataaaagtttctttgatacgagcctcttcactagggatgttgagaatcagccttgagtcctcgttgaaaatagctcttataaattcttcatcccattgatcattggcaagcttaagatcgataaatttgagaccaggaggcaagtgaagtttgtcataaatcttaaaagtagtaggtctaggaatccatgggtcattaagtaaatcaacctcattaccatcaccaatctaccacctagcaccctggtggagaatttcctttccccacaccagactcctccacatcgaagaacctttagatccacacttggcttccacgattgatttatttaggacataagaggttttgaggaccttagcacacaatgaatttgggttcttcaaaaagtgtcaacattgttttaccaacattgatttattaatcagatgcaaatctctgaatcccaaaacacctttctacattggttcgcaaagcacaacccactcacaccaatgtattttgctcttctttttttgttgatccccaccagaaatggctagccatactgtggatatttttgatagtttttttgggaagttttaaacagctcattacataggttaggacaacgtgaattagataaactccttccatgctgctgagaacaaagatctcttctacccctttaatattttccacacattatctttgatgctagcaaacaaatctttcttattccttccaacaaaagaaggcagccccatatatttaccatgggattccaccagattaacctcaagcaacttagccaaattcatcatttcatcccgaggaatgcacttaccacaactaggattaaacttcttgagatttataagttgtcccgaggctttcaaataagtatcaaggatccccttgaacaccctacactcttcctccttatcgttcataaaaataaaattatcgttggcgaagaaaaagtgtcactaaaattgtgcttctaccaaacttcagtccattatttttccatctcctttagccttttgaattaacctcgagaatgcctcaacactaaataggaataagtaaggtgataaaggatcacagtgtctcaaacctctggatggaaccacctcaccctttttcttccgttaatcaaaatgtgaggtggttccatcggtgccaatgtgaatgaagctaaaactctgacagaatatctatcggtgtatgaaaattggtctggccagacttgtagtgttccaaatctagtgtccttttctccaaagatttaagtactagtaagaaaaaccaattcagcaaaacctacactttgctccggtttatggtgaagagagacacatgggaaaccctttcatcttcaagagaaaaaaaaaagagatgattatatcaggttaaagacaagaatgttacatagattggaaggttggaagatgaaacttctctcctaagcaggaagactcacgctaattaagtcagtagcgtcctcaatgcttgtttacgctatgtccaccaacaaaattcccatatcaacctgtcgggaactagatgccttgttgagaaaatactggtggctaggtacggttgataaggacatatttttggctcttaaagcttgggatcagatttgtcaacccaaagagtcagggggtttgggtattagacgatttgaggatatgaatagagccctacttgctaagcttgcttggagtctagttaacagggaagaaaattcgtgtgtcatatgtctgttgagtaagtatttccatcacgaaagcttttaaagattagagcagaaaagcaataattcatatcagttgaaatgcattctggaagtgagggatatcattgttataggatcaatctccatcgtagcaagtggaaaatctattgatttttcggaatcaactgtggattccctagatggatcttcggactttcaaggagacaatggttgaactcaagaataagggcttcactattaagaacctggctgacatctccacaggtaatgaatggaataaagaaatggtcattcaaatctttggtcttgagttgggggatagaattctggctattctgaggttaccaaagacctttagggatcaattattctataaattcaaatataatgaccaattctttgtcaaagacgcctatatggcggattaaggctggaggtttgccccaaagagagatttatggaaatggatttgggatagaaacattcatcctaaagtttctatatttctttggagatctcttcaagaagctatcctgataaagaaaaagtttccttttgtccaggacaagggatgtgatctttgtggaatgcatgatgaaaacaatgttcacatttttagagattgcagcttcgcaaaggctttatggttaactagttgttttcctatggtgattgagaaagtaccaagaaattccatgattcttttcatggaaaacttaatcttaagtagccccggtacttctagaaaggatctcattttatttgttggttgtctcttttctgaaatttggcatcaaaggaaccttcttagcttttggaactgttagcggtggttagtataacatcagcttttttttgagttttctactgtgacaggagacgaccccctgatgggccttctttgaggctagaggatagtaccaagaagatcctttgcgaggaagaggcgaattttattttattcaccgttgcttcctgggtcagtggggaagtcagcatagctgtcattagaatcgatagaagtactaaatggtgggcatccaatccaaagaagattgtggatgcttcggttcttgaagccgagtggagagctatcttcctgtctcttacttaggctaaggagatgaattggaagataattctaattctattggattcgaaggttttagtccaagctttgtcagttatcaaaggtcctccggattggacgattttcaagttattctatgaagtagttaacttatctaagaagttcctagtttgtaagttttgttatattaattgtatttttaactctatcgcggatggtatagctaaaagtgttagatttactagccaatcggctgctctttgccaaggagaggaaagtcctcttgtgattctcatctaattcctttgttaatgaacttgttggtcttccaaaaaaaaaactatccattctctcttttcttcttccaccattttcaaacttattgtaaaaagaagggtaaatagtgacataagtatccaaaattttaagtttgtaagcggcataaatccaatgattttttttagttggcataagtacccaatgtttataaaactgtaattttcttccagtttcatc

SEQ ID NO: 379242 - DNA, 5155 bp, Cannabis indica
aagcttcaaacttcattgaacatgtcatggttactacttactatttgcctatttgggcacctcaaatcaaataatgtttaagaaacttgtagtcattatcctgatatcaaatgtaaaatgttcacattattacttagtgaggcctgcttgatgtcattcaatactaacctcaggcacctctatctctacaccatctacctcaactcgaacttgccaagggaaatcttcaaatgttctatccataatacccttagcaccttctcttgcataaagaactttattcataaactgcagtggcataacaatggaaacaacattgtctggatcaaaagtttaaggattacaaataaaataaaacagaaagaatcaacaagaaagtttaacagtgttcagtaccatctaatatttaagtaaagtgattcagtgatttttcaacttttctatcaaacaattttaatgttctctctataatctagtataattatgaactataatgattttgctcatattttgttggctgcttaatatttctcttaatagttatttatttgaatatatgaaataaagtgattttctactcttctgtcaaataattaaagttctctttatagtctagtatgattatgcaatgacgtataatgattttgctcatactttgttggccgttcagtccttctctttataagttatttaatatatgacgacctccaagctttaaaatctaataactgattttacgactcaccagactccagactaatactgttattgtcatacaatccgaacctattaagatcaaataaagtccgaggcacttcagtgccaatcaactaactttttttactttctttcaaagacttacctggttataaaacttttctggattctcctcccgtaggttatgaatgtcaagagcaactttggcatcacagccaattcctgtaagcaaatcttgtcggaataaataacttgcatgtaaaagaaaacataatcagagaagcgaatgcagtcaccctgcaactaatagaagaaaagggttcccattctacaaagagaagatcctaatccaaactcacctatcagcaagacaaagtgaaaccaaaaaaaaatatcatcatttcaagtagtataaattaacatagtcagaattctcagagtttcaataaaggaggattactcatcacgagaaacctcaaaaggcagaaaagtatgcaaatgctaaaagtattatgtgctgagagtttggccaatcacaaagaaaaattaatcgaagtaatgatctgatccaaacgatacagaaaaccaatggatcattaaggatgttaggtagaaaatgagttaagaggaagatgaatgtgaagccaactcgacttaaatgcaccaacctagcttcccaaagtaggtgcagctcaattgtaaactgaagcacaaaaagagcaccaagacattacccaaaattattacaagctggtgatgtctaaaaagaagattcacataccaagataattattcatgaattttggaggttgaagttgttttccctgttgatttaaaattgctactttccacctgtcaaggatggttactgcagcatgctctatgtcatgcaacaccgtactgaggcctccttgtctctcaatagagcccaaaccacttccccaggagagaaccctcgctagatcatttcctgttccagctggaaggattgcaacaggaggaggggatacaaaattttgcttttctatgaagttcaaaacccaaccaacagtaccatctcccccacagacgagcactctgaagtgaggcacctttctgaataaataaaaaccaacctctggtccttgctttgaacttaactcaaatatctacatcaagcacaaacacgtaccaaatgtaagtttaataaatgaatcatactattacaaatgattttcacaactcccaaagaatcacatgtaaggaaagccccatattgttcaagttgataacataatggcaaaaagttaagtatccagcttacaaattgccatgaaaagcaaaatcattagatcattaagcttttaggctagttcatattaggtcccactgagagacacaacaaagatcattactaggtctcaataagtcttgaaaaattataataaaactattatggaacaagggttatattactggagaaggacaataagactgatagcctgcatttgaccaagaattaatatcaggatcccattatcttgaaatgttcccaactcactggagttgctctagtttttgtatctcaacaaggtaaccaaacacttccacatacacccatgacccatccacgtattcatcactcatgtgataacgcatacttataatccaaaggatcaatgtgaagtgaaatttagcaagagcaaaaaatatgatgtgctgcaaccaaaatggtaagtagctacagaactaaatgaataaaagcaaacctgaactggattcaggagaatatttagtcgtaacctcaatgaatccccacgctgagccccactcttcttgtttataaaaactaacaaaggcctggcatctggtgacaactcagtcagctcatatatttgtttctgcctcaatacctgatcatcctttctaccaatagatgaggttctaccaaaactaggcttggaatcgagttttttatttatatcatcatctttgtactgaacatctactctatttatgccattagtattttcatctattccatgagaaccattagcaatttgctgagtctcaccagtgctttctgtggacatatcaactgtactgccactatttccagagtccacagaggttccattttcattcttgtacttcttgctttgactccttatgctagcacggacagtagatgctatctcatttgctccttgggtaattgaactcaaaaatccaccagattgccgattgatttctctaacattaaggggtgataagatcagtcttttataaggacccaaatcacaaatatcaccagtttcattagataaactattatggcaatcaacatgtactagccgttgacaccacaagcagcaccatataggggatccatcgagaaaagaaccactacattgctcctcacaatagcaacaaaaagaagtctcatcagattgatccataaagtcagtccatcggacagcccactgatgcattacatgttcaaaaccaatcatggatacacacttgcaatccttgtgtgcttgggaagagcaatgtgcatgaactgctgcaccacaaatgctacagacttgaatagagctatctgatgacaccgtctgaccaagagtttgagaagggttcatcaaatttagacagacacagcagttaaaattctttccacgagatactgattcaatagtccaggtatgaggagccagggggactttattcttcaccttcgggtttatcttcgaccgggttatggctctcatccaactcaggttaatgtttctcctccattggaaagccgtataagctatagttaaaattccaaccagggcagcgacagtgcaagatattataaaaaggcgatcagtctgattcctgttgttccaacttgggaagaatatctcaaattccccagcatcatccatcagacctatcttttgttctacatgcaagattaaacaaacaatatatagctaaatcaccagaatgatccagtgagcttaattaggataaaaaacagcaaatacatctatctgactccatgatcgaaatggttaagcccattccaaatttcacttaataccctacctagcttcacttactgaccaaaattcagtcaagtgctttcaatctatactacttaacaaaacagcttcactctgcctcctagaccgagcatgccattgtgacaaattgggtgttagagacgtcaacaacaaacgtacctgcaaaatacaagacataatgaaaaaaggaaagaagaagaaaaacaaaacaaactgaaactgaaactggagaggtttcagagttcgaaacttaagaagtctaatccccaaaagcataaaagtaaacaatgatcttgggttgtttcacctaagaaaaacagagaaaataaatgaatgaaaacaatcaacagttaagcagtgcaataatatatttattagttcagatcatagttcaatgtcaataataatcttcatactcctccctaccacccttccatcttgaaacatcttcactttccgtttcaggatcccagcacccaacggaaacttcacattcattcaatgcacatgcgaatcaaacaaatacagttggagcaaagctaattgtattcagataccaaataaattagcattgagaaaaaagggaagaggaaaaactcacagtataaaagagaacttcgatcgagtcgattacaagaaaccctaatcaagaaattagaaagagaaaaatgagaatcgaagcaaaatccaaacgctagctattcaatattctctcaaaatccaggagaagcctcccgtgctcttagttcttaggagattattaatcttttaatttaaatacaccattaattaataccattaagttttatttcttttcttttgttatattttcggaaaggataaatttattaattatgggtgtaatacaaaaaataattataattgtaatatcagcattcgtttttatttcttttcacgtattcgttcctaattaattagtttttggtaccacaataattaatttttttactaattaacaaagattaattaatgtattatcaaaaaaaaaaaaagattctgatgagtatgggtcggttggcgttgtatggaaggaagaagtgtgagatacgaatcttgttcgatgatgcacacgtggcagaggaagacggcatgtcgtttaaggggtggtgggtccacgtttggggcactgtggcacgtcctcagccgacaggttttcgggaaattctgacactgtggatcctactgcactcatgttaactatagatatgcatatatttttggtatgttttaataagaataattactatttttctccttcaatttttggcattatttgttataacattctatttttttaattttttttttataataatctattaattctgaaaaaaatataaaaattattaaaaaaatctgataaa

SEQ ID NO: 379243 - DNA, 1812 bp, Cannabis indica
ctttttttcgaaaatgcagtccgtggattcatctccggaatctgagaagacgattcaatcccctgtggtgcctagagaattggagaaacataagaataccagatcaactccatcgccggaccggtcgaagccagtttctgtggccacggagcttccctttccggtaccggagaacagtccgcctaaagaaactccacctaagtctcctcttcccttccagtattcgaattcaaggaaggcactagaacggcatggaagttctccagagaagctccaaggctttctttggatagcagagctacggtcgatgcgaaaggaagcctctacccgagggagataaaaactaatgcttcgattttgaaggctaaccgaaatgaaaaccataatcatggagaagaagacgatgataaaaaccgcagatcaccaagcgtcatagctagattgatgggactcgaacccttgcagcattcagtagccgaaccggtcaagaaagctgaacttcgaagatctgcgtcggagtctcgagtgtccaaagatctgtatcagcatcgctttgtcgaggggaacggttttcaggggaagcaatgccaacaagctcatttcaacgtttctagcaatgtagtcagagataatggcggaaacgaagatcgaattttcaatgctagagcaggggatccaaaaacatttgtgaagtataacgaagcaacgaaaggtcatattcagcacaaaggtattggacagaggaaaagctatttcgactcggcagatttcttccctgagcctaagcagactgcgtctctgtattatggcgagatcgagaaaagattaagaatgagaggaatcgatgaaccagctaaggatttggaaactctgaagcaaatcctcgaagctctgcaacttaaaggtcttcttcatcccaagaagccttcgtaccataccgactacaggaactttgtctacgatcagagtttctccaaggaatcacctattgtcgttatgaagccaacgagatcacaatctccgacgggtcgctcttcaaggttcgttggaagcgaatcgccgccgccggtgagttttcgttcaagaaccagtattcgccggaatatcaattactccggcgagtttttgtcaagtccgagacgtgagcagcgaggagagatggagcagagcaaccggaatcgcagcccaagtagaagtcaagccccaacttctcggaatgagaagagtccaagtagaagaagaccgttgagcattgaaacgcaaaggaaaggaaacgatattaccgagcaaagaagagtatctcctattcaatctccaaaacttaattcgaggagaatggggacggatcaacagaccctgaatcggtcaccaaggagtcgtaaaccaacgatggagatccatcgaaaagaggatgaatcgtccaccaccgtgtcagaaagtagcattaacacttcaaccgatacagaggttagcattaactaccaagtttaaaatgcctttaatcattgaatttaatccttaatcgcagtacatttatttattactttccaaatattcagagagcaaaaatggaggaatacaaagaagggaggagtttattggagaggtgtgataagttgcttaacagcatagctgaaataacaacacccacagccgagttacaaccgagtccggtgtcggttcttgactcgtcgttttacaaggacgaatcgtccacttcccctatcatgaaacgaagcattgatttcaaaggtaattttttttatttatttatttacataatttttaaaatacaataaaataaaaatttgt

SEQ ID NO: 379244 - DNA, 4591 bp, Cannabis indica
cggctagtccagttcaaagcccagataaagtaattgaataaagagaagaaacctcaaaagtgaaatctccatattagatagcttcctcctcacagtcctcagtttcccatttcttcattcatataaatatattcttctatcgtccactctctccatttctactgccaaaatcaatgtcttcagaatccgaaaccttatcatcttcggcctctgcgccgccaccaccatcgcaatcggaagaatcatctcacgaagacgattccaaatcagttagcaaaaaggccgctaagaaagaagccgccaagctcgagaagctgcgccgccgtcaagaagccgccgccgcattatccaacgccacctcatcgctttcggtcgaggaagatccgcttgcagcaaactacggcgatgtgccgctcgttgagctacagtcgaaggctccagctgacgtcaacagctggactgaggtcggaaagcttaacgaagccatgaaggaccagcatgttcttgtgcgaggtcgtgctcagacgatccgatccgttagcaagaacatggccttcgttgttgtgagagagcatggttttactgtgcagtgcgtgattacggcgactccagatgttgttagtcgacagatggttaagtttgtttccggtttgaatcgcgagtcgattgtagatgttgaaggaattgtctctgtgccgaaagatcctatcaagggagccacgcaaccggtatttccatctttttaaattttgaagaaagtgtgtaactgtgagcttaattggatttttgttgtttcaggttgaggttcaggtgagaaaattgtattgtgtgagtaaggcattgccgaccttacctattatcgttgaggatgcagctcgaagtgagattgagattgaaaaagctttgcaggtaatgtttaccattctatatgtgtttgatgatcttgttcttaaaaaatatatattttggcagtatttgatgaattataacgtgtatctatcttgaaaattctatttcatcaggctggagaacaacttgttcgcgttaatcaggatacacgtttgaataatagagttattgacattcgaacacctgctaatcaaggaatttttcgcattcagtctcaagttggaactgtaagttgctacattttaatatgacttctctttttgcctttgcttaatactattaaattatacatggtcaatctgtaaaagactaggaatgttaaggttctcattcatacattttattttttaatgtcaattgtgaccacttttcaatgaaaagaaaagtttagttgttatatgagctttgtgtgacctgtgtaaaatcatgactagtccctaaggctgtgtttggaaagccatgatgggattggttttgagtgtagttagaggtaattacactatttgacatgcttgtttgatcatataactgaaactgtgtaattgagggattcagctaaaaaaaattgtgtaattaaggggtttcaattcttacactctaattctcatggaccccatgagaattggatataactacattgtgtaattattaaaaattttctatttaaatattaactactattttttagtgtcaattactaactatttagccaaacaagatattagtaattcatatgtaattaccacttcgtatccacacacatcttgtattttaaaatatagtctaattaccagactcacttagtgacttccaaatatgttctttaaattttggttgttgatattgtttagttaatataagtttgaaaaacgttggcttagctgattgtctccctctggattttaaatatatactctatttctataacattttagctctgcactttgacttgacggcattctgttttagaagatttattcctgtaaattttgtgtcatgttaccattgtaggtatttagacagtttttgctttccgaaaactttttcgaaatccatactccaaagctaatagctggctccagtgagggtggtgcttctgtatttagactggactacaaagggcaacctgcttgccttgcccaatctcctcagcttcacaagcaaatggcgatctgtggtgatttcgggcgtgtttttgagattggtcctgtatttagagcagaggactctttcactcacagacatttgtgtgaatttactggtcttgatgtggaaatggagatcaagaatcactactttgaggtactaacatggaatattttaggattggtaatgtgttgctcctaaaatttgctatgttatgattttgagtattctatatgtttgctcaggtaatggatattgtggaccggttatttgttgcaatgttcgatagcttgaaccagaattgtgagaaggagcttgaagctgttgggagacaatatccatttgaacctctaaaggttgagatccatatttataaatgtttttattaatatgtatttgactgtgtagaaatatctgatttgatgtttgaatctgattattgattgtcttcaaaattgcagtacttgaggaagactcttcggcttacatttgaagaaggtgttcaaatgctcaaagtatgttatttgttgttttattacactacagattttaatatttattatatgtataactgtgggagaacgagaaattactctctttacaaaggaacaaaaattattaaattgcttgtggtcattggcaatagattagtttgatgggattgcttaatatggcttttattaggagtcttatatgttataaataaaaccatgcctttggatttctaatacctaatttaatcctaatgttgattttgacttgcctgtataggatgctggtgttgaagttgatcctctaggggacttaaacactgagacagagaggaaattggggaagttggttttagaaaagtaattttctccttagactaccttttattctactttgcattttgaaatcatgttgtcatctgcctaaagtaaatccatgaactaactggtttctactcgatgtaggtacggtactgaattctacatacttcaccgctaccctttggctgttagaccattctatacaatgccttgctacgataatccagcctacagcaattcatttgatgtcttcattagaggtaatgaatatcatttacgtaactgttaaaattcggaactgaaactaaaactagtacaatagataacgtattgaacagaaaactgtgtttagcttgtaaaagatatggcgatcttcaggtgagtcaaagtaactgatctgaaattttctttcctttaggtgaggagatcatttcaggggcacagcgtgtccacgtacccgagctcctggcagaacgtgcacagggatgcggaattgatgtaaaaacaatatcaacatatatcgattctttcaggtatttttctttctagtaccatgtcataattttgttaatgctctttttatcttctacgcattttgagtataagatttaccaatgccttctgggatttgatttcttttgcttgttaaagaaatgttggggttcttttagctttggaagttttattaattgctcactgttctaaaacaaaataaaaaacagatatggtgcgccaccgcacggtggtttcggagtagggctggagcgcgtagtgatgctgttctgcggtttgaataacatccgaaaaacttcattgttccctcgcgacccacttaggattgctccctgataggtctgatgttgaaattcctgacataatttaaggttttgtttttgttttttggtgatgtgaaaattataacttatgccatatggcttcttgtttggcctttcatggtattggtatggtaatatgtatggaaagtcaacttcttaaattgatgatggtgaagatgatgaacatttgatcattcaaatttatttgcttaacatatttataacaaaataattatgttagatctatttaataagtactaattgtgttattttttttaatcgaatttttgtattctcttatttaatcgctataacctacttaattggtgttctttatacattattacatatttcatacggttttatataaaattgaaatacattagcaaattagacaaaatagaggatatagctcatagagcaaaatcaacaaaaatcacctaagcatcgaagaagtgagataaaatgacttttggtatttggagttttggaagggagaaattttcaaataggaaaaattggggcaaatgttttagtataaactaagatttcattttcctatattttttgtctgaggaaattttcagaagaaggggagaaaactatcgagaccacgccttctctaccatgccacctcgaactagatctccgatccaccacgcatgatcgtcgccagtcgaccttcctctggtgttatcagcgggagtgattaccgaattgaccctcaccccacattcatcactgtctttcttactctcaccagcgttcatcgtgttttaggctcaaaatcgttatggaagggaggttagaggttcaactcggcttgtcgtgttcgactaccacaactgattttggtctcttttaatgagtgatgatcgatgaggttcg

SEQ ID NO: 379245 - DNA, 1260 bp, Cannabis indica
aaatgtcttcaaccctccttccttgagagaaggatttcttgaagtctatcacacactcagtggagtttcacacctttagtcttgaacgtgaaaccattgcttgagttttagtgcaatttcagccttcctacatgaaagccaaagatttccacataactcaacatggttctcacagacacatatgtttttactatgcgtgaaagatcaatgggcgtttgattcgtcttcaaccatctttcctggagagaaggattgcttgaagtctatcacacacctattggggttttacacttttggtcttaaacatgaaacctttccttgaattttagtgcgactttagccttccttcacggaagcttaagtttgccacataactcaatatggttctcacgtgcatgtgtcttttcactgtgcctgaaagatcaatggggttttgagacatcttcaagcctccttctcaaagagaaagattgcttgaagtctatcacacgtctagtggggtttcacacctttttcttgaacgtgaaaccatggcttgaacttaaacatgacttcaaccttccttcacgaaagtcaaagttcagcgcatagttcaacacaattctcatgaggaggtgtatctctaccgtccacggaagaccgctgggggttcgacacgtcttcaacgttcttccctcgaggaaaggattgcttgaagtctgttgaagacccactgtggtcttcgcctccagccttgaacatgaaattgctacttgaacttaagggtgacttcagccctccttcatagaagctgaagattgttgcatgatcaaatgtggttctcacaagcgcgtttgctctcgtcgtgcagtcttcatttcactggtagaaatttctaaagcttttggttgaaaatacctcttggcattcaaacacatcttcaaccctccctccaaaatgagaaactaattgaagtctattgaatgcccacttggttttcaccattagtttcgagagtgaagcctttacttgaattttagtatgacttagccttcctttacagaagtcaaaagtctactgggtagttcaacggcgcaagggtccccttgcatgatttccgcgtgcgtagggaagggtgctcaccacctcaattttttccgattttcaaaaattcataactaattcaaattaaatcgaaatcgagttctgtaaaaaaaataaattgcttagaatttccaaactatccaataaaaataatttcagatacagataatcaattat

SEQ ID NO: 379246 - DNA, 7109 bp, Cannabis indica
ctggtaaaaatattcccaacatgcacgactgaatattcgttttcacaaaaaaaggatactatcgtcagtgtttaacattgattcttctacaccacaagaaccattggatcttcaggcagagatcgaagcgctcatcaagaaagatttctcccttcaaaccaagcttgtgtgccttgacgacttctttgatagggatttctttaggaccgatggatgacgttcaaattccctctccaaatccaacatcaagtaagtaattttggtatttttttttttaaaattctatgtagtatagaagtcttatttttctttcttgatgattgcatacttgctttaggagatagatgaatagaatttagacgtttggtaaaattttgaacattttgctgaaatagggatgtatctcgcacatattgcttataataatttttaggttttgcaatctcttgtctttatcagtgaatttcttgcagaaatagcttaaatttagcaacaaacacatctaaaattaattcctctctctagagcccttatggttctagatgacacatcttgagctttttatttcttctttgtgttcccaatttgatcgtcctgggataactttctttaagaatttcgcttctggatgtagagtccggaggggactctccaagcagtgttaggggaggactcttcataccatttctatcttttttagtgtggatatataactgcttggctttttgttctttcccactttccaccatggtagaagttgttctagttgatgaaattgaagttttggagcaagaggaagtagcagctccatgtctccttgagagatggactagtacacaaacaagtttagaaaattacgaggcccttcgtgcatatgaagaggatcgcgacctcaagagtattccaggtattttggaacaagctctctattttaggggaacccccatgcaagtgtgtggatagttttagtgtttagagctaggcccatattgagatgggagcacaccttccacttaggagctatattgcacgcttctgcgtggaagtaggcattggtccgttctggttcatccctcatgtctacaagttattatcaggacagttcgtgctttatcgtgctaagaaggtggaggttccatcccttgaggaaatcctttacttttatcaagtaaaagcaaatcccatgcgaaagaacaagagcaaagtcgacttctaacaacttgagaaaagatacagggcgctagtttgcccaaccagtattatgaactatatgcatgattccaagactactggttttttactacctgcgacctgttgaagagggttccaaccctttccttggatttcaatgtggcaagtaaatgatactatcttttctgttccaattttcttcccatcatttagttcactatctgatgtggaattcttttcttcatttttaagtccagctactacccctttcttgcttgaaagggaggccttgtatagaggatttcctcaagaggacttgaaagtggataagcttatcaccacagccaactttaggcaagttgctctgattgctcctcactagagcatagatgactatcacgttaaagatgtccatagcaactctctataagttaaagaattcattgcggagatagtcgttaatgaggaaaagaaagccatcaagaaagacaaaagatggttggaagattgggcccaactgcattcggagcccatgagcaaggaaacagagtttgaagtttgtttaaaagtagttatcccgaatggaggcgctccaagggtaagcacatctggaagaggtaattcccctttcgcttattctatgttacacacctggaagacttagattgagttgatcagggaggctttgacccatacttcttagaattagatcactatagataccccatgatcgaattttatgataaggtagatgaaataattgaaagcttgactcattttcttctgcccacctagtgtattaaggtagatttgttcgtcctaatgaagtatccaagattctttcaataggtagctttttaggtaggaaaaacatttcattatttgcttacggggttccaaaatatagcattgttaacaattggacctaaacttgagctttttattttgctgatattatttttgttgcttccatttatttctaacctttgttgttatttttcatagagaagccccagaccgtctagatagggcttctaaataacttcttggaaaacattattgtctaatccaagcaggccaaggaggctacgaagccatccaaagggaaaagcaagtctgaaacattttcccatactagaattaaggaatcaacacctccaactaaggtgcaagaggttgttcctcaagttcctatcttggaagttatttttggatctcataccccaacaattgtggtggaagcacctatccaagaagctactcctggatctcaagctcaagaagttgtggtaggggcccaagtttaggaagctgctgtgacttctgccctctaagtggaacctttgcagtaggttccacttgctacccaataggccatcattgttgatgataaaaaagaagaagatgatgacaaatttgtcttcaacgggaagtcagggtccaatattgatgagggcaaatggattaaggcagagcgcatccagtaatcgacatcttgtcggaggtaggagaaagatgatgttgcgtagaaggaaatagagcagaaataagctaaaaaagaagaagaagatattagagccaaggagaagattccgtactggcaaggaggttccagaccctaagtctcgagatgctagacctaattccatcgtacatctttaaaattaatcctgaaggctaaatctttccttgcttttgctaaccaatataactttacccatccgtatgctagagctaccagaagagaagcgtgatcaactcaagaagtcaggtcaattttgccagaagaattttgaggctaaggcaactgaagtccaccaatggaccaacgtgattaccatctaatgtaatgctaagctaactgacttgtcaatgggatttggtgtatctaatctagtctttgatcgtttagtagtctcagagaggcttcagactagatttggaagtgatttggctccatttgtggtagatcttcttgagaaaattagtgacacctactatcgactaggagcagagagatgagatacaacggctagtgaagatccaaccttccctactgactctctccgacaccagttggttggggtaagtattcttacttatatttgataatgaattttttaacaatacttgtgattgtatttaattgtattccatttcttccaggggaactttttggcaaagaggtactctgaagttgtggcaaagatgtctcttgggttagagactctcagggcagagcgagatgccttaggctgaaagagagaggaggctttggctgatctctagaaagctcaaactcaagctaaggagctggtggagcaacaagttaaagcaaggctggagtcagccacaaacaaagttatagctagttataaagatgaaatctaaaggctacaaaagtgtggagatgattacaaagctaactatcaaaaagcccaggctcagtgtgggaagcctcaaagttgaaactttaagaagctgagaacaaagccagcagtgctattctcaaggcaaccaggttgaataaagagattgaataaaaaattctaaaaattcacaacctagagcatgaagttaggttgctcactagctttcgggcttctgctatcgatgcctagaatgagatatttgccaagcttgtcgaggtagaagaaacatcacttaagcttatttttttctctatctcttttgtgaccaagaacatcaacagcaatcaagaaattttttccagccaatctttcaattttggggtaaattgacaaggtagaagtgttagccaagttgaggtaagttcttggtgcattctctttgattttttctataaatgttgaataattttggttagagttttaggtattttagggctgtagagttaagatgagtttagattgtgtatataagattgttttaagttaagcttgagcttagattatgcaattaaagtggttgctagagttagagttaacaattttaggttagaaacttgtttttggttctaacttagaattttgtgagatttaataaattatggtgttttgatgctttgagtatgttgtatttatagtattacattgtactggagctgttggacaggtttggagggagtttagggaagaaaacccaaggaattctggtctgccagaactggacgaccagttggttctagtgcaacagaaccggtcaaccatttgttctgcagggggaattcccggggtttccttcgaattctattttggctcggggtggtacctagtatttgatttaggttatttttaagtggtatggcttattctagggttggttgaggctaggttttgtccagtttcagaatgagggtttgttcctggagttttggtttaaggcatttattgagttctggttatcgtgacataggatcgagatcgtccagctccatttccactcaggtcggcccgcacgcctgatttctagactgaggtaagaaaagtgatacgcatcatttatggttaaatgattaacaattatgattgttatagtcttgattatgatcaagatcttgtttacgtgtttgttatgcctcagttatgaccgagagttggaaacggtcattaccgttatgagtaattactcttaaattcgcgaataggtttcttacttatcgttctctgtattggggaacaatagtgacatacgtagctcgtggttaacgagtggtaaggatactttatgaagtatcgagattgtgtgattataatgatgtgaaattgattaagcatgttaatatatgatgtgttgttattgagtacttttgttatggtgtgattaaatggattttacactgcttatgaaattaatcacttttcttgtcacgggtgcttatggtgcaggtaaagggaagggcaaggttgagcaaccatgagcctgaggtctctacagcagtgtacatattaggcgcggtgccacggcccagtggacaggatatctcattttgagtgtaatttggagtataaactcatttttgtgaaaaaaaaaacatttggttctgaatgtaaatattttagtagtaggggtccccgtaaatatttacagttaccttttataaaagttgtgtttgttttcactataaatttttaattagtcacacttttagtatagttatataactagtaaaagagtaattttaaaagaaaatacacatgtggcgtccctgtgggatagggtgttacacttgtattacaaaagtaattgtttaacgactatcaaaagtgagcctaaactgtcccaaagaccttgaacactccaggtctaactatcttaatatgtacaatcttcatccaactctagactcatcctagttcagttatagctcttacctacacatacacgtaataactgtgagtcgacagactcagtaagaaaagcataatcataaacataaaaatatattcaaatcgtaatcagacacacatacacctaataatgatctgataactgggtcaggaacgttctcgacaaagtatgattaaccgtgaatccaacttatacttgatactctaatcgcactaatgtgatagcagttagttcatactatctgaaaacctagcatatatttgttgatatctcagtgcaactctatatacacttcaccattatcttgatatgctaatctgatggctactgatttgcctaacctatatctgttggcatctcggtgcaactctacgtacacctcaccgatgccctgatatgtttttctgacggcaactaatatgcacactaaacatgtatccatatatgcaactattatactagtcttaccttgatttcgaatgcaagtatgttggtaactctaagtgtaaactgctggttgatgatttaaggccctaagtcacaatttacgtataattggtaagtgacatgctaaatcactttcggggacttaaacttgaaactaaaagttttcctatcgataaacaacatgtcaccctaaatatcgataaaatgtgaaaaaactaagccttggaaatctaaaaaatttggtgaaacgaatccccaagtggtctactattttctgggattctgccagaaaaatcggttcaccgtttttgaggaaatggtgaaccgtttttccctgcagaaaatttccaacttcaaaaacctgttcaaaactcccctaaatccaaccaaactttctaggacacttaatgaaggcataaatgatcaaatccaaccaaaaatagcatcataaaaactcagaattcaatttcaccattgttgagctaagtttgagctttaaaactcaaacatagctcaaactcaactacagcaataaaaaccacaccataacagtccaaacaaactctaaactacctcaaaaaatactttctaaaagtgccaaactcgaatagaagttaaaacccaaaattacatatttaaatgtagcttttctaaccaaaatccaaagaaagcaaaggttagagcttaccttaagttctcctccctaattgctacaaatttgctactgaattacacttgattttgctctgaaatcattgaagaatttgcttctccttagggttccacagggttgaaagatgaggaagaagaaatgaagaggttcattttgtttttagtgtattaaatctatcctaatcaccttcctattattcagctcagaggttatcaaaattaaccctaggatttcactagaaaaaatccactatcatccaaaaaggcaaaagactatattgtcatttactcactaagaggtaacctaataacttaagggtaaaatggtccaaaattataatcccaattaaactcgatatttcaaatgtctaattatcttgtttcgctaattccaagagacctaatcataataaagttactgggcataaacatgcaattcataaaaattcacatataacatatataat

SEQ ID NO: 379247 - DNA, 2947 bp, Cannabis indica
gatcgtctcattgacatgttgaccagtagccaccggtagggatctatatgctgttaactactgtacatattcttgtagaaattttacccaacagattcatggacacagtttatgcatagacacttcctttatacataagattggaagtgtataacacgggtcatggctgattggctagagagaccatttgataaacatgaactttttttttttttgagataataaacatgaacttatgagagcagtatttgtcaatttttagatcaccaatttcggttattgatatgatagaaaatagatgagaattttctatgggaagggggagatttagtaggaggggaacatctggtttcatgggagctagtttttaagccaaagatgaaaggaggcctggggattggtacactggtagaaatagcacttttcttataaaatggctatggtgtcctttggcacaaggttataaagagtaagaacagaatttacgataatgtatgggatacaagattacaagattataaagagtgagtacagaattcacgataatgtttggggtacaagagtacaaggttatagagtaagtacagagttcacgatgatgtgcggtatacaagagagtaagtacagaattcacgatgatgtgcgggatacaagagtgggagataggttgtcttctagatgtcatgaagtgaagttcttttatgctccctctagtgtatcattttttttattattctcgctcaagtatatcgttcttattattagattacaaggtaaaataatgaagctacattcggtgttgttttcaatgtgcaggaaagttcttgcttgtgtggtttgtgggcgtctgaaaagtgcattccagattgcttctcgcagtggaagtgtagctgatgttcagtatgtagctcatcaggtattccttaatttctatcgctatcagttacttggatgtggttaggtctggtgattctgggcttacttgatggaggattctcgatgtcctatgtgaaatgtgacataatttgtgtttgattttggggctgtgcttttcgattcaatttgcaggcgttacatgcaaatgcactccctgtactagatatgtgtaaacagtggttggcccaatacatgtgatatgtttgttaactcaactacagatactgcaaactgcaagcaaggtaatgagaccactctcctactcagaatcagaagtttcaaactccatgattttaaatgagaacatttggctggatacacatagttataattactggttacaccaaactttaggggtgccattacagcttctgacatctggaattgctgacactgttctcaagcattgttcgctctgccaattgtaagtttaaacaatttgaagatgcttgatgattcctgacccatgtgggagctattcaagttaagactagggtcaactctaggctaaaacagttcatacacaagtttagattcacaattttatataaaaattatttaataaaattaaggaccctcaaatacaattatactgtccctgcttaagatcggtcgatcatcctgtagttgggacttggaagagcagatcaagtgcttgcggctgtagatagatgttcatggaaaaataaagggttgagatgtatatgtatttgcgtgattgttttcctttttctttttttgaggggtcccctgtatatatatatgtatttcctttctgcctaaacttgctttgtaaactatatgttaatagagaatttgctaaaagattagggaattatattatgtatttgcctaataaagaaaaaaaggaaaagaaaaggttgggttgggaggctcaagtggtcattgttttaagtttgtaatgcatgttaatattttagcaattttgtataaccattaaagaatgacttttaacttaatacataattttcctcttttttaaaccctgaatttttgtaaacaaccacacattagaaagaatactaacagtgagcaaaacagagtaataataataaaaaaaaaaaaaataaaaaaaataatttacaaacttcattattgacgagattcttgatggtagcacatctgggcaatctctgccatttttctttggaaatcttacatcaaccaccggaagttgtggatttaattgtcaaaaatgacgatggtaattttcagtaccgcctaactctaactaatacccatattatgaatctgtttggcacagtttttacaaaagctaaaaactgtttaaactgttttttgaaaaagttgtaatataaaacaaaatactgccagacacttttttttgcttcattatattatctttctttttttttttgtaaattttaaaaattatttttggccatgttattattcttttaactttaaaaaaatattattatgatctactcttcaatgtgaatattttaagatgtcggaaacatatatttttttgctaatttttttttaaaaaaattatttaattactaatataacgattagttattgttttataattattttaaatcttatttaacatttattttataattttgctaattgaattgtatcatattataagataacaaattagctttcaaaataacaaaaaagtatataaaataattggtatataaaaatggtagcttgctatattaaataacaactcattagtttcgaaaataatatttaaggttaattaaatgtattttaaattataagttatcataatataatttgaaaataacgaataattactattatgttacaaataagttttagaggtaactaaaatatatctcaaattatatgataaaaatgaaaaacgttagattaactaacgtgacacgtcagtaatagtagtaatgttattattgtaaattagatgcaaaaaatgtatattattgtaaatttttcttttttttttattcattcgtctttctctttctct

SEQ ID NO: 379248 - DNA, 10607 bp, Cannabis indica
tataaaatattcttgatattattttctaggaggagagcccaaaatcaaaaggctattaacttttacttcttgactagtcataaaattggaaaacagtagcaatctacatctacatagtctccaagtaaaagaaagaaagaaaaaaacattctcattcaaacaataaaaacaaaagaaacttagtaagaaacaaaaccatgagacacataaattgtaagattaaaaaaaaatcaattactcatgcagtaattcttaaatgaataattgatttctagaaaagaatatcaacagcaacataagtttgtagggacaattaccatgtataacttcctgaagagttagattagtacctcagttttacttgcaggaaatatatttagcctgcgtatcctttgaggatatctcaactctgcatcatgcttttgtttaccataacttatactagaagttgatgatgggggatcaggctgatcaggacagctgatggccgccaactcatgagactttccagcaactaattgtgcttcaaatgagaggtgtggcctaggcactatagcaccaaaccattagaatataactaattaaggacaagaaaaaaataatctgcgcatcactgatttaatgaaaattaggagtcaattaactcaaaatagcaaggaactgatggaataggtaagagacccaaaacataacctaatattgtaacgcagccctcatttcgaaacccccaaaactctaatactatgtcataaaaagaattatatctcctataatttattgaataatgatgcactaatttatacaaagctacgaatagcccattatacaactagatccttagaattaagctaattagccaactatatacacctaattacattttgtagcaaaatgagatatttgttcaactgtttgtttcatcattggtctttgcatcaacttgatatcaagaatgtatggtgatctttatgaaaaggtgtatatggagcaacctcctacttttgatgcttaagggcagcttaggcaagttggtcattttcgaaaatctctatggtttgaaacagagtccatgtgattggtttggaaaatttagtcaagttgttgaaaagtttgtatctacaatgaaaagcaagtctgtttgtgttctacaaacaaacagaagttggtatcattattttagttgtttacatggatgacgtggtcattattggaagggattactacaagaatctcatctctcaagtctttccttcaactcaattttgttctcatcagaaataagtccttaatttattaactgagataggaaaacaatgggcaaagctttcttgagagccagtgggtggataaatgcaccaatcaatctatatgggtggaaaagcacttacttatccaggggtagaatgacacttattcaatcagtattatcatcgctacccagttatctgtctctatttaaagcaaggaaagcagtaatgaacattttacaaaaattaatgagagatttcctatggcatggaggtgatctgagaagttaagaatatttggtagcatgggaaacagtcagtacacctagactacaaggtggtttggaaataggtaacttggaaaaacaaaatttagcatttttcatgaaatggttgtagaggtttcctttggagggtgagtcattttggcacaaagtaatcaaaagcggatacagcttagatgataatttttgggattcaagaaaaaggaaaagttgtcaaataggggaccctagagaagcgtagcaacagtgtatgacatctttctaaacctggttcaattcaaggtaggaaatggtaatcgaataaggttctttgatgatagttggacaaggaagttggcgttagagcaggattcaagaaaagggagaagttgtcaaataggagaccctagagaagcgtagcagtagtgtctgaaatctttctaaatctagttcaattcaaggtaggaaacagtaatcgaataagaatctgggacgatatttggacaggggagttggcattagagctcttgttcccagagttagctcaagtttctacggctaagaataaaagtatagtgcatgtggtggtgggtgaggcagagatgtctagctcagattcaaggtgaaaccttcaattcagaaaacacttgttggacatgaaagttgataccttgatgtttttactaagcatcttagaacaaactccaacttatggaaaactggactctggagtttggaaatcagacccaagtggaattttctcttgcaagtctaccttcaatagtcttgccacgaatcacatagcggggaagaaagatgggccaaaacagtgtggaagagttgtaccccatccaaggtaaaagtttacctggctgctaatcattgacaaggccaatgtcatgaggtttcacaaaagagatgaccttgtcatctactatctccatgatggtatgttgtaagaagaatgaggaatatctttccattagttttcgactgtccttttagctattttatacgggttacacttgaatgagtttgggatgcaaattgcatgcccaaacatggagtcaattggtgatgtgtaagctaaaagagagtaggagaaccacccaactgtggacaacatcaatcctggctcttcaatggggtgtttggttggagagaaatgggaggatctttgaagtcaaaaatgaggtcaaagaagtatggggaaagattaaattataggttgctacttggttatttaagtcgagagggtttgagggtttgtcctttcaacacctaaccaaggaatggcaactcatattacactaaattaaacttaggtagctgtaatttcattcatgtttgctatctacttatcatttggtgctttgtttggatgtttaagttagcttgtaaccacggtgttcctccgccataagcaaggctccctaataaatttgggaggaggtcaatctaagacaagtgacctctgtctatttttttttaaaaaaaaaataatgggcaaagccttatgtttcctatatgcatattgggtaggttcaaaaaaggatagaaaattcactttaaaggatagggcacaagacaaatgcaacaaagtttatattccatcccaagaagtcagcataaggaaagtgtaaaacaattattaggcatttaccactatcaagtttccatccattactagataaatcttgtattcggccccataaatcctccaaaaaatcctgaaagaaaaataacaatgaattaattgtttctaaaaatgataataaatgcatatatagcaattaacattacaaaattgttgtctggcttcaacgtcatacaaagtgaaatcataactctaaacaactgaccatatcaaaaaagaaaggaaaaaaagtaaacacatattttcatcaaatattatgaaatgaagtgttaaaaaaacaaggatcctcttacttgctttctatccagcaaatgaaaatttaccagcaccttacttcacttcttttttagatattaacatctgagctatccattaatagacgacatatctttattttatattttttttttgaaaaaaagaggagaggtcgttgtcttagactgaccaccctctgctatatattaaggccctcacttatggcggaggaaaaacgcctaaaaaaaaataaaggaaaagttaaaaaaccagaaaactaaaaacaaaatgcagaaaaataaaagaagttacagttcataaacaaaattataagaggactctccactctctgctcaagtctagaaaagagaggtcttcaaagtgctttgttctgaaaacccatgttgctgtacagaattttattttgtcccaaaccactactgctgagttctctacatcttcaaaaatcctagtatttctctccagccaaatagcccaaagtgttgctaggacagccgtcctccaaagtatatcctgacgtttacttccttttagcttactcactaacatttgtggaacaattctaggtagagcccaaatcaatccgaactcctccaacaacattgaccataatttggaggagaatttacaatgcagaaacagatgttccacttcttctccactactcttacagcatacacaccacccgggagaaatgagtataaaaggtcgatagacgacaaatctttatacaaaatgaaaggttaacaaaagcacaccagactctctatcacattcccatctatctctctggcttaacacgaagtttcttaattttctcatccaacctgaggtatcattttgatggattgatgcattaatgttctcttatttataggagaaaaaaaacctctattccactgttctgctatttttttttaaagatgcgttcatatataaaacaaaaggttagaccataagatctctacaaagaatgtgatctaagagcaaactccactcaacaaaaccaaatacatcaaggactaatgcccattgagccgtaaatgggcagtggtatgtataattgtatataatatatatttaattcatttttaataaaaattatttacctaattactctatcactaatcaaagttttaattcttcacgcacatcaaaatgtcatataaattttgattctttattatagtatatattgttgtacttgttgaatatcattgtatttctacaagttatctcatatcttttatttttagacaaaatgcttgcgatatcaatgtctcttattcatatttttataaaattttagtgtcgatattttccatcaacacccatattttcatccttcataataatttgtcttttgtcataaattacttatcatagaaaaaccataatatatatacatacatataaagttgtaatgactattgtgagtactagcgaataaatacaaaagaaaagccaaaatctagaacgacaagagtggacccaaaacaaaagaatagataaaacttttgcccccaaactattaccactatattatcgtgtcccccaaataatttacattgttaaaatttcctcctgaactattctcgttactaagttgtgggcgtagctcatcttctattacattctatcctatgtggctaacaaaaagttgatttagcacattaggcactgacgtgacaatgtcacatcatccattgtgagtgtcacacctataatttaaataaaaaattaatttagaaatcaaaaaaatattttttaaaaaaagagaaagaggtcacttgtcttactctctccccctaatatattattaagaacctcactatggcggaggaaaaccgtagtaactacaatgtgtcacaaaaaccataaaaacacgcagtatagaacagaacgaaaaaaacaaccgaataaaatctaatacatcaatgaattccattctcaacataagaaaagagagttcctcaaagtgtttagtcctataagcccagtctaagtccaaagtgatttttcccataaaatctctactgagttgtccttgcctttgaaagttctcttgttcctttccagccaaactgcgcacagtaacgccaatataaaagtcctccataatttaattcttctcttcccaccaaccagcttgtgtgttaggacttgcgctacaaaacggggcaaaacccacgacacctcgaattctttgtagagataagaccataatttaagaacaaatgggcattctagaaacaaatgttcaatattttcactgctggacttgcaacacacacaccagttaggggacatagctaagtaaggtctccttttttttttgcatgttctcattcacattcactttccttaaggccatcaccacctaaatacctttacttttgcagggactgaactcttccaaagcattttggaccaatctaagctactagtgctttgagttgaagtaaaatgatgaaaagctaatcgacaagaaaaaaaacccctaaaatctagtttccatactatgctatcatctactatttccactagatttgtgtgctccaaaagaagtagcattgagaaaggctaggaatctctctatctaacatattcctccagaaatcaaagtttcagtaaaccaccctgtatcctccctcctcaactactgccatgttactgatacagaaattcttatctttagtgagcagcactaagtccggaaacaagctcgacaaggaagaatcgcctcgccatacatcttcctaaaagcgtatcctgtcacccctccctaccttgaatgatacaagcttcaagtattcttcatacaactctgcaatgcctttccaaggccctctaaaggacaaacgctccccttttttagaatcccaaaaattttcagccttgccatagcgacttttgatcactctatgccacaaagctccaggttctagtggcaatctccataactactacaggagtagccctttacttctactttccaagctaccaattcccaatcccccttcaagtcttggtttacacacctctttccaggcaaccaagtgatcattccattcaaacaatcctaaaggtaagaccaatccttagcttctacctctaataatataatcaccgatcttatcttattatccttcaatactaatagcttcaagaaagctcctctcgtattaatgaaacattccataaaacaactcccgctactaatcatgaaggatcttttgaaagcaaccctttgctacccatctaccgatcttatcttattgttcttcaatactaatagcttaaggaaagctcctctagtattaatgaagcattccataaaacaactctcgctactaatcctgaaggatcttttgaaagcaacccgtcgctgcccatctttctttttcaagtcttccaaattttgagtcatccatacataccactgcatcgatttttaccactatctcgtaaccgaatagtcttgttctttcacatattcttactgagccaccatcctttaacagaataatcataaacgccttgtgtttggtatgaaagctccaatatttcataccaaacaggatgagggggataacgaaaaaaaaattaaaagattaaaaaaataataaataggatttgtccccctgaaatatgacccttgtagggttttgcccctaagctttttactgttgcaaaaattctccctcaagtttaaaaatcattgcaaatatctccctctagttatattccactcatttacttaaacaatttgttgatgtagcactaacaatttgcttatggttgtctagtttgtacacagaatcaaaggatgtggttccctttgaatttcttatggtttagaaaacaaaaattagatttgatccttttaatttgttctctcaaaaaccataaatcttttgtgctacggatttgtaaagttgtgcatgggtttatatggttgtgttgtttatagtagtcttacgttgactgtgcagtcttaacactgttttatttgatataatatgatatcttgaatttatgtttttaacatgacaattcacctcttcttattggatacgggccttgcttaagatcaaaattagcaaaactttcacaaaaatgttgccatatctaactttttaaagatgaaatcaataaaaatttattccaagtgttactttgtgaatttttctatcaaccgccgacagcaaacaagggctgccttggcaggcttcatagccaagtgcatcgagatcacggaagaccgtccaagtcccagagtgttctcttcttggtctatgtatcgcaagtctaggcgacaaagatctggcgatgttgaataggacgagcttacagaagagatgttggggtggtcgagcttgcaaaaggttggacatagacaaggatcgtggttggggctcaagaagacgactggagttgttgaattgttgattctaaggtattcatcttggttagtatataagcatgttactgtatatatagattaaaaaaaaaaaattgggttgggtttgtgattttccctacagattatatgagtttgtttgatattgggcataaaattagttttgtgtttatttccccatggattatataagtttctataattttagttgattaaaagtttaatgtatttgtgtgatttgataagtctttagttgtttagagaattttttttttgctgagatattggtgatcgataacattattcacgcttcaactggatttaagtaattgagactgatgttatggtaagacaatgtgagagtgaagaacaaattcgaataaggttacatttaatttaattttaaaattaattaaataaaattattctctgctacatttttaattaattttaaatatatttttaatttaaaaaagatttaaattatttttatattgtttaaattatgtctttcaatactagttattttgtttacttttaaaattttagaatttttatttatctatttcaattatttaaaatggatttttttttatgtttttcatttgaagtataaacgtggcacttatgtgacaaaacaataatccaatagctacaagccaaaaagtatccattagctactacacgtggcactactcaataacaaaatagtttgaaagtaattataaccgaaggaaacttcaaggcgcacaatacagtaggcaaaagtcctatttattcaaaacaaaatggcggaagggaaaaaggagaataacatctgaacctattcccgtttaggttactctagtcgaaatgacattaatgataattaaaaatgtgttggcaaccctacattggttagacaaatagcagaacagaggaaacctggtgtaaataagggaatcaaggttccaccccaataaataaagagaacatcaaaatgccagagataagaaaactatgttacacaaaattttaacattgaaagcaatcttttcatatgggcatataagtaataacttgctttatgtaccttatcattatttgctttttcactgtcatcgtcatcttcaaaaaaagataagccagcttcagaattatgctttctgatactcaaataagcttctatcccaaccataactctttcaagctcctcaggaacttgctgcaaattatattacatcacatcaaccagtcaaaggaaaagaagaaaatagatgctatcatatgtacccaaaaaaagaagcagaaaaagtaaaaacaacaagataagaaaaaccttcaacgccaaaaaaaaaaaggataagaaagataagatatgttacaaacaaactttaacatcaacaagaattttagttatctttagtttttaatgtttaacaaagagtgaaatagaagaaacacaatgttaaagaacctaaagacacagttgtcatttctaaagagttgaaagacactaatgtcacaagacaacagtgtctgttaatgaaaagacaaaacatcttgttgttggcttgcgatataaataaatcattgagtacgcaagtatgtaactaaaaagaaagagtaagaacaaaagtgagtgcagaatatgaatgtttagattgatgaccagtccctacagattatttatatagcaaagcaaaaaatgccaataaactacaaactgtcacccatacaaagaaagtaattatatctatcaccataattatattacctcaacaagttctgctcctccccatgggagacaagacaagatacatgcaatataaaagtcagctcgagcctgccaggatggattccccttctcttcatcaattgttgtagcagctgatgataataatgtttcaaaagtaacagccagagagctgggctggagaactttgctgcacatctacaaaagagagagcaataaagataagaaagatcacaatagaaaatattttaaacacacatcaaaataccaaaaataagcagtaatataaaccagaataagtaaataggataaaaattattattcatattaaaaggatttaaaaataattttgatcacttaacaaaaaagaccaggagcgcatttggataattaaagtatttggatggttagcatctttgggaaaggtgaattcttatgatagaatgcaaaaaagaagaccttattaggtgctctacccaggttggtgtgtttgctgcaaagcttgtggagagtccattgatcacttacacctaaagtgcaattctctcagactttatgggtcaggctactaaggaagtttgggattttttgggtaatgccttgtaaagtttctcaaataattgagagtaagttaatagggattaagagaatggcaactctttggagattagctgtgatggccattatgtgggcagtttggagtgagagaaatttaagaatatttgaagacaaagaaaactcagaagaagaagtatgggaaaaaatcaagttctggaaagcaacatggatctacaagtcaaagcattttgaggatctatctttctcggatttgtgtagagagtggggaatcattgtgtttaaaaggatttattttgtataattagtagtacttatgactataagctaataactctttgttactacagttttcctccgccataagcaaagaaactaaataatatttgggaggagatcaatctaagacaagtgacctctatctcttttt

SEQ ID NO: 379249 - DNA, 6882 bp, Cannabis indica
attctgtggtttatggtgaataatattcatgataaagagaaataaaacaattagtttatttgcaagctatttatcctttgaaatcttctcctctagacttcttcatcctccaggaaatactatttttttcttctggaccaagccaattaaaagtgaggattgatctagcctttctttttctttttttggtattttctttaaatattttgctatttaaacaaactgattcatgttgttagtcaatactgtactgtacaggttaggcaagataagtcaaaggtgggtattatggaacctgttcatcatttacagaacaggtggaatgtcctttacttagatcaatccttacctttgacctatcagggtgaatcacagatggcattttcaagagaaagagaaagatataagatataaagagatttcatctccattctcattcctttttatcctcttttatcattgccttagttgtcgtttcctcttggatttgagatcaacaacaatgatagaaatgttgtctgagctgtttctcccacaagcaatttcagtgagactatcagcaacaaattgtgctggtgatatctgatcatccgaggaactactgctactactcatcatcaacctacggcgtcttctgagaagatgacgagcaacctctcctacctcgtcgtttgtcatcacatcccaaagcccgtcgctagccaaaatcaagcactcgtcctcttcagcccttgtcatgaacttaatctcaggcactggaattatccatggccttagatatcgatcacctgaaaacatatttccactcttcaataagtgccacaagattttcaagtacaataatatgaaaggagtctcacttacacatgatgaaacacaataaagggaggaaattttgatcaaagaactattagtagttaatatgttagctctgtatccaaataaaacgccaaaattaaaagatggcattcctcaactaagctggaataacttgtttacgttcagttattagaaatcaagtaaaacaattagtaaaatgtcctcatgaagctatcagggttgccttaaatccagttgactttatcctaatctttattgctattcggtccatgatgttcttcataaatcatgttaagattagtttgagagactaccaaatattaggaagatcatcatcttctccagcagttaatctctgaaattaaaacaatcatgagtaattcatgatttacaccagaaaacaagagctaattagacagatatgaacaacgttttttaatattctggataaattgtgtaagaccccagttgatactacatgatggatgttgaaatggaaagattatacacctaactactgtatgtatagagacgtgatcttatgttagtattggaatatatgatagctaggccctccaaaaggaccaaaacacattagtaagaatagaaaaagcttgtgcctgaaagaatccttaaccactttcaacaaagcacataatggtaattcagtggaataacaaagatacataaccaaatgagctagctggtaactagatttcacgtataacaaattacaaacataaaaacaagctttcttcttcagtgaaacgttagtaaagtaaaagttgcaccagaggtttcttacaagtgtcatttttttcacgggtagtgctcaccacactctcttgtctgtacaaaaacaatcacaaagcaaagcaaagcaatttttttccaatccaaccttactttataattttgttattaattaattgcatatatctaactaaagaaaacatagtttctttctttaaataatatccaaagaaagttgtactgttataggatctgattctctagtattttagtaataactcatctcaaaggcataatagataaaactgttcgctaactataataaaatataaaaagtattaatgattaggaaatgaaaaagtctcagagctataccttagtttatcatataagctaaaagccttgacgaaaaatcttaggagaagtatggtaatatcttgaatttttctatcaaatagatcgcatagggagtagagaataaataaagatgaaaacctatagctctggacatggcaagaactccaaatactctagcaccgttccagttaatgactttccctccctctctttcgattctcaagagctcgtcttctctatccggctgtataaatagcaatgacaaacaatatgttcttaatattgtcaaaaaataatattaatgacatttagagaacagctcttctatttagcaacaagaataattgtccaactgagtttatcttctcaagctctatacatggtttagtacaagaagatatgtctaaaaagtgcttgcctgacaaagcggcaaggcacttccaacatacgattaaaacttactattgtctaactataatactacaaataatgtcacattctagtaaatcttgacaaacagaaagaattccttaagggtcaaaaagattcaagagtttctataatgatcaccttctgatcaacagtcaatgggattgtttgggtcccacggcaaagaactgccctggaatcaccacaattcgatgtaataatctggcatccagagagaacagcaacaactgcagtcgatcccaccatctctggtgccacattctctgtcaggagctcattgtcagccctctccagaccagtggaaaacgccgtttcccactttctctgccattcattgtatccaatagtgtcccgagaccactcttctgctatcacttcatgcagcctttcggcgcaaaatttagctacctattattaatcaatgcaagccaaagtgttcaaaaaaataaacagttattctcaaatccttattggatggtaattgacatgatgaatgacatattagttattaaactcaaatttgctgaaatatcatttttccacacttttaagctgagtaaacaaatctcagatgtgtattatataatttatcctcaaagtagaaaatactcatctgaattgggtatattagtatctaaacatcaaagaatctaatctaatccaactcaaacacaaagttgtaggtagccacctagacaaaggacacatatgtcaaaaccaatattctcatatcttgcttcacagcaatatacatccacatatatcagaatctagagacagaacaccatattctaaatataagcatatcttctattcttagaataaaatgaaatgcttatttatactcctataaaaagatgactcactagcatacctacaaaaatggcagtaaagcgacttgtcatgaatacccaatattgggaatgtctataaatataaaaatcaaacagctgtatccaaatgttaagcctcataattagcattggacaggttataacgacaagattacctaccgtttgggcattattgtacatgaaacataaaacaactccttgtcaaccacatcacccctaaaaaaaaaaaagaaaaaatgatgctttcctagttcctacctagtgtgccaggtggaatccagggtgaccaccataaaagcttctttgtaggtgacacgattatgagtagcagaagaaatcaacttctccaagaaaataatttaacaaatggacccaacttggtatgcacacctcactgtatggtgtatatagacacacggaggcgcaccattaggagcagtggtccccacacatttcctttcttttattttgtattgttcctccaacataagtggaacctcttgatccaattccaaaccacacccaaaccaacccagaaaactatatattaaacaattcttcatttccttcacttattctaatttattagtgagaaaattatgatatgaagaaccatataaaaataatattttattcattatttttttaatatttattatatattaaagagtgtataatttctctataaaaaaaaaagagtatataattgaaataatatacatacaagaaaagaaatttagaaacaaatattagatttttcaatttagagtggaatgtaatgtaatttaaaaacataaggtagacaaaggacgtttctatttttagaatttagaaagaaaaaaaactgagtaaataattacactgtaaatttagaaattattatcatttattcaccaaaaacatatactagcaagtaaaaaaaaatgaaaatatctactgttggccgtacgacctcatcaattatcagatatgtataatgaaaagaaaataacaaaaagtcagtcatgttgtctgtgacgcatcgtcagtccagacaccatgtgatccacataattacagagtgggtcccactagtgttcatcatcgaatggtagtggtccgatgatgcgtctgtgacgatgttattacacaagagtgtgacggtagcaagtacccgaattcccctagaaccaaactagacacagcgaaaacaggggaaaggagggaaatgtaaaacatgggatttaagcgacacgtgtccgtctacaaatggaaacccgccatagattgattaaattctcatcgggggaaaatactaagaaagcatggacacaattgtttattctcatccgttggatgaggtttgggaacatatcacgacaacgtatctgagattcgtttcatctgacggttcagacaacgtactcgcctaatagccactcaatcaccataccccaaaaactcacctccaacctccaaacatttcagtttttttatttttcaccaaaataaaaaacattatttcagttttcagaactcgggaaccaataacaacgaaactattgattatatatttcaaaaaattaaaacacaaaatatgaaacgataattcggtggacgtttatctgtcacagaaataataatgattttaataatctctttaatttaacaattctcggatttttttttattattatgtggaagaagacaccgcctttatttttgtaaacatagtttaatttgtccactcacctaaccaaatattatttctgatttaaaaattgaaaggaaaaaaacaaaaagtaaaaatcaaattctttctattactttaatactaataattgaaatggagtacctgagagccaccatgaccatcgtacactccaaaaaaatgaacgggagagatctcagaggaagttgtagaacccggagccgtacaaccaccgacgtgatcgcacgtgcgggagatgaatcccggaacaactgccacagcgtcctccatctctttccgcctcccaatcaccgaagtgaaaccccaactcactccattgtttttcctacccacgcacttcaccggcctagccggcgcggtcaacgtcgctgcggcggttccatcgtttgaagcagcggcggcggcctggtcaggaatgataggtactaccaccgtttccgatacaagcatcgcccgaatctcgccggaattgctgctcgtcatggatatgtcgccggagctggtggtacttctagaatcttcggcggtaagtacagaggacaagcccgagctcgtcgacagtaattccaagtctgttactcctactgagtcgtctcgctcgagttgctcgtcttctaagatgtccatgtacaagagactagagagtgcactcacattcacctagagagagaaagagagtagaggagagagaaagaaagaaacgaagagagtagagagaagagttgagatgggataaaataagagagaaggagaagacaactgtgatgttagacacgtgtgaacagatatatatagtcggatggcacacgcatccgcagtgaatgaaaggaaagaaaagaaagcattgattgcaatcgtactcttttcacttttcgctcaccgccacgtgtccttctcgccctctgcccttcgacaaggtggtctccggtcgagctctcttaaaccactgttttatattaattataaatttgagaaaaaatagttctctgtggcacgtattttcgtcgttctgtgtacccgtgaataaagaatgctctgttaacgctagcgtggcggattctaattgggtgttgttgtttctttcggtggacttggttgtagacaatcaagatgggtctatttatgaggaatctagcggacgcatatagtgggccaagctagggtacaccatcactattatagctaggtgtcacgctggcagaggatgggacccaagtattaggtagaatattgacgtttttacagaaaagtgctaaaagaatgggtttttccgaaatataaacttggaaagtctaaaaacactgaaggaagcctactgaatcgccacgtggtatagttgtcaaatctctcttttatggatctgttggaaaagcgatatcggacggtcattattgcgccaagatcattcagtttagagcgcataggtggcgatttacggcatcctaaaactaaggttgggcccactctaaggtgggttgtggggcccgaatagggtttaccccgatcagtatcaaaatgacgtgtcccaaaaccgactaaagtctaaaaccttatcaaagcgcttaacggcagaaaacggggtgatcaagtcatccggaagagggctttggtgggcccactgcagggaccgggacacgtaactccctattacgaagtggttcctccacaagtgttggatagtcgtctcatgagggtcattctagtaagtctcttttttttctatcacttcaacaaataatgttttttttattattatcttaatactataaatatatatttttaaaaataatgaactctcttaaaaaaatatataaatgtatccgtttatttttatttattttttcatttagtagaattttttagtttaattttttctataatttataattatttaagatatcttgtaaaattttgaga

SEQ ID NO: 379250 - DNA, 1978 bp, Cannabis indica
tatatatatatatatatgctgatctacatgaaacatgtttgtaattttttgaatgatgattttcttcatttgtcttgtgtatgttctcacgattttattgactgaaatctagctagtctctctccaaataaattaatatcaagaatgatttcggatctaactgtaatttcagatctgagccgaacaatttttcattgagttaatattaagatcaaaattaaattttgggtgtcaattttattcattttacagatacagtatttaaattttgtcaaaagaatttgaatgagaggaatatccagcctaagaatattcagtggtcccatttctggtacaggttgttaggattaaagatctcgaaaagatttagtgtaacttttatgctacagtagcatttgtttttgtgtttttagtttacacgtgtaatgacctgaaaggtccctttcccgttgtatgctatgcctatatattaatgaatgcactcacagtctcatttgagttatgttttctatttctataaatttttaatttcttcacttggtatcagagcttttttgccttcgcctgagaaaatcatgtataccaactagagccaaacccctaaaaatgtcgaccctaatgttcagacacctaccaacaacacagctccaaataaaactaccataaactcagttggtttgcaaattacaacagtttcgaatgctctagttgagtgaaaccctttaacaataccttaagtcagccattttcttcgaatggactatgaatttcaccctatggaaaaccatggtgtttaccatcattcgtccaccaattggatggttacttgaatggtgagagagcttgcccacctgagtttcttctagaggaggttggagttgatgactcatcaagctttggtttacaaccaaatccaaactctgaaagttggattgttcacgatcatctactgatggagtggctatacaaattgatgacataaagtatagcttctgaggctatatgggatgtaaagcaattgcatcactttggacaaccttagaagatctctatggagctcattcgagggctcatgctgatgacatttgaaataaaattcaaactgcaaagaaagggactatgaatatgactgactatcttagacaaaagagggtttaggcagattctcttgctttgactggtgagccacatcctgaaaggcatcttgtctccaatgtgcttttcgggctttacattagctatttgccagttgttcttcagattgaagacataccacaaagaacatgacaggaattgtagagcatttctgtgggttttgatggtagattagagtgattgaatgaattgattcctcatatgaaacttctcgataatgtttcaacttctccatctgctaatatggcacaaaaacctcaaaatcccaactatcctcaaaagccatacaatcccaacaactctggaagaagaggtttaagtggttatgggaattgaggaggaggaacttccagtggtggaggtaaaaactcgaagccaatttgccaaatctgtggtaagtatgggcattctacaactatctgctacaacatgcatggtgattcttacatggggcaagttctaggcatggataacagctagaaaaacaataataatttcaagctatagtgacgacactagatcttgtcaaggatgattacttttacattaatagtggagcaagcaaccatctaactttggatggtgacaaactgtcacacaaagctgagtatggtggtaaggaaaaaggaacagttgcaaatggtagctgttatacccatattttaagtaataactgaataggtctatctatgcaacgtgtgtactaaagaaaggcattaaatgatcctttcgcaataaaagacatacactacaagaaaatcatcttttgccggcgcattgttgcgccggcaaaagtaacctgccggcgcagttgtgcgccggc

SEQ ID NO: 379251 - DNA, 2795 bp, Cannabis indica
tgtatttactccattagtgggtcgattttaatgcaaactctagtggatcatgggtatacccatacctggatcatagtctataaatacattattataccctcatgcaaatgattgtaagattttcattgaaaaaatatagccaacgtctagggtagttaagccattctaagaatacttgtgtaatacattccaggctatttagcccaatacaactgactcgtgaccaaggctcttcaacgctccaaccacataaaaattattatctccacttctttattttgaatttactttcttagctttcactttattataatcagttgccaaaaatcttggtaaactattaaatatataatcatggaagtaattatgtgaaccaagtaatttaaaataatttttaatcttttatttgttagtaaataagattatattaaaaaaaaattatttagaacataaaactctaacaaaagaaacttccattttaattttttccacttaatacctgatcaaatcttcaacaaatatatgattttatttcattaaaaaaatactatatttgacctactttcttaaaatagaaaagctagtccacatgtattcttttaataataaaatctatcaaaaatatatataaggaaagtctatacaactcaaccaaatatatataaataaattataaaatatttttcaattaaatatgtcaaaaataaaatgaacagcaaaaaaaatttgtagtcaaacctatctggaggcacacaaataattttttgaaataccaacactaattcatctttttttttcccaaagcaaagaattcattagcaatagtagacaatcttttatagaattctaataatgtttcagtttctgacattcttaatttatcaaatctagtttgtaacatggtaaaacgtgatctctttagatcaacggtaccttcaaattaagtttgaaagatttttcacacctcttttgtagattcacaagataacatcaatttaataaaatattcaccaacaccattgaagattgcacgaaaaactttattattaaaatgagataatttttcatctttaatagtccacttaatttcaggctttaccttagaatgacctttatcgtcctcttcagtaggtgatgatcaacccaaaagtataaccctacaggtcttttcatctcctgatctaataaatgctctcattctgatcttccaataaagataatttgtgtcattcaacaaaggtgggcgagtgacagaactttcttctacaaagaacgacatctcacacaaaacaaagtaaatagaataaaataatcttaagatctcaataaaaatttagtgatctgctctgataccaattgaataatattactaatttattatttaattagtcattaattaaatgcagaataataaatgtactcaaaagatattttgtaacgacagaacatgactatgtaacttcagaataaaaagctagcaaagagtaaaagtgcaaaaaaataaaaacacataaatttttatacgtggcatcaataatccttacatattattacttgtccatggggtcacgcttagagataagactcgttagtaagatctcaaaaatacaaagtatttaacttatgcataaataggcttcctctaattatatgtggtaagcttgatgtattctaccttcacaaatgaccctttgatgaaagttcaagtattcgaactccattcgatctatttaaagagtagttgcttcctcccgaggcaagagttcaaacattttctcccaaaagctaaccttttcctgaaggttttcactttttttcttcttctttgttgacttaattacagactcaaaacaataacaaagacatatacactaaggtagagtaaaactcactctccgctacaaaataaagccattatttcttacaaaatatagaattaaatacaaagagatgacataacgtagtagccaatatgagtatttatagatgatatactcatatcggacagctcatacacgaatacacgtgtccacaactcataggaaattttcttaaaagaaatctttaattcgtccagaaattttctgttctgccctgatacactcaagtagttattagttagtgttttcaattagcattctgttataactataaactattcttgttaacagtactttgttttttggttctactctctttgtaatcctatctctataaataaaggccttcactcttaaatcttgtaacttttacaagtttttaagttctttgtattcgttgatcccagatacttcttgtattgataagttctcatatgcacctacagaattgtgagcaataagagcaagtttccttttatagtaaaagaaacttatatttcatttttctccaattgatacctgatcaaattttcaacaaattgacgaaacaagattaatatacgactagattcaacaactcataaatatatgattttatttcattaaacgttctatatttgagctacttttttaaagtaaaaagatagtctacaaatatctatatctattctatataaagtgtggctatataaccgaattcttggtttatgagaaatttatgggtgactttttatttatattaaaaataaaatgatttattattaaaaataaaatagtttatgagaaattcatgggtgaatttttatttatattaaaaataaaatgatttattattaaaaataaaatagtttatgagaaattaaatctcattaaatcccattaaatctaaaaaaaaaatacgattggatttttgct

SEQ ID NO: 379252 - DNA, 2095 bp, Cannabis indica
atcttatttttcacagttaactcgccaacattagacggttttatatgtacacgcttctacatgtaacaatgtttatatagtacacttaatattattaatttaaaaatataaaaatattaatttttttattcattttttatttatatatttgatatgatttttatatacttccaataaaaatttaaagttttggcagctaaaccctctcaacaatcgtttcacttgtatttaacttttaaatttaaatttcgacggtaaaatcttccaaactactgaatgagtagcaaatttaaggtgtcattcgattaactgacatcatagactgcttatgtgcatattcttatacatatgacacatttatattggtacactaaatattattatttaaaaattattttcaaaatttattttaaaattataaaaataaaaataaaatacataataaaataaataaaaaagtaatatttattgtggtatagaaaagagtaaataaaaagtctcctatttatgtttggcagctcacttttacctttttacatctgtttaattgtcttactttcacggttaatagtagtattttttggctgctccgttctgctaactcggtggcttgtaatttggcggcttgggctgcatcccataatgttgcccgtcatctgttggaaaggaaattagcaccgtttgttgctactataaattgattttctttgtctagttttaatgaagtttgttgtttaagaaaaaaataactcatgttatattttgtatcaaaattagtacaatttttaatatgtgtaaattcaaacggcagcattataatcactattaaaatttaatttaataaatatatacaccaaatttataaattcttagcatttctctaaactaaaatataaattatttgtttaacttccatgctactcaactttttgccaattccattaaaaataataataataatgataactttttgctaattccattaaaaataataataataataactttttgctaattcaaaaacaaagggtcataagaacgatacttcaatttgtaacctaacgaatcttatagttttacagctttaaactttaattttcctgtatactactcataattagatgttaactattttttctctttaagtaaactcgaaccaacttattaataaatttcacttatgagacttttgtcttttcctttctccttttctttttgaaagaaataaaaaatatatatatgtacagctacaacattagaggtaattacaaacaatgataaaaactagcctttgattctaattctatcgaatgatcatgatatgctttatttatttaaagagaaatttgtgataaaaatcctcaaaaaaatgtatattaatgcaaattagtctctaatttcgaaaaataataacaatagtttttaaagtcacattttttttgtagatccgttaatcataattttaactgatctatttacttatttaaaattatcacatgttgaagcattattagtccaaattattattttaatttaaaaaataaaaataaattatttaaaaataatttcttttttcttttttctctttcttttttttttttcttttcttctttgttcttcttcttcgtcttcttcatctccaccccagcattgattcaccctaacctgacctcccactcccaaccccatcttgtcaaccagccatcaaaactcaccacccaccctctcgatctctcagtcgcaccatctcaatcttaaacatatccacatgcttcgtcgaaaactgcctcgagccaccaattccacctcatccatcactacaacaattatgattattagaggcggaccactccgctggtaataatcccattttccgccgctaaagagtaataccggcggggtccgccggtaataatccgctggtaatacctggtcgctaataactattattagtggcggactgacacacccgccgctaataatagtgtcagatcattaaactcacactattattagcagcggatcaatccgccggtaatacttttaaatataaatttataattttttctttcaaaataataaatataaatttaat

SEQ ID NO: 379253 - DNA, 2895 bp, Cannabis indica
gaatatatttttttaaaataataagtcttaatatagtacactcgatcttaattattggttttacatggttattgtttttaatgggatctcgaggtgcttatcatcccctaatgaataatcatccattcgacaatttaacaaagtaaaatcttaaaagataaatattttataaatttttgtttctagtagactcatccctaaagatgactagttagaaacaaatttataaatatgaaataatagtagaagctcataaaatatggatgaccttgactctcgcctaaacgagacaacatcatattcatattttgatcgaataaaaggttgttaaaatgtgtttattttagatgagttcactactctattcaattaatagtatctttgaatctcacctaaatgggacattgtatgtcatttagttgaaaaccttaaattatatttgagatatatatttgtattctttttatgtctttattatttatttaatgtttacaaattttttgaattgtgtatagatttatattatattgaactatgtaattgatttctatttattaatacttgtagtacccattatgtctttatcaaactcaattgtgtcacatctttagagctaacttcctcaaatgggagagagaaacgtcaatattgctctcataggtgaaaattcactgtttgttctaactgaagaacaacctgaggtgccaggtaaaaatgctactaaaatagttagagacagatatgagtgttgggagaaagccaaaaataaagttatattctttatactgtcaagcatgatagataccttgaaaacaaactttgttaataatttcacggaagctgagattatgaattacttgaatgagctgtttagaaagacgtcggatcaagctcgttttgaagtgactataaactttacaaacgcacatatgaagccaaatcagcatgttcatgatcacctatacaagacggcaggttatttctaggaggctgaactccatggagctattattgatcaagagacacaagttagtgtgatccttaacagtttatctctagcttttttgcccttcacatcaaatgatcatatgaacaagttgacttttgactttcacgagttgatcaacaaccttcacatatttgaatgtttgattggaggaccataaaataaaaggtaaggctcctgctactactaccaatagtgtaactcaggctaaagtaaacattgtttctattgccaacaataacaataagaaaaagaagaaagggaacaatcccaatccaaaagctcccaaaggttccaaaatagcaaggaaatggaagaaactttccaaacctaaagcaaaaggaaaggaaaagttttcctcttgcagtgaaaagggacattgaaattttggtgtcctaagtttttggtaaataatcaaggtattcctcactcttttgttcacgagttttagagaatgattattcaattgtatttatcatttttagatctaccaaccatgtgtatgttattatttacagctactgctgcttgagacttgggatacatctctcagtgggttaaaaccgataattgaagacaatgacttgatgttgatccaagctagaagacaaagcttgctatttccaattttagaataaattagttttgttttcaagcattatttattctagttaatttgtttgacttttattttatttccaattaaggttgcaactatcactttgacattttgaagtattaatttaataaattttagttttctcttaatagatttcattgtgtgttgcatgtatggattgagttttgtaatgtgtgttctattattctttgtcttattaactattactttaattttttattttttattttttttgcttttattatatcatgattttgcaataatgactattatctatgacatttaatcttgttatggggttttaacaagatcattctctacaaatagaatcatgtcaaataattacttggataatatatatgtttataagaatattattccacaggtgattatgagtaatttgtcaaattcttagacttttacatagataattgaatcatattagaaattttgattataaataattcatgaattcttaacagtttaatataaagtaattaaggatcttgtgaactgatatgggtggagaaattttgttatgcagttcaaagattatctaaagatcgaaatcacatctcaaacttacctccttagaaatatgtatataaaatgaatatataattagcttataattaaagtattccttaccagaatccttcaaaaaattaaagatgttttctctaggaattataaagtgattagaggtgagctatggttgtcaactctctaagtgttttcttagttagcagacactacaaaacctacatgttccaccatcttaaactattaaataagatgaagaaagtcattgaaattccttgaaagtaagtcatagtactttgaagtagtgggatgatttgtataaacgcatctcactattacttggagaatactagtgatgaaaatcctttagtcagtgaaagcataaaagatattttgaatggatttattcaactaattctagaaggttgtggcctaaacattcacatgattagacctaaaaccctaaaagaatgctagtatctgatgtatggagtatacattagactgagaccgatattgatcttggtaaagataatataatcttactgttgtatcttactaagtcaaaagatattagatcaaaagatcttaatcctgatatagttaggttcgatctcaagagtgttatttatgttctttgagttgttcgttgaagctcgtatgggtgaacacatacattttgggaacaggattaagatcatttgat

SEQ ID NO: 379254 - DNA, 4226 bp, Cannabis indica
tttttaaaaaaaaataaaattttgcacaaactgcataactataaaatgtgtaattttcactaattctttttttacttttctaggccttttcctgccctgtttggttttctttccacacaaagcccaagctttggccaacaatgaggacatttgatatgatgcccaaaaactagaccatccgatttaaatctcgagttttgtggccacgaggcctatgaatgaagtatgaaaagagcacgatgacaaatttaagtgacgaatgatgacatatgatgttaaaagtggaggtgattattggtaaaatctccaaacaataaaccttttctctaggcaactagtaatcttcctcaaagctattatgaacaaaactaccacaaagaaaaatcattggcaaaagctattgagccagtgaggaaaaaaaaaatggtaaaacgctttcattattatacacagattatagcaagagatcctacattcatttcatgacacgccatccctgaggaagtctccattttctgtgccagaatattgacactcttgaccataatgggaaaccaaaattgtagtcgaaaggccgatccactggccctccaacgatcaaaggcaaccatacgtaccttgagtccttcagatcagctgggttccatctgtctgccatgaaaataaatataccaggcaatccaggcagaggaactacaaatgtactctgagaaaagaatgtggtcagtcgaaatattttgctccctccaatacatgggtttcccatagtctcccatggccccatgattgactctgcagcatgcgcatgtgcttcgtttggagcccatccagtgcagcctgatgttatcatgtaataagttccctggtgcttgaacaatgctggggcttccctatgttgtgccacaagaatccgttgcactatgggagtcacattgagataatcttttgttagcggtccaatatgaagctcactattgtcctcagatgagtatattaaatatgctaccccatcatcatctttgaaaattgtcatgtctcggctttcaaagccatgaggttgtttgctgtatagatagtcgaatggaccagtagggtaatcgctaacagcaacaccaacagatgctttagtgtagttggcatcatcaatatgcatccacataacatatttgcctgtattctcattgtaaaccacttttggccgctcaagaacattggatttgtggagatcgtgagtttcgtccgtctcttctgctgccagcacaataccttcatttttccatttccacaaatcttttgaagaataacaacctactccaattatgtcaacctaaataaaataagtgtaccgtgttaaacaactgtgaattctaatcaagtaatacaaccgaaaaactaatgctataggttgacacaaggcaaaatataacatggataactgaaaaggaaaagaaaacagaggcagaaaatggaggacagataacagatagacgaagctcagtataagagaccaaaaagtgtaatcagcaacacaaatataatctcaagactaggatatgattctgacccttaacattaaaataaaagatatgaccagtatgcaagcttcagtgtctaatcattaatcttagttcaatttaaagttgtaacactcccatgatctaatgataagcagaaagagataggtacatagttttcctagctcaagatacttttactcctcatctcgcttcaacatggcaaactaaagaaatgattggagaaagagagctgaaattatatattctgtgcaaaccttcctattagtaaactacactctctgttctttgcactgatcctatctaccaaataaatctcaaatccattatacacagacaaaaccagaactattagtacaatcaatttggtgacccttgtgcgtgatgcatattacacaacttttgttgccttatgaagctcaatgttaagaagatacatccctcctattctccctctaatttgtcaaacatagttttttctctaatgatgaactatgaggtgtaaatcttcatgcgatactttgaagaaaatatgtgttcttagttgaagctcaaactctagaccaataaatacacttgcatatctctttaagcaaaaagaaatactctaaaatctatttaaatttgagcaccagacaatgctttaaatgcaacttacccgagcagctgcttttttgtgtgcatgataggttggcccatctttgtattcaccataccaatagtaagtcattgtcttctcatcatatagaatcccacctccatgggcttgaataggatttccatcagtatccaaccaaattttagctggtgaataataaaagctatcattcccatccttcctcggatctatagcagttttctgaccaggaaagaatgtgcctcttagttgggaattctcatctagaaattcttcgattatagttgttggtcgttttggctttctttttgcagcacgcggagatctcttcctaggtggaggcatttggattttttcctcatcaactttctgaagttcacgcaattgcgggttctgaactgtatgtgattgaatctccccagtaaccacatctttatggcgaacaagcgagtagaggtgaagcataagaacacaaccaaccaagctccagacaacagcagacattgaacatctgctccctgcattgcaaggtaaagtggttggtttcctgtatttgttcttcatcctcattttctcttccttttatttttatctccaacaaaatgctgcaactaaaaaaatgcagcctatggagatccaatgaaacttgaccaaatataggtcacaaccacgctaacctatattttgaagaatattaatttcatgaacgcttatgggaaccaaattaacaatcaaaaatgtaaaaaatttaggaaaaaaaagatgattcttcccaatcctgctaaattaacttatttcactaacttgcataaatcagaatccaactcaaagtgcataattgagcaaaaatttagtcccatatctgattccaatcaaaacttaaccaaattttgattggaaaaatataaaacagttagtcattaaagtagaattacaattaagatttgatctccaacaactccaccatcactaaatccttttccaaatatagtacaaaaaataaaataaaataaaaatgaataattcagagttggcaacatcgaccataacgcaatgaaaaaataaaaatatagaccattaagaaatcggaaagaaaaaactcctaaagtcctaattctaaatcctaatctattacatgcgggcttcataagcgaagaagaagttgaagaatcaaacctgaaaacagtcgaagtaaaagcggtgccgaatttccagacatggaagaaaaagcttggtttcagagagttggagaaagggaaaaagggttaagcagaagttgggtagtatacttctgaggaaattggatctgggtttgatgacgctgactccttaccaagaaggaaaatactcctctcctcctctttcgttttgggactagagaaaaagggagcccaaaatcttgggttcctttcttaaaggaatttcttcatataaaatatatatatatttactgtgcttgggttgtgagcttcatgtgaacttgacagttgaatttccaaatgggccaccattggagtttctttgtcgttgtgtaactggtcttcttcttcttgcacacctactaactatttaagtatttattacacaataattaaaaataaataaataaaaattagacaatgttgcttctttggtggaatggaatgtgatatatatatttttcaaatcaatttcaatctccattaatggcaaaaacctaacctcctcgagtatcattagttttagttttattttgtgctcactcacgtcacgtcaaccaaaattaatatgagaatttactagaccatccaatgaatccaatcaattttggatttttagataaggttaaaaacatatttattattgctaaaattaatgcttttgtaaaaatttaatttttactatggcctcaagtaatttttttttacataaattaaggcttttggtcatttctttgttttttattttttaattaaaaaaaattatatttttgaataataaaaaggggaattaccctatttattgttttttttaattttatttttttttaaatttacggtttgagtttctaaagt

SEQ ID NO: 379255 - DNA, 2007 bp, Cannabis indica
aaaataacaaaaaaaaaacttaataagcatttactaactacttgtgtgaagggttggctttcaagtttggtaatgaaccttgaggcatccatgtgtctctgattgaatctcttcgttttctgctgctaaatgcagtcataattcccataacaaagaaaaccttctgccgctccttgaattgctcggttccttgtcttgtaaccaccggagatccttcctcactgttgtcacctttggctgctctggctgctgctagctgcacctccaatgaggaaattgttttgtctaatgtcctgaaagcatttgcaacatggatattccatacgaactatctaagtgataaagttgagtaagcaaatagatagtaatgtaaaaactttaataacttccaccgatttaaaaggtttataagatatttgtgtgcttacaagattacatcgtgtgtctgtgaaacctgagaaaggatgtctcccacttggtctgaaacctcctgtaatattaacagcattatcacatacatcagcatagccttcccacaacattgaagatgatttccaaattataaaacttgccttcttatcacaatttactaaggggtgaacatctcccgattgatgttgtgtcaaagatgaagcctcctcatccattttgactggatcagtggcatcccaaaatctacataatcacattaaagttcaacctcacatattcataaacaaaagaatatatatgggaaagagaggtgaatcctttcagtgagaaaaatgactcctacaacaatgattacataaggaaacactaatccaaatagaacaaaaaaaaggaagcaaatagagaaagaaaggaagaaagtggcgcgatcacagccgacaacacagctaacagagctcatgcgatactgtactaccctatttcatgtcatggtctggctgtcaattaacaggtataaggattaaagatgattgatgacatgtgctcccacatataattatctggcatgaatcatattgaaaataattccaatatatataaaaacatatttacacataaagattttgagcaagctggaattcacaatcatcatactttctatgttagaggctcctttcaacatccaaaattattgcaccactgtaacttgcaattttcaacagcataaccaatttacaaatcatattctatcaaaagcactttcagaacaaatcccaaactgttaggcatcctgcggccatgtacaagagaaagcaaataggccaaccaaggaaaagctgtgatacatgtaaaaaaaagaccgggagcatagcagaaaccttgacaattagactgtaaaatcccaaatccccatatcaatagagtaacttcatccccatatcaactcaaccaacattcaactctgagctcaaaaaataacttcttgtatattatagctgcatcatccttgttcagggatatgctatcaaaacaaccgattcaacagtctgctattgaacttaaattccatcagcagggattgcgaaactcaaattgcactaaccagcaaaagtaacataactaagcgaataacaaatgccccaactcactcacttactccattgccaaatagaatccaacagatcgtaaggtgcagaccagccattatccttcctagctagcaccaagtcttatacatctaaccaataagaccagaaaatcagtccttgttatccagacaaaatccttgtagaaaagccaaactgaaactcagtctttaatggcagatacccagaaaggcatgaatccagaaacccaaaaaagaaaccaatactttcagataggctataaagcttaaagtaataccatacaacattgaaacaaaacaaaagggtcataaaagatagctcatttcaattcaacattacaaatcacacatttttaagccccatatttatcaagtaacaaatctaagagctgatttagttaacataagatccaacccaacccagtacacacacagagagagagagagag

SEQ ID NO: 379256 - DNA, 7952 bp, Cannabis indica
aacgtttcacatgtacttttttacgtagtgggcctataagtgggccaagaaatagagtttggacggtaacaacccaaccttcacattctcgattatccacgtcgtagtttcaccgtcgatattctcctctctctctctctctatctatccatccatggacggaaaaaccttcaaacggtaaacacccaaaacactttcactacagaaaatctctctacatatatatatatatgaaactaatttttatctgtttccaaacagaattttctgaatttaattcctctttttcttctaatagagactatccttgagcagcttaaaaatggagttgcgaagttcgagctcgtctcagtcaccgctcgttccatttcaactcatgattatcaaacatttcagccgtctttttccggaaccagtcaccggttctttgctagaatcagtccaccaatgtagtttctttcacatatattttcattgcgtagcctgagagttcaactgtgaaacgttttctgttattcatggttttgattcagtggaaacggaggatcaccggccatgaagaaagtggaacgttactcggttctgagagttactggagatggtcgttgcctatttcgtgcactggtatcgtttatttcttatcttcttgtggatactttagtaatattgaatgtacgtgaatttcgaactaaatgtagtggagtgttgcttctttatacttaagttaatttcattgattatagttttgttatactttttatatatatgctactactatatatgtatatctgggcattgggaaaaattcagtaagttttaacagtttatggagattccaaactagtgtatactatgagatttgactactcctccctagaattgatttaattttgcccatttttcatttaagaactgccaatttgacggaggttgtatttgtcagtagctctgttgatatatggtgaaagcttgcttccccatttgggacttctcaacattttaccttttactaagtgagaaagctcaatgaacttgctcaagtgatgagtaacgtgagactgagtacttcctatgccttgcctccttaactaatttgttgtcagtgaaatcaggccaagggaatggctatgaacaagggaattcctcttagcccacgggatgaaagggaggatgcaggtatgctggatatatttaagttgctaatgatacttgctccagtctaactaatttgttcactaggccatgttttgcctccatttaagcaagtttcaaaagtgaattcaaggtatttttccatgtatgtttcgacacatttggtttctcatttgacattgaacttctggagtataaattggttgatgagtgatgacctttgttaaatcatcttaggtctttttgtattaattatttgacattgaacttcctcaatggcttagttataaaaattgtttgtgtactggtgcttgctaaatcatcttatttcttttttatatctattgattcatttatttattttagtttactctaggtcttctgttgttctgctataatcatgaattgggttttcataccttatggtaccctcagcatctctagtgagtttatatagattcaaagcttatttttattttctttctcctctgttcatattgtttcattatatcagagcctctgactggcgtcaatggcttcttccgacgacaactcgtcttccaatcctattcctctgcaagttactacaacaactcagaattggaatcctttctccaattcccttacatcgtctcttacattcaagttggatcgtactaattttctagcatggaaatcaatgtgattggtcatgagcttgatgaaatcttgctctctgatctcactcctcaatgactcatcaatggagatctcaaccctattttcactacttggcgcaagaaagatcaacttcttctttcttggtgatctttcttggtggcgatcatccatgagtgaagacatccttggcacagttgcgaattacaccggctttcgtgcggtgtagaaagccttagagtagaaattttcaagttaatacaaggtttgtttgctttaactcaaaggcgaactttctaacattcatagagggactcgctcgatctttgactatgttgataagatcaaatccctttgtgattcgttagctatagttggtcatcccatcactgacttcgattagaccttgcatctgttgaatggccttggaccggagttcgatcctattgtttctagcattacttctcgaagtgacaatttgtctcttgagtaagttcaggcgctactaatgtttcatgaaacttgacttgagcatcacacatctataatggatctttcaacaaagatgtctgctaatctcactcttggctcaagacaaggaaattatcgatcttatagtaatactgacagaggaggtggtcaagatcactataatggcagaggtggtgctcaagatcactcttcaagattcaatggcaaaggatctagttatcctaattactctcgaccacctaatctcaatccaaatcgccctttgtgccaagtttgtacgcggtatgcacatactgcccttctatgtcattacaggttcgatagaaatcagatcgctcctaaatccatttctaattagtctcaacctcaagcaaatttaactaagcaatcttttgattatgagtctcaagcatttgttgctcatctcttcctgattttggtgatgatcatggttggtatgttgacaccggagctaccaatcacattgcttataacatggatcatcttgaatctgctattacatattcaggccaagaaactgtggcagttggagatggtaagaaacttgttatttatcatattggtaaagccactattccctctcattctattgcaccattaaaattgaattatgttcttcaagttccttctataactaaaaatcttgtcaatgtttctaagcttaccacaaacaatgatgttttcctagaatttcactaatcttgttgttttgtcaaggacaaacaaacgggtgcagtcctgagcaaagtgaagcttaagaatggtctttatcttcttggagatgaggattctactctcttaaacacattactggaatgtcagcttgctacctcaaccatgtcccctaattcttttgattgtttttcaaattcttgtagtaacaagtgtattcattatgaaaatactatttctctttgtaatattgtcacggataatgaagaattcaattcttcttattccatgatttcaaaacctgcttgtgtttgtctcaaatttgtctaatgatataaacctttggtattgtaaactcgagcattctgcattttaaccaaaatactaaccacaacaaacattcctcattcacttaaaaacttacaattttgtaatgcttgtcaaagaggtaaaagtcacagacttcccttttccttgtccattactcgtgcaaaacaacctctggaatttattcatactgatttatgggggtcatctcacactgcctccaaagataattaaaagtattacattgtgtttgtggatgactttagcagattcttttggatatttcctcttgttcttaaatcacaagcttttgaaacctttattcagcttaaaagcctgtttgagaaacagtttaatctacctatcaaaggttttcaagcatatggtggaggtgaatataagccctttgctaagtttctgagagatcaaggtattatgtttcaacatccttgtcctcacacacatgaaaagaatggtagtgtggaacggaagcatcaacacatcacaaaaactggcttgacttttattggcacaatatggcttagacttgacttattggtggtatgcctttcaatgcttgtttcagcaatcttcttattacagcatcttgaagtcatttggatgtgcatgctttccccctttttggccatatgatcatcacaaactggagttttgatttgaagaatacattttccttggctactctccaaagcacatgggctatctctgtggaaacaaaaatggtagaatgttcatagctcgaaatgtagtcctcaatgaacatgtctatcttgcaccacaatcatcatctacttcttaggtatctccaaactccaatactcttcctattgctacatatttttacaagccctttcccatcaccttagctattctattggtctatgttgatgatatcctcattacaggtcctaataccaccttgatttcgaagcttgttcttgatcttaacattgccttttatctcaaagatttaggtctagttcattactttcttggtgttgaaatttatagaaattcagccagtatgtatctctgtcaaacaaaatatataactgatttgttggttaaagttcacttcgaaggtgcagagagttgctcaagtcctactagcacctctcacaaactgtgcgttactgaagacaaaactctttatagaagcactcttggggccctgcagtacctaactttgaccagacttgatgttgcacacattattgacaagttatcacagtttattcattgtgaagcctggaaaaaactcttgagattgaaaggtaccatctcgaaaggccttctgttgaaatctgttctaagaatgtccatggacgcatattttgatgcagattgggctagatgcgttgatgatcgaaggtcaataaggggttatgcaatttatttaggtccaaaactcatttcttggtctgccaaaaagcaacaagtggtggctagatcttctacttagtctgaattttgtgccttggctaacactactgctgagattaaatggttgttgtctttgctcactgaattgcaagtctcttttagctgacattcctgtaatctgggtggacaatcaaggtggagctgctctaactgcaaatcatgtttttcatgctcggtgtaagcatattgagatagatcaacactttgtctgtagctgacattcctataatctaggtggacaatgaaggtgcagctgctctaactgcaaaacctatttttcatgctcggtataggcatattgagatagattagcacgttgtccatgatcaactcgtgaatcatgaacttgctgtgagatatgttccttccgttgatcaagttgctgtcatcttcaccaagtatcttcccaaagatcgatttcactaccttaaagacaaactcaaagtggtttctaccctttttgtttgaggggggatgataaccaatagctttgttaggttgttgtgacaattagaattggttagttttgttaggagccttgtaacttcttaatcaactgtttgattctgttataaccgaatcctttcttgttttgtaaagctttgtttgtctataaataaaggattggtctctgtagaatgctaaggttttggagcatatttttttcccctgtttggaaatagttgttatcagtttgtggaaaccacttcttatttatttgtagttttatgtacgacaactttgagctgctaagaacatgatctttgttgactatttagaaattttatggtattaaataaaaaagatataaattaactaaacaaagtattactatgtgaattttattaaaaacttattccaatgtagatgatttacggatggctgtaaaagaggttatatgtaacaatggcaaagaacgccatcaatacgaagaagcactagtagccattactgttgacgagtctttgaaacggtaagaacagataacttttattttgctggaagagaaaggtttattgtaaatttggtgcttcgaagctcatgaaaatttatatgctttaattgttccttcatagttactgtcaacgcattggaagacctgatttttggggtggagagtcagaattactggtgagtactctttggtgcataattgtttgataacctgtcttaaattcatcttgttttccttttcagaaaaaaatattactatatatttattggccttttgcaccatttcatttgcccatataactaatctagctggcacaaattcttgcaggtggatttctaggctaattgtttataattttaaccttttgaaccatcgcttctaggtagaaatattttgatgtaatctctatgttcatgttgtggtggaatttggttcttactcttctatgcacttaggaagttgaaatttataattttctttctctacctcttcggtttttgttacatggggaatctcattttgactattccaactctagttgttaaattatctgtatatgcgttgactgttgagcatttgtaatttcccaggtgctatcaaagctgattaggcagccaatcaccgtgtacttgccagagcatgaggtaggctcacgtgttggtgctttatatgtttaatttgtaggcagtaaatagctgtttaaaaagcatggatgtgaaatatataatgcagtatgtcaattagtttttagttaactgaaatatatatgccttaatattagaaactgagatagaaaaatagctaaccataatggtctgatcacaaaagaactcattatctgttataatttctaacttgggatgcaatgcaaatctttgtttctgaagtgtggttgtggaagatagcttaatttcagcttgaacttttgaatgggtaatatcgaatatggttttcttttccatttatggaatgtacattgggagtgagttttctgtgagtaagaaatgatatgaaaaggcgcagtaaggaaggacaaacggatgactggagaagccagaaaaggctttttatttgactattcaaagttttagttttagatggcttggacttgctgattgtggttacttttaattatgctgctactagaatcaaagtcagctcaaatcaccaatcttgtgttccttttctttgaagttattatgaatgaaggtgaaaacactgtcgtttttcgtcaattgcagcatactaggggtggacggggtactggttttataccgatagcagaatatggagctgagtttagcaaaggttcagttacaagaaagccaaaaaaggtggtaagacttttatacaccggtagaaaccactatgatctactcatctgagattagccgaacaaaaaacagacagaatagatatgatgtcattcttattcaaagatgatgaacaagccttaaggaatgccttgtaattttgaattcaattaaattttctgtctttgtatttgtttactaaattttgaattacataatagttaacattttctttcttttatcattagctgttttggttttttattactaataccagagtggtacttggacaaatacttcaacgctaatggtatcattgaaaaataaaagtgcccttcgactcgtcaatggttgtttccagatggcagatgtaatctttctcttttaagtactatttatctttactattgtaatagtagcctgttgggctgatagttattgacccttttgacattttgtcctcataaattaccaaaccccaaagtcagatcaccgaaattcttgtgcgtggggctcacgcgccacctgaaggttctgcgcactttcccacgcatcagagcgtggaggcgcatgtgacgatgtttttgacggtgttcttttgctagttgtttactcagttcttctaagcccacttgcatctatctaaggttgtaatttggtattttttgccttcttcgtatttgggtgttcattctttagtgttctttttcttcattttctttatcaattgtttttgcttttgagattatggcagatataacattagattcgaaatcaattgttgtttttaatgtggttcccgtgatgtttaaaattacggaccataaattgattggttcgaattatttggaatggagtaagacgatttgattgtatttgaggagtattgacaaagatga

SEQ ID NO: 379257 - DNA, 2028 bp, Cannabis indica
ctctctctctctcttctcttcattcattcacacttttcacagttcacactcctatatagctctctctctcaattcaaaatcgaaggcttctctctctctctgtactctcttctcaaaaaccccaccaaaatggccaccttcttcatctccctcgtcttcttcctttgttttctcctctccacctatgctctcacttcaccctcagacatttcagccctcaaggcttttaaagcctccgttaaaccctcttccattccaacttggtcttgtttagcctcctgggacttcgccgccgccgacccatgtgcctcacctcgccggacccatttcacctgcggactcacctgttctcctgactccaaacgagttacccagatcactctcgacccggttggttactctggtacactcaccccactcctttcccaactcacccaactcgctactctcgacctcgctgataactatttctatggcattattccaccttccatatcttctcttgctaatctccaaagcctaactctccgatccaataagttctccgggtcggttccttcctccattaccaaactcaaactcctcgaagctttggacctttcacataattctctttctgggtttcttcccagtaccatgaattggatgtccggattgcgtcgactcgatctgagttacaaccaactcaaagggtcgatccccaaacttccaccgaatttgcttgaactcgctctgaagagaaattcgctatctgggccactctccaaatcgtcgtttgacggttcgactcagttagaagtaatcgaactcagtgagaactcgttcactggaacacttcagagctggttctttctcctaccgtcaattcaacaagttaacttagccaataacagcttgacaggtgtcgagatctcgagccccaccgcaggacaaagcgacctcgtggcggtagatttggggttcaacagaatcgaaggatacgtgcctgttaatttcgcggcgtatcctctgttatcgtcactaactcttaggtacaaccggttacgtggcaaaatcccattggttctcgctcaaaaaaagtcgttaaagagacttttcttagatggaaactttttgatcggtcagccgccagcgagtttgttcggcgggcaggcgccggtctcgggcagcttgggagataattgcctgtggggctgtccagcatcctcacagctgtgcctacctacccagaaacccagttccatatgtaagcaagcctatggtggaaaaaccaaagtcttgaagcctcaatattcttggtcaaatatttcttacttattttatttttaactctgagaaaattaataaaacaatgtataaaatgctttttacaatgtagcaatttgatatatatatatatataaatatttgtattgtacacagttaggaggaagagtatatatataataataataatatatattgattctcttacatcttgatccactgatcacttaaactagaagtttagtgccaaaatttccttttagaacattattatattatcacattacatctccactgtccacatctaattaaacaatttcatcctagtacttaatacttatcttttattttcggccaaatttgaatattgatttggttttttttatatggtttaaaaattatgtgccactcatgatcgtagggtctcaaaattattaattgtaaggtggaccaaatataattaaactaagagaaatatttcaaacctaactaatgctgacaagtttatattcaaggatgaaaatagaaaagagcttttatcaatggctgaatttttcaggaccagtagtgtctgtactcttttcttaattcttttctgaaagtatgtactctgttttttaaatggtcattttttatatgcaattcaagataaaaagaaaaccaataattatgtaaataaaatgtaaattttgggaaagagtgactattatagagttttaaattgaaagtcagattttgcattttgacagactgacacattca

SEQ ID NO: 379258 - DNA, 1594 bp, Cannabis indica
tttacctttcccatctattttagtccacaagcattcttattcggttgttttactttagtgtttctttataatgttcccaatttctgcactttgagaagttgctgtgctttgattccttatgtctgctgatgtttgattgtggacttttgaattttgtgtctcattttagcatttaaaatgagacaagggaatcttacatcaaaccgagcaggtcagtcttttgttatgtatgagaaatgagctgcaatttcggtttggttattctttttgttccaaccttgatgctaacctcccatatggtatagagtttaagagatgaggtgttaactcaatgaacaatcctaaaaatggggtacgaagaagtctttcgattcttcagaatagtgaaaacagttgtaagaatgaagtgaaacttaattctaattcactcctttgttatggcaaaagggcatagtgaattcaccattgctcataatgtcatctcaattgtgcaattcctttttattgagcattgaattctcgagaactagtgtaaaataaccctataggcattgttagaaatcttttacctctatggatttttgtaaccaagatttatctcaagtggataatcatggtcaaaatagactggttagaagtcatatatttgagggctaattagaatttttgcaactattaccactactgcatcatgctaggttaaaaaaatttcccaaactatattaatagtgtggaaatataagacttctgttaagttttatttaagtgactaacaaaatgttgatgtgtaacaacatcagaagaactatgcattattcgggagaatttttaacgggcaaataaaatcagaagacacgatttggtagtatagcctataaaagagctaatcaagttaagtttatgcttacatagtatgttatgagtagagtcttaagaaatcaacatactaagttatgaacttactctcactaggctgttggaagataatttcgacgaaatttgctgatgatctgaatgttggtttttctcagttgcttgttgccgggggcggtatgtacatcgaggttttcaacagaggagtaattccattagcttatggcatcaagaagaagaacaaagctggagaaactaacacttacttggatggtatctatctcctctttacatatttcactaaaccagaatccgttgaagctttcgaaggggtgcttaaaaccgacgacgatgtcatccgatcaatgagcttcaaaataaggaagaggaaatattagttacagtttaatgtcattcctccaattcacatttgtgtagctttttttaagagagaaaatgacaagttttggaagggaaaatttaaatgttctatacttctttgtaatttcatgttgatctaatttccaatgccttgttattaagattctattggtatttttttgtaaacataattggattaatgaaataggacaaaatttgtaattgtttaaagtggtaaatttgaatcatttcattcaagaattgagcccaagtgagtacatattggaactcatttctttctttttagaggaaattacactctataccctttttatattgt

SEQ ID NO: 379259 - DNA, 3659 bp, Cannabis indica
acacgtggcgtccctgagagtcaaggcgttacagtgaatatgttgatccaagcatagtctgacatgctaaccctgttggtcaaggactgtaccacgccaaagctaactgacttagaattgaagtggaggagagggtctgccttctcataagaaatccatgacctcctcatcactcgaaagttcaagatgcatacctacaagatgtacacggataaagaagatcccctgaaacttacaatccttttagcaacctcttgagcagggctatcaagctcccccttcttgttagtgtgtaatttgatccacaagtcacatctattggatgtagtaagttggtggcctaactcttttttcctatcttcttccactttcttaataccacctcgcccccatggtggttaaatttatttttgaccctgactccttgcacatttgctctcaatttttcctattcaggagttaatcttgaagccacaaatgctttccagtcttcaggtttgtagcagccgacgaaattatctaaaggatggtcgagcattttcaagagctttgtctttgtatttataaatgtggttatttgtaactcagttagctacgcacttaacatttgtgagttgtttctctagtaaattagtgatcgctagtgtgagtgtggctgggttaggtcatttttccaggttgctgaggctgggtgctgctcctctggctccgttgcaaccaattacaggcgtggtgggtgactgtctctcctaccaaaaatctcgaggcccaagagtacctataaagttgagtgtgacaggtcaggtagaggttaggcctaactctaaaaatgtttggatccccttgaagacaggaaaggtgggtgaagttgtttttgtgagcttgaaagaatttagctcctgccctgatgaaggagctctgttatagggaaagaggtctgggaacttacctattttagggacgaatttgaattcaagactgaggtctacttgtgatttgggcactggtgtaaacaatgtattcggctcggtggagtctaatgggctttgtcgtgggtccgtggttagtatgaatcaattgaatgaaaagggtaagaagatgggcctagttctaggtggacccagaagtgagaattttaatggattcatttatggactttgtgtagctcttgttgttaggccatctctttttcaaacctcttgtaatggcgtcatgtgtagttctaagcaaggactatattgcaaagatctagggagttctaatttgagccatgattgctcagagcacttagatgaaaagatttccacggagaattttttgtaatgactgcataggcaattagcattgattattgacttttttataattaattataattttattatgttgtgggtcccaattttagaaatgggcactagagttataatttttcaattctagagattttattaaactctaggagtattatttacgttaaatatgaattatgtaatttttatgatttttgctcggtgacgacagaaattgcgatggatgcccatttgagtcacatgtgtaagtctagaatctttttcttagtgggacaaatgtttgagatattacaaataccgtgtgtaagcggtgttctggattttgaccattttactcctaggcttatttggattggaaattgggttttagctttgagaatatttgtatctccaaaaattagattttgggtattgtttattctaacccatgtgaatacccctggctcttgtcttgtgtctatggttttccttattttcataagaaaataagttttgtccagacattatggggttgggtaagcattttggtggtgcctagatgattcttggcaatgttaattttataattaactcctcgtatcaagttggctcaattgggagtaatcaatttaggcctttcatcgctgacctcctaaacaaaaatagtttgattgacatgcccattaaaggagataatttaacttgggacaattatagagagtgttcagcgcacatcatatttgtgctagacaaatccatagtggatgagagatggatccatttgttctcaaaagccgttgttcagtctttacaaacaagttactcggataaatgagaatctcaaacataaagtgttatattggcaacaaagagcccgagttaactggattaaagatggggataaattcttcgagtttttcttcatctcggccaccattaggaaccaaaagaattcaattggtagtattctagataggaatgattgttgggttacttccagaggggaaactgggagagtgtgtactgagtacttgggtgggactttctcaaacccgcccactggcctctagactgtctagaaccttttattccagatcacctctctcctcttgagcaagatgagttgagcagaatcccagatcttgaagagatccgtcaaacgctcttttctatgaggagcttagaagctccaggcaatgatcgaatgtcagtgctattctttaagcactaatgggacactgcgggactggatttctgtgaggcggtgttggacttcttacaactgataccatgcacaagaacattaatgtttccaatatagtgttaattccaaaagttcccaatctaaagaaggcgtcccaattccgatcgatctcccttttgcaatatggtttataataaggtgatatctaaagtcacttccaattggattagacccttcctaccgagattgatttgtccaaatcaagcggctttttttcctagtaggaatattcttgataataatattttagttcaagagataatccactattttaaaaagaagaatggaagagaaggcttatttgatttaaagattgatcttgttaaggcgtatgataacgtaagctgacaatctatagaacacctatatttgttttgtaacttttcctcacacctttggaaaggcttccccttcgggcctaatttcgataattgattcaggtggtcgtatgtgggactgggtgcaattcctttagggtctccattctaaggatgcggttatggaagaagtattcatgtttgcttctattgtggtggacaccagttggcaatctcgtaattacaaggtacataataataatctgaataacatcaaatattatattgattctatcactcattgttatgcaaattatggatcatctttatttctacttgctctggatgatgtcccaccactttggtcccctcctcctgatgattggatcaagattaattatgatgtaaaagtggggagtgggtcgatgtgtgccgtagcgttggctcgagaccatgcgagaactatgttgtgggttgcttctaagtcttttgcctactctaatcccttgattggggaagcagaggcctgtgtgctagcacttcagatggcaactgcatggaggcacaattttgttatcattgagagcaattcgaaaattattatcaaagctttgattgggaattcatctaactagcgtattgataattttgtattttttggtaataaattatcacgtagttttttggattgtaattttacttttattttgagactatataattttgctgctcacaatgttgttaggtgagttctttctaagaatcttacaggtatgattaatgtgtcaa

SEQ ID NO: 379260 - DNA, 3719 bp, Cannabis indica
ataataaaaatttgtataatcaacatgtaatttgcttcatcaagggttttagaatcgagttttggcttagatttgattgattagtttgtatttcgtttgtaatatttagttttgatttgggatcctaaaaatatttgttcttgacaattacagggtttgtctaggtttagtatatgtgttaaaacaaattttatatattttatgaatattttcagttgaagaatttaggtttgcttaggtttaatcattcaaaaaaaaaaacttttgatcttattcaaagtctgaatttagtttgtttaattgatttcagtttttcagtttgagtttgttttttaattcaaagaaaaaacaatagaaaagaaataaaggttaaaaaataaaaattatttgattgtatttatatttttgtttatttttttataattttttaaacatttaaataataaataaaaaaattactaacatggaccaataatcgaataagtggatactaacatgacacttaacggtcaagtatttatggaagttccacaatagtaatgaaagatatttttaatgcgaaaaatacaacttagatatttatctgttactcggcataaaattgaaatatgtatgccgcaagttactctatttttttttggtgaataggtaattttccttctgtaggtgtaaattgttagagtttatattgtttttcaatgcattttatttcttgaattgatttggtttctgggatgtttatttatatggtggattctctgaatgttctcttttcccttctatcatataaaacaaaagatatggaaccatagatgagctgaaggagattgtgaataaattccatcaagttggtatcaaagttcttggagatgctgtcttaaatcatcgttgtgcacactataagaatcaaaatggtgtttggaacatttttggtggtcgtttaaattgggatgaccgtgcagttgttgctgatgacccacattttcaggtataatatttcctttgtttcaaactgagatatttgttggaattagtgatcttttttgatttctttcttttatttattttgttcgcaaaagattggaataaactgtccttccaccattgcaagtctcgtttttgcttccctcatttcctaatgtgacatgatttttcttcctctcttattcagggtaggggcaacaagagtagtggagataattttcatgctgctccaaatattgaccattcacaagattttgtgaggaaagatatcaaggagtggttgtgctggctaaggtagtgcatagataagttctcccattccctaaattcttatggtcacattttgtttttgtacatgaaaacacaaatatgtatgaaattgggtttcagatagtaatcgtggatgtcttattgcaataaattttcatctttatgtgacctacaggaaagaaattggctatgacggatggagacttgattttgttagaggattctggggtggttatgtcaaggactatttggatgctagtgagccgtactttgctgtaggtgagtactgggattcacttagttacacatatggagagatggatcacaaccaagatgcacataggcagagaattattgactggattaatgctacaagtggaactgctggtgcattcgatgtcacaacaaaaggaattcttcatgcggtgagcatttcatctagtagagaaaaaaatgaaatggttttattctctgcgtaaaatatgtggagtggcaattagagacgtactcatagtagtaatccttttgctatttccatcacaggtgtacagccactgtttaattataagaatatatgaattttgataaaatatatttattttcccatataggcactggatagatgtgagtattggcgattatcagatcagaaggggaagcctccgggggttgttggatggtggccttctcgtgccgtcacattcatagagaatcatgacactggttctactcaggttggatttcctctattcattctgtcagtcatttttctttaagaggaaggtctaaactgattgtaatatttctatttgaacaaaatcatctgagcattgaacctaacaaacacctgctgttgaacttttgtaaataagcattgtgctcgtagtcctgaaatgcagtgcttctttagtttcagatatttatgtttgaatgttctttctttgtgaagggtcattggaggtttcctggcggaaaagaaatgcaaggatatgcatacattctgacccatccaggcactccatcagtgttttatgaccacattttctcccactgccaatctgaaattggaggtctaatctccattagaaatcggaacaaaatcaactgccgcagtacagtaagtatcaaactatgaaactcattttctcaagttatgacttataaagcaatggctatcaaaacactattaattttctgatgcttttgtgatcagattaaaattacgaaagcagaaagagatgtttatgcagccatcattgatgaaaaagttgcaatgaagattggaccaggtcattacgaaccccacagtgaatctcaaaagtggtctctggctatggagggaagagactataaggtctgggaagcatccggctaaattttggaggtggggtgttttgtattattcaattatggaagtttcaaaaaaaaaaaaaacaaattatgtgaagtttgattaaatgaggcgtccggataggagtttttcctaaattatatctaaacagtaaactactgccttgtgaattgtgatggtggtgctgccatgtttttcctgacgtggaagaagctcaagaaactcgttcttctgtctgggaaccaagtacaacacttgctgtgtcagtcaggtaatgtaatgggtgtgatcagtaatgtataaatataaataataatgttatcagtaggtcttatttcgctttattaaccattgttgtaacaatgtattgtaaacaagtcattggtaattaaagagctaccatgtatcattgctattatgcattattaaggctgtacatttcatccaattcgcattattttgttacattcaatctgcatgaagtgttcattttatattttagatacaatccaatctgcatataaactcaaattcaattcaatccaatcggcaaaagtatggattaaattaattattttgaattagttattttttaatattaaattatttaatatttattaaaaatatatatattttttacataactaacaataaataaaataaattattattattttatgtctccaacaaaaaatttaaataaataaaacaaaaaataaaagtaaagtatagaaaagaattatacgcataaagaaatgttaaattttattttagattatatttttcttgtaaataataatggaatatatatttgacatcctaaataccatatttcatgaaagtaaatcattaccatgctctgaggccagttgtgggaatattttacctgtatctagatttactaacaagtatgttgattaatatcctaaatacgaattctttaaaataatgaaaataaacacataaaggtttaagaaaactttacattgattgcagcggaatatgactccatccgttcaagatttctagcccttgattcctttctgtagcagagcattatcaagatttgcacctggatttccttctctccttcgggtttggttaccaccgtctt

SEQ ID NO: 379261 - DNA, 4431 bp, Cannabis indica
cgacgatgatattgacgatgatcagtcgatcttcaccgacgaatagatcagccttgtgaaccagaaacatgcgtagaaaccgattgtgccggtcaggacaaagaaagcgtacgaaccaatcagcatgtatccgaaatacaaggcaccggaaactggctttgtgatgtcaagcttggtgaagaaatagaatgcagcatagaggaaaaggtagagtgctgaagagcctgaagtcaagtaagacctccaccaccaaagatagtcttcgctgcatagttggaagtagcagagcacaatggtgatctcggcgcaagtgatgatgaggatgatgaaaacgatgaatagaaacccgaatatgtagtagaattggtgtagccatattgaggtaagaatgaagaagagctcgatgaaaactgcgccaaatgggagtatgcctccgattaggatagagaaggctgagttcatgtaccaagcctgttctggaatctgtcttgggatcttgtttgtttttacgggatcctcaattgctggctttttgaaaccaatgtaggaaccgacaaagactagaggaactgagattccgaaccataaaaataccaaagcaaacatggttccgaagggaactgctcccgatgatttctcaccccaaattaaagcgttcaaaacgaagaaaatggcgaagagagttgcaggaaataggaaagctgtttttagagtaattttcttccattctgttcccttgaacattttataaagccgtgcagatgaatatcctgcaaaaatgcccataaagacccaaaggaggagcatggctgtcatcagcccacctcggttggagggggagaggaatccaagggcagcaaagatcatggtgactagaatcatcccaaagaactgtacccctgtcccaacgtatacacacagtaaatctgagttcacaggaggccggaaaacatctccatggacaagtttccatcctgtctcttcttgggcttcttcttgggtctcaagctggttgtacttggagatatcgcggtatagtgttcgcaacatgatcatagctaccatgccggacaagaaaagaacaatcatcaaagagttaacaattgagaaccagtgaatttgatcatcagccattagaagataagtatcccaacgagatgcccacttcacatcactctcctaagagattcaacaaaacaacaggcattcagaaataagtacagcagaatatgattctagaagaaagtcaagaagctcttaaaaatataagattttactacaaaatgacctcccattacgtttatattaatgtttataatgttaacaagatctttataagcttagttacttaccacaaaatcgatatcataagtaaatatgatttccttcttatcctcaacctcctgaggagtttcagagtttgtaactgtcttccttgagtgaggatcacatgttgatagacgtgtagtatcagtccacttgccatcataggcatgcttgacactaaatttgaaaaagaaaaaaaaacattcccgtcaaaacaacataaaccaccacaaagaagaataagaataagggaataaaagtcataaattttaacctgtatggcttgacctcaaatcctacaatcctggctaattctgttattggatctctgtgatatttgactgtaaatgctaagtgattgtgaataaaatgtttttcctctttgctctgtatacaaatacgtttgaatttgttagataatcacattaaaaatcattgcataacccataaaacctatcattggtctggaacgtaccccagcatactgtcccctaagaccaatatgatagccatgttgatacacgatggaagattctgtatcaattcttcgaatgggaacaaccagaggtagattatccagaatcctgtcatatgtagccacgatcattagaaaaacataccaaccccaattaaaatgactgtgcaaacaaagaagataatcttagatcctcacatgttcacgcggtactcgtcatctatcttttccttgaatgccttggcagttttcgcatcaagagtaatacggcagagaacattacacatctgtggttctctcattttaaactgcaccaaaacaccaaattatgtcagctgctaaaccactaaaccaaaaactagcaaaggaagttcaaccaaaaaactaaaataacctcataaggagagttttcaattcggtcaccacggaggacttcgccaagattctctgcactgtcaactatgtgctgtggacgacagtaagggagggaatagtacgagtaaggcaactgtgtttttgtagatgtcaatttgttaactttcactctcaacggatccccctgcaatagtaaaataacataaaaagttaaaacacagtgatattcttaccatagagacaaccgctgaggatccaagcaaggactaatatccaactgcttcctccccaactgaggcgaggaattagcctcatcaactcattgtataacacatataaaacctctgatccaatcaattttcagaatttgaaacgctagtaacatatagagacaacatgtacaggtttatgtgcagttagcattatgatatatctaaatagatattataagcgatagatacttttacaaatcttagggcattttacaaaatccaaaccataaattctccggccaaaaaaccgcatcaaagcaataacatctccatcaaatccttatattaacacaaacataacatagatctcaataaaattacacgagaaaggaccaaaaatctcaacaccgacacatcaaacctagctcggatctgaatgccactaactaacacaccacaaaataaccaagatctagccctaaattcaaccataatcgtatacacacacgcttatattcacataaactaatcaaattaaatccatgcatgaatcatgtatacataaatacgcaaacacattcatcaatacgtaattgtagaaatgaggaagagctaaccttctgaaaatcctgaggagcgacaccagggaggtaaaagcaatgaacatggcataagagcatagcacacaaacagatccatagctgaaaagctagagttcctctcgccatggcttcaacggtggagagagatccagatctcaatcacactcaccttcttctcttctccttctccgctctctctctctctctctctactaaatgcgtattttgtatcagtctctctgtgaatatcgcgtaaagttttattttttaccttaaagcacgagaagaacgagacagcttctttctctctctgaagcaaattattttgggattaagtaaaattaataattaataaaataaaataacttcaatttatggccgtccgatcatatctgtagtatatctgaccgtccaccgcttgacggtgatcaatttttctctctctctcatgggtaatttggtaatttcatagtatctggtcaaattttatgttgcttgacattactttaaaataacaaatcttcattaattttggatttgtaattgaaaaaataaatattaaggtaagatatcacttacattaaattattaatcaaaaaaataaacttctttcttgggttagttatagatcttcctatgatatttttggtgacattttatttttattttctcaagaaaaaaatcctattttttgttggtaagaatttgtttggccatttcttaatagaatcctaaatcactgtctttaattatggtattttttattcccttttttgaccatcttaaatcaagaattttttttttaatcattggcattttgcctgatttttttttcaattaataaaaaagaagtcacatattgatataaactagtaaaatgcattagttaagaataaataccccttttgtttttaataaagagtaataataaatgaaggaataacttctttatgcccttttgcctttcttaaaagaactcataaatacatacatatatacaatgaaaaaaaaaagactagatttaaatggctttttcttttttcacaaaaaaaggaaagaaaagataaaagagagaagtagaagaagaaaagacattaacaacccaacaacatattttttttaaacaaaccaacaacatattttttttaaacaaaccaacaacatataagtattacctacttataatttaaataatgtaacattactagtatatttccctcaaaaaaaaaaaaacattactagtatagttttagtgttaagtaaatttcgtcactaatatatggatcttacattttacaaacatacagaactactagttagcctctcattcatattgggttgggtcttaaagcaattgagtcttagaaaaaaaatttaattattagacttgttataattacatcatatattgaaatttttaacttttttacttttatactgt

SEQ ID NO: 379262 - DNA, 1576 bp, Cannabis indica
atatagaaataaattgttaaaatgaattatttatctcattatcaattgattatgaaattaataacatgtaccttaatcacacacttcttagactaaacaacggacctaaagcctattgagctttagtcgtatgtcacgtctcttgtccagagatgcgggtaacaccaataaaatacatgaaggatataaatcaattagtatacatagacgaagaattactagtttacatgaaatccaaacaaaatcacatctacacaacttatgaatctacttctctagttatattatttttattttgttaaataatttagtgatataacactaaacagataaaaaacaaatgcataataataatctaaggatgaataacaaaaatatatatatttagagctaatttttttaatattaattgggtgggtagtttaagtattaaattaactttgaactgcaactatatatgtgacttataaacatataagcaaattgaatcaacaaaatttaagtgaaaagaatattagcaagtattttacacagtgtttgagataatttaaaaaataaaaaaataaaataaatcattggacaaaactcttggagagttatagacttatagttgagatatggtaaaagatgctatttatttttgtaattaatattcctcactcttcattcctatcttaacaaactatttcttttttaaaatataaaaagaaagatagaagttaaaggcttattaaaaaggccacgagctgtgtttcatgatccaatcataacatcaacttgtgagccctttgccagttatattagtaaatgccctttcgcctattggctagtgcctagtgcttaagtgccaaagtttccttctttctttcttattattagtaatagtagtagttgttgttgttggtagctccttactatattttattgttattatctataatctatgggactatgataaatttctattttcttttgttttaatttctcactactcaaccaactcaaagtgaaagaaaataaataaaatagaaattgatttgattttatttgtttagtatacccaacttaaagtactccacaaactcaatatgcataattatgatgatcattaagatgaaaatgaagaaaccataatttgtatagaagaagaagaaggaaaggaaagagttgaaaagttagaccgaaagttttgaaaagaagggataattaaaagtgagggtggcataatgaatgaatgaagttgcaattgagagcagcaacagcaagggtagaggtgggccccacctaatgagctctactattactatttctataccttgcgttaggattaaactttctttctccttccttcttcctttgtccttccaccaattcttatcatcattacatattattattactattataatattgtactagtagtagtatctctcgtttaaacattttttattctttagaaaaatagagatatcgattaaacatggccatcttaaagtgatgagaggcacatgaacgacatttgaaacgagacattttttttaataaaaattaaaaataaattttaattaaattttga

SEQ ID NO: 379263 - DNA, 4326 bp, Cannabis indica
ctttccttttcattgttctctttgaaaggagagagtgttttgtctggtcagcacaattgcccttgttccatctctctctttctctctctccttttgatgataaaatttagaaaagcctgtgtgtatggatagttgattgtgagctttcttacttagctctataacaatacaagaaaggaaaagaagcaaaatttgttaggagaaagaagtcaatcagtcatggggcaaggcaatccattatttttcccatcttttgatgaactttgatattttcaaccccaattggctattttcattttctttttccttatataaaaaaataaataaatcattatcatcattagtaggagagttgcttaattattctttgctttttaaaaagtcacctctttgcttgtttaatttcccattatgtcctcctcctcaccccatcatggtttgaccaccataactctgactttctttttaagtaggcttagctggtttacctaaaaaataaaactcttactagttatttatgagttgttatgaccaaataaatgaaatctaataagagttctcgatattgggaattatgttgtattccaagttcatctttttatgcatagtctctctagtagtggggctgcatgggcacagtagtagtgtcagcatagatgctacagtgtttttgtacacccaagaaaccttaaatattattttaagcatgttctcatctcaccttgctttttcttaaaagggggatttggattgggatgttaccccatgatgattttggaaagactttcaagatgtacttttttgtattttattctgttgaaaatcagtgttatttaacaacttagttagttcctctatactagccagtagccaggtagaacaagtgtagaaatttgaattaaagttgaagctgttatttaataaaatttctaacagaattgctaaaaagcaccactggtgcctagtacccttctcggtgtcatactgctattggtgtaattaagtatcgagtcccatataacttaagaaaataacttttaggggatatcgctaaccaatcgtaagatgccacatagctcattttctaattatcatctaacctgagaattaatattatactgatctgtacatgtgacaaacatttttacttaataatgatttttgaaacattagcaatgtgagtttttgtaaaattagtgatatgaggttttttcacattgggttttaaatatggcatctttgactttgagaacacgtggaattctcgcgtttttttcccctaatattagggaggagggattcgaacttgggacttccggtaaggagaggtgcgaaatcactagactatgcttatgactgtcagtgactcgcactttttgttttgataggaataatggtttgctgtttgtactttgttgggttgtactcaaacattacgcggaattggagcaaagtgttttattagaagaaatttacataatagatgaaaaatttgaaaaaaaaaatacaaaactgtttttttcttgttgttgttttatagttgttatttggttgttttttttgttgttctgtagttgtcgtgaggttgatttctcgttggtttataattaatttcttatattttgctgagaaatgtatatttttgtaattttaaaactttaaaagcgtattcttgtaggtcgtaaaattataaataaaacattaaatagtgtatttttgaaaatttcaaactttaagtaggaaactagaataattagctgtagaagatgtaacatgataaaaataagtatgtgtaaactgcaatgaataatagtttagtggtttgatatgcatgcacattggcatcatatcattttgctagagttgtatctatttgtgtatgtaaatagtagtgagctatggtatgctcttttcaatcttcttgatgctaatcaatggtttattctgctaattcatgtgagatattaagaaagtgaaaaatatttacattaatctatgcttatctttgttaaacagaggacctgtgcaatatgtctgggcaccatgaaacctggtcagggccatgccattttcactgcagaatgctcacattcatttcacttccactgcattacctcgaatgtaaaacacgggaaccaaatatgtccagtttgtcgggctaaatggaaagaagtgccctttcagaacccttctactctatccaatggaccctctagaattaacccagctccctggcctcaagatgatccatggatgactgttgtacggcgtcttccttctgtaaggatggatacaccccgacagattgcttcactgttccatgctcccgagccagtcgtttttgaagatgatgaagtattagatcaacaacccgagattaatgacagagtaacatctaatgtagatgctgttgttgctgttgctaataacaatcgaaatcatactgtagaagtcaagacatatcctgaggttttagctgttccaagattatctcctcacaataacttcactgtgttgattcaccttaaggctcctcttatttcaagcccgaatagtggtaatccaatggaaatgcctcctccgacatctcaagatcctcgtgctccagttgaccttgtcacggtgcttgatgttagtggcagcatggctggaacaaagcttgctttgttgaaacgagctatgggatttgttgtgcagaatctcggtccctctgaccgactttctgtcattgctttctcctcaacagctcgtcgtctctttcctcttcgtcgtatgactgaaagtggaaggcagcaggcattacaagctgttaattctttagtttcaaatggtgggacgaacatcgctgaagcccttagaaaaggtgccaaagtgcttgtggatcgcaagtgtaagaacccggtttgcagtatcatactactctctgatggccaagatacatatacggtcagtggtcccattgggaacaatcagcggtcgaactatcagtctcttcttcctatctcgattcatcgaaacaatggtgctggcttgcaggttccagttcacgcgtttggatttggttctgatcacgatgcttcctcgatgcacacgatctctgagaattctggaggaacattttcgttcatagaagctgagagcgtgattcaagacgcatttgcacaatgcattggtgggctgctgagtgtggtagtacaagagcttcgggttgaagttgaatgtgttcatcctcattcccaattaagttctataaaaggcggtagttatcagacaacaatagtggctgatgcaagaactggttccatcaaagttggagacttgtatgctgaagaagaaagggattttctagtgtcactgaatgttccagtagacgaatcttcagagacttcattgctaacagtaagatgtatttacaaagatccaatcaccaaagaaatggtttcacaagaagctaataacttgaagatccaaagaccagaagtggccagacaacagctagtttcaattgaagtagacaggcagaggaatagggtgcgagctgcagaggcaatggccgaggctagagctgcagccgagaatggtgatttaactgctgcagtctcagtccttgagagctgtcgtagagctttatccgaaactgtctctatgcaaacaggtgaccggttatgtgtagcactttgtgctgaactaaaagagatgcaagaaagaatggcgaatcgtcgtgtgtacgaggaatcaggacgagcatacgtgttatcaggattaagctcacactcatggcaaagggcaacagcaagaggcgattcaacagacagtacaagccttgttcaaagttaccaaaccccatcaatgacagacatggtaaaccggtctcaaaccatggttttcggtaaccctcctcagagaagcctacaacctactcattcatttccaagccgaacaaggccaaggtaaaatcaaagaagctgtctttttgaaaagagaaaaaaaaaacaacaactcaaaccttaattcaattacattcctatattaaatatagatggaccattttagtttcattaaaatgttaaatttttgttgtggtattttggaaagtttgggggatataagaggagagatagagagagttttggtatatttgtccttgtttttggtaatgtatatgaataagaaattgttgggaaaacaaaggtgaagataattggggtgtggtggtagtaaacaattgtgcaaaaggaagagaaattgttattttagattttgtacagaaaccaactatttatttttttttatttatttctttcttaatattgttattattttttt

SEQ ID NO: 379264 - DNA, 3515 bp, Cannabis indica
agttgtgaatttaaattttttgagttcattgctctagtttactatgaaaaactacacgaacgctcaagacagaatcagaatcggataagcagaacctaacgcaccaagtcatacatcaacctaggcgttgggtgctcttttcggagcttctgagatgtcgttttgatgcttctaagtctttgaaattgaggatgaggtctcctaccccaatttgacaatgccgaagagaatgtctggagcattatttatatttgagtgacagattccaatgcaccaatttgattgttaacttgggctcaacttttagctcttcaggactcgttttctccctgagtttacttgtatttttgttatttctaatgaaggaaaaaatgcccataacactttttcagataaatgattagaaacggcccaagttgacaaaatgtcaacctaggggctaggcccaacgctaggtgtcaacttggctactgggtgcagtttctggccaccaaatggctctgtttgattcctagaaacacttgtatcttaatctttgacaaaaacaaagaatatgctcgagatatttcttataaaactccttggaaatggcccaagttgacaaaatgtcaacttgggtgctgggcccatcgcctatgtcaacctaggcgatgggtcctcatcctggcctctaggttgatctgtttctccttcgaaagtatttgtttcctcgttttggatgaacacgaaaatgctcaagaaagttcttcagtttgatgattggaagtgccccaaattgacaatatgtcaacctgagcattgggtgcctgggacaactggtgctccaggtgctcaattttgaagttactccgaatctaatttttatgcctcaaatatgttcgtgacatgtctaatttatgtctcagtacaaagttttaccaattttcactaagacattccgaaaattgaaatcctagttggaacgttaacctaagtgctgggtgaaacctaggtgcctgacttctggggtattgtttcatgtatttttagcaataaatcaattaatataaatatatatatatatatatatatattatacataaattcaaaattagcttattaaatcgaatatttttgtcacattaaatatactaaaaatcgaattaataatttggaggaaaaaaatattcatttctaccatgttagtgtaaacaagaaaattaggactttataattaataatcatttgtttttactgtgctgtgattaattttttgtgccaagcgcatgacataaaactgaggaagaagaagcaaatttatagtattaatactgatattattgaaagaaaatttagaaaaacatatttgataaaattttattattattctatttttaaacaaaatataaatttctttatacacataatttttaaatcaaaaattgtgtgtttatatatttcaagtaccaaacaaaggttgaaattgtacattatccgattccaagacatgagattgatgaagttgatccaaggccataggtgaaggaatgtcctcaacctctcttttgggcttaacccatctcccatgatcattacaaacaagtcctttatgagctaattggtaccaacattgtgggattctaagcttatcaactaacatatcacatcccttgttaactaatgcaacatctctcctagcattgtctctaaatggtgtcgtatgactcaagaaaccatccacaagatgcaagtaagtctccaaactatgaaacccagctaaattaattccatgctttaagtaaggagatgacttaacatccagctttaactcagctccaacatgagtataaacccattcaagagtccccataatgtcctcaagtttctctaaactctcattcaaaacaagccccggcattctatgaaccatgtcttgtttgatcacaactctcagcgttctaacgcccatgtcatgaatctcgtctctaaacgcgtggttcccaactctcggtgctccaaaggagattacgctgatgctaacctcctttggaagagttgctgcagcctcgtaggcgtttagaagagctaaagcgcccccaaggctgtggccagttatagtgacactaacttcctcacccttttgtctatacatttcaacaagctttttcacttctttcattacttgttccgaagcactagacttattgtacctagtggattcactcttagaagagtaaatgctcaaaaacccatgttcaactttcgcttctctattcccaattggctccaattttctcttaaaatcttcgtaccattcggaaggcgccaccgttcctcgccacgccacaacaatgtctctccggccaatccttcgcgactcgtcgtcatcgctcaccgccacatatcccatccaattggagtccttactccacgttgaatcaaccaaattggatctctgtagccaagtgggaacatcaatgtgcgaagacattgcgtaaatgtacttagtaacattatacccatttttggtcaaacccaatttatcgaacaggtggtgtgcattatacctacaactcccgcaatactcagaaaacgaatcgaaatcgaaagcgtcgtaagtggcctgagcaaactcgccgtacttaacgatttctcgcctcaaccaagggtgaagagggtttagtagagcatcctcttcctcccaaccgccgtggaaaccatggatttcccgccatttttgggcgatcacctcttttggggaagtggtcggagtggagtgtttctcatccgggaaagaatcccagtttgagggattttctgcggcgacggcggatgtgggcggagtttggatttgaaggtggaaaaagttggagagggagttggcgaatcgtagggttgagttattattggtggagaatggacggtggagatgcaggggttggggttgagacccagtgatggagacggtgtcgttttgggtgggaatatggttgaagatggtcgtagaagatagagccatggattgtatgaaatggttgaattgaaattgtagtgtatatttatagatttgatcaaaaaatttaaataatcaatcacgcggggttgatatagtagttgaaagttaccaatttaataatgctttgactaattattttgtgggctttattttatgagcatttgggtactagtactttctagacatgtcgtcttgtcagtggctattaaaattcactaaaagttattatattaaactaaagggatattggcggctaaaccacctgaactttacggtttgtaacacttaaccacaaaaactgaatttttggcggctaaactacctaaaccctggttccgttttgctctgcacacctccgtccaaaaatcacagttaagtgccacggtggactgtccacgtgtacacacttgtacacgtggcaaatttttagtggtccacgtaattttatttttaaaaaataattataaatatttaaaaaaattaaaaaaaacaaatttataaaaattaaaaaaaaaaaaaa

SEQ ID NO: 379265 - DNA, 2305 bp, Cannabis indica
actaaacttcatatttgcaacctacttcgagtactcaataaagcaattgaaatcaaacatatggtattagagcaaaccttttctctttttttgagatctgcctcccatgttgcaagttctttagcttttgagttagaatcctataaacaaggaaacaattaaaattcttctagctctcccaaaacttaattatagcatgtaattaaactagcgaccaagcaacttcttacattcattgtgtccaatggtatatcaactgtcgcatcgtgtttctgcccatatcccaatgaatcagatgcagctggaggaacacgtgcctttgaaacaccattctgaaaatgattcacaatatggcatgatggaatatgttaaatggtaatcacaatatataaatatatatatcataacactgaatttcaagactgatcaaataaattactttgaaaaatctgtaatcctgtaatcaaggaaacataaataaatataaacttcctttaaaaactaatctatatgcacttatcacagctcacagctcacagctcagaagaatatgactacaaaattttcatatcaataaagaaaatcattttacaaggaaatttccgcataaaaacaaaaaaaaaatcataaaagttgtttcccacttttagacatttgtaaaattcagtacattagagaatgaaaacaatttctctgcatgtccaaaatccaaaagattacacctcaatgtaaattagtttttatttatgtattgtttccattatgcaagtggtgacaaactgctccatgtcatgcaaccggtgaattgttaatattttctacatggcagatgtatatcactggatccaagttttcatcaaggctagtccaattttaagaccctaattcatttccaataattaattggataacacggtgtcttaaaattttaaacacacaacataaagttattttaaatataaaattgtaactaattaggcacttacgaatttttatatggtggtgtcgttcattggagagggattgaaatacaaccccacctattttagtgtcagataagttgagacaatcttcggcccagtatgagtttgtagatttaaacgaaaaatgatagataataacagaataatcgcggcggcagaacttatcaaaaatcaaactagctgttcttttcttcttttagttatgttcatttcgcataaaaatctgttcaaatctagtttcctaattagcactgaagtggagtgcactcaaagcaaatgcgggttcaaaatttctaaatcaagatctgaattttcttttaatctccccaatacgataaatttaaatcccttcttccggctcctaatttcggttacaaaacaaagggcttccagatccagattacaaaaaagcactactgaaatctaaccaaatcaaataaaaccctaaaaatagagttaaaaaaaagtaaagatcttgagaagaaccaatggcttgaaaaagaaagagaaaaatgaagtggcaaattaccgaaaagggattgacctccacttcctcttcgtcaaagggatttggatcgtggtgccgattcatggtgttgtccccgactcctaagctttcgttcccaaaattctagagagagaaaatagagagagagtgagttgagtgcgacactgcgttaaaacaccttctaccaacggcgcgggatctcgtttttgtaaaaatttacaacgaattctattttaatttttttatgtgagttactactacccctaccgcaacacatatttacgccttacgcccttccgtaatctcctgttactttattacacataattctctgtcagtgcgtgtctaacattgttgttccactgaccactcaatgaacgacgcgtggattctaagatcctatgtgtacacgcggcatacatatattagctatataattatgagtttgggtgtgtttgataattctttttaattttttgatttcaaatttcaaatcattaaactcttatttgtcttaagtttaacggaattgttacgcattccttttgaatatgtatggcccgcaaccaactagaaaatgtcaaaataaaattacttactttcttttaacacattgtttgcctgcttggtaatttgattaaggctgttaggaaagaaaaaaaaagtaggaaaataaattgtggacttaaaaaaaattatttttcaagattgatatgaaaaattttgttaaattaagttttctttgtaatttttctttggagaattactccatatactatttttttaactttttttcaaatttacgatttggatt

SEQ ID NO: 379266 - DNA, 1268 bp, Cannabis indica
ctaattttattaaatgttagatttatcaagattgatgttttagtagcagattgttaaactggttcatgtcctttttttttcaaacatctaagtgattctttgatttagggatttttttgaagtgacttataaatgaatgttttgggggaatgatcaagcataggtgaaattatcagaataacttatcattttacattgggtcacccttaatggttgctcactgtatattttagtatcatgagcttccagccttccacaaatgtcatattattcctttaaaaattgtttaattaatgttttttcgaaaaccatagtgctcaattgctcataatgtttctatttttcagtcggtattcttttttcttttaatactaatactgaggataataaacttttatcacagaagttacttgggttgtataatgattaggcatgacttaaactgtttatgttccattatgcagaaatggagcaagggtaagcaaaaggagaaggttaacaacatggttctcttcgaccaggcaacttatgacaagcttttgagtgaagctcccaagtacaagcttatcactccatcgatcttgtctgataggttgagggtaagttattaaagaaaatggtgttaattgtgtttgtcaatgctaacacacctgttaaatttgtttatttacttgtttgtgcggtttaatctttttgtgtgtggaatatcttcaaggggatagcttttgaaatctttttgtggattagtatcatctgttcatatctttacttgtttgaaagcatagttgcgaacagaaataacacaagatattcttataatgcgtacatgcaatggatttttccaattttggttggaaactgcattatgttctttaaaatattctaggttgcaaactatatgtatttagtatttttgttatttggtaagtaagagttgaagtatatgcttggggaatgagttgtgattggcaaactattgtgcaagtttgttagctatttttaggagttaagttttgagagaataaagaaaatacgctagtagtgtgaattaaggaatttgtgttgcttcaaatttaatattttgtattattttgcattcagattaatggatcactagctcgcagagcaatcaaggatttgatggcgaggggtttgattaggatgatttctgctcactccagtcaacagatctacaccagggccaccaacacctgatttccaagatgataagctacttcaacgctctacttttgttttgttttgttttt

SEQ ID NO: 379267 - DNA, 5954 bp, Cannabis indica
ttttttttttttttcatattccttattattttattttcttaatcttgataattttttcgaagaaattgaggtggccgataaactaatatttagacagaaaaaaagtaaaaaggatcctattttataaattatacatcagggcttgatttttcatttttatttttcaattggacgtggaattctaaaacttatttatggctactgtttttttatatttagtttcaacttggcattagtattggctaaatttgactttggttaacataggtttatctggtgaggcgtggtaatgtagtggcatgttggttgttgaaaagttttggtttgatagcatagcaggcctttaataagtactgcttgtagctctaaagtatgtcttcagaatcgtctattacttctagtaataaactgttactgatatttatagttgtttataacattttaggtgaaagagaaaatgggacaagccttaggctgtgttcaagtggatcagtctaacgttgctattaaggaaacatttgggaagtttgatgatatacttgaaccaggatgtcattgtgtgccctggtttttcggaagcaacctggctgggcagctctcgcttcgtgttcagcagctagatgtccgttgtgaaacaaagacaaaggttgtgtggcatataattcttcatgccttatatgtttaattattactaattagctttatagtgcttaaataagaatttcgcagcaacaccatatttatgaaagcaaacagagtagggtgcgatcttggaagcttctttattgttgaatactaacatttaacaattttagcagcatcaaaacaattggatagactaacaaggatgtatattgcaatttctatgttttagttacaaatattttgctcatgttgatccattgtattcttcaggataatgtctttgtcactgttgtagcttctattcaataccgtgctatagcagagaaggcttctgatgcattctataagctcagcaataccagagcacagatccaatcttatgtttttgatggtaaagagtacaaactgaagattaccaaattttccttcacaaacttgtctactttccatttccttcatagatatttaactcatatttgcacgcatcctctgaaagaaaattaaatgatatgcagttgacatagggcctttttgtttgatggcttgttctactattttaaactctgtatttttcattgttcgaagtttaaacctgctacttggacttgggtaaactgatttgaggtgacagtattatgattctctttgattcagttatcagggcaagtgttccaaagctagatctggattcaacatttgagcaaaagaatgatatagcaaaagctgttgaagaggaacttgaaaaggtaaaaactaacatctttgttctgtgtaagttataacttggtcccactgcataccccaaatttcatgtgattggttctcgatattgtaggccatgtcccattatggatttgagatagtccagacgcttattgttgatattgaaccggatgagcgtgtgaagagagcaatgaatgagattaatgcaggtttaaaactctcttttctgatataatgattaggttggcaaagcagtagccatattccatacatttcaatttatattatgtttctttttgctttttcctatacaatgccacctggaagtggaagcttattacacaggaatcatattatagttgactttgcgttaatcatatctgcaaaagtttttgactgagtctcttaatcaatagctgctagaatgagggtagctgctaatgaaaaagctgaagcagagaagattctgcagattaagcgagcagagggggatgcagagtccaaatatctggcagggcttggcatagctcggcagcgccaagcaattgttgatgggttgagagacagtgtgctggccttctcttctaatgtacctgggacatcatcaaaggatgtcatggacatggttctagtgactcagtacttcgacacaatgaaagagattggtgcatcgtcaaagaccaattcagttttcattcctcatggaccgggtgttgtgagagacgttgcctcacagataagggacggctttattcaggcaaatgtcaattaggattgtagtaagtaatgtagatacatatgaatagtttgttttttgtacggacatacattttaagattgttcttagcgtgtctgactttcctttttcatttcgttgagcaaataaataaacccaccgtcgttgattgtaattgcaacatatttcaatgtaaagcgtattgattgtttgtccataaaacattaacctatcgtgttgttcacatgttaaacctatacttatttcacataacatatttttataccatgatccatctgattagtaagtatcatttaggttaaacctaaattcgacccataacctgaagtgccactcctacaatttactctttaaatccacaaggcatcaaaacgttttgcaccacgtagatgattagtttcttctagaatacttggctaaaaccgtatgtaaccaaagacgatatcaagttaataatggtgaaaccaaaaactacccagcaaaagaatttaggtcatcatagagtaagatgtagcaacaatcttaaccagactatttgctttgtttcccgccaattgtgacaacaatgtaaataaaattttaaaaaatgggaaattgacattggtttgtgccaattattttatacaacccataaccaccacatataacgaaaccaataagcataacaccacacccaaagttcatcggaaatgttccagtcccttcctcttattcctgtccatgaagctcaaagaaaaaaccaacctttcgaatggaattagtctcaaggcttgagtaccaaagctagaccaacctttgcactcttttcaattgccctggtatccacttctcctgagatggtgaagagagactttgggcgccactcatgttgaataagagcacttgccttcccataattgttcactctagctttcaaattggtcaagggatcaagtgcgtgttgtgtgccaatagtgagagtgttttcattgcttgaaaagctatgggaaaactctgcaccaacgttagtgttggtaagggggcttacagtatggtagtacgatgcagtaagggtgtcacctttatcatttctgcaaatatcgcacaactaggaataaatatttgcctgaaaagattaaagcaagtaataaataagaaaaacaactcacaatatcagggaagcaatgagatcattgtgaatgaaattcaatcctgtattaaatttggtgaagttcccagatgctgtatcaaaggacaaatctgttccaactgccaaagaattgtttccaatcacaccagaaaagttgacactaggatttgcggtcaatccaatgctagtgctgatcccagcatactcgtgctgatattggagctcaacctatcacaccaaaatcgcgatatatggtttatgaataccaaaaagatctgccgattaatacagacatgttcacatcaacttcaaaacaataaagttactccttaccttcccagatctctgatcgggagcaataaagctaaagattgtcttaagtccaggtgctggttcatcaacggtgatggtggtgataagctatagattcatgtcccaacatttttcaaaagatcagcaacttaaaatcttataatttatcagcataatgatgacttttactcaagaactagattaaaagtataaccaaaaaaaattgtagtttatctaaacttacattagagttagtgtcaacttttatgtcagtcgtgatattcttgttcttcaactgagtgctcaaatctgccaaaaatagctcgcctttcttaactccagttgaagtaattgcctgagacgagtatgaattttgcatattagagaccatcataactatccaaaaccaatactattaacggactatggaagagtaatgctagtacaatagcatataaaaagcaaaaaaaaaccaaatgattccagaagacgtaaaaataaggcaggaagataagaaaaaagacattgcataactattgtttatagtatttggtacatgcatattatagtaaaaaaaaacactacaaatgaaatccgtattgaagtggtttaactaaccatggttaatttcaaagaaatataatttttttacaaagaaagtcaaaaatggatcaattgttcagcttgtttagtttttttcagcaaacttaatagctcaaaaacatggtttcacaaacatatacgttgcttattcaattacactaaaaattccattcactacaagtgataaatccattaagctttcttcttgagcttcccagaagatgtaagcaaaatcctatcgcaataccttattaccttaaagttcactatcaacaataaaagagtgcataaacatattttacatgaaaacgaagtcaactctagataattagtcatccatcagaattcaattgtttttcctccgaattcaaaacctccatttaaatatatctatacataacatcaaaattaaaagaaaaaaaatacggatatgcaataataatcactttaaaagaaagcttacaactccgttagaagtataggtagtgacagtaaacttatgatcagcctgataatctctgtacagaagatctgcaaaacgtaattgatttcacaaaaatgtaattagaccttgaatatatctatatacatataaatataacataaatcagaaagactgacctctggctttcttgccaatatcggtatagagacctggtcctttcaccatttttttccccgagaaaattcgaagggcgataaagggggaaaggagatagtttggaatcggaaccagttgtattgtactgtttgaaattaggggcagaaaatgagagaaatggagtatagaagacgaaaccctaggttcggtctacggtgcattgtttgatttggaccgttggatcatgtattgggtaagattcgcatcgctggccgtcaatctggttgtgataggggttttgggccttgttgagttttatgacctcgagaatcgggacaaattgggttcggcatattcgcctcatggtctttttctgctacgtgtttgctatggaaaacttaaaaaataatttaaataaaaaattattttttaaaaaaaaaatcatatttaatagttgaaattacgtaaattatgggaaaattttaaacatttacaattttatgccatattcttttaactcatgtggggtatggacttttaaaaatatttttcatttttgtgattttatttctgccacatttttgtaatttatttttgtattctcatattgagtactatgaagtcattccatctacgaacttagatttcattttcgaacacaaatattgccttagacagtttgtccgatcgccgatcaacgcccaccgtcctccgatcgttgtcctcagctccggcagccagaaattcagtgtgccagacttaagcaaaactccttcccgaccaaagttcctctttctggcacattttttgacgcctgtttctactccgaccagtctaaacccagaacttcgacatcaaaccgagtcgttgtttcactgcctattttcgtggtgttcgacttccctgctccgactgggtttcagatttggtttcagatattattggaactttgtaaaatgttgaaaaatgatgtgtgtgagtaggagtcccacatgggatagaaacacttcatttgaagtgtataactagtgcaagtttgagatatgggtttgggccccaaccaaggggtacccagttttatgcgcatgggtgaggactcacacaccggaccaccacacacacgcgcacgccgccgccgtccgaccgtgccgagctggcgggtgtggtgtcaccttattttttgg

SEQ ID NO: 379268 - DNA, 1498 bp, Cannabis indica
ctgagtcaatttctcactactcctaggacaaagcatctaattgctgctcaaagaatcttgcagtatataaaatcttatctatgcaaaggaatcatattctctgcaacatctgatcaattaagagcctacatagatgtagatttggcagcttgcatagacacaaggaggtccacaacaggattttgcatatttcttggagactctatcatttcctggaagagtaaaaagcaacatacagtctcgagatcttcagctaaagctgcatatcgagcaatggaaaatattacttgtgagttggtttggctattgtcattgctaaaagaattgtaaatcgagcataaaggacctgcctttatgtattgtgataacaaggatgctcaacatattttagcaaaccctgggtttcataagagaacgaaacatatcaaaattgactgtcttcttatcagagagaaggttaaagaaggcttgatcaaaactgttcatgtcggtaccaaagaacatgtagttgatatcatgaccaaggtacactttcctaaccagttcaaagcacttaaagacaagattagattagttgatatataccattcatcttgaaagggagtatcaagattgaattagttaggaagtgtgagtgttaattttcagatagttgttagagtgtcttttcagttagttttcgtaactaacttactatacactgagctatataagctccactcttgtacctttacattatgatcaattccaatcaatagagaatattgtatactatatttttctctcttttctttctgcaactaatattatcattgtatagtgtgctgatccatttttgtaaatttgtttattttgtaagtagttttagtccaattgattgtttatatcggaggcctcttgaaggtggtctcaagctattttatttaaatttccaaaataatttggttgtatatataagacgttttgtttgtagtaactcatattctgactttatatatcttttagctagacaattaaattattggctagaagtttatctgcgtcgtcgacgatagttatttattgtacaacatttatttcaaaaagaatagaataatatgattttaaaattaaaataacttcaccataaatttatgctttattagatagatatggatagatttggatgagtatataatagaagattatatatatactagcaaaaagctacgtgcgaggcacgtatactaaattttatgctagtttttttctatgttatttgaaagtgatacaattaaaaattaaagaaaaaatattattagttattaggtgagattattattatgtgtatctaaatattatagtttataatgttgtcaattaaaagtgaataccgaatgcaatatattagtgtttaagaaagcttgatgatttaaatatgttcttaagttaatccaaaaataaattaaaaattgatgttccaatacttaaagaaacattacttaaatgggtgtaagat

SEQ ID NO: 379269 - DNA, 1451 bp, Cannabis indica
gtatccccctctgtcataataacaccttaatagcagtgatttcttttccaacatacatagaatctaaacccaaacataagataaagatgggaacgagctcattggactgcaaatcttgataaataccaatgtatattttcaatacggcatttaattaaaatcctgtataccatgttatatgacaattacacttgaaaattctaactagcttttaggtgaaaagggtctaactgcactttgtgaatcataagattgatgcatataaacacttcaacttaacatcaatctcaaaaaacgataatattgttataaattttgaaaggtgtaaggagttgctcctaacatactcagacaaccagttcttgacttgcagttgtagtatttgattatctatgaattaaacaaatcaaataaaactcatccaagtccgaggttttatacatgtatatgcaagaaatgaaatatattactaatgttaattacaagtttatatagcatcttctgatgaaacttcttgttaaataaagaaaattatctccataaagaaagaatgaccatgcatgagaaacatgtgtaccttcaaaatgttgacaaggtgtgtcttttcattatcttgcaaacgatcaggacgatgaagcctagcaggatccagtccacataattctagtttatcagggtgttcaagatgctatggtgtcaaaacatggagcacgtcgtctaatgtcaaatagatgtttaaaaatatgtaacatcagaaaagaaaattcacaaaactcaccgacatattcaagttatggcatgtccataataatcttgtacctccaagcccctatatatgaggtaaaacaatcattagcatgagcatagggaaaagggaaaagctttcttttgagaaaataaatataattcattgctgttataaaagtaaatttcactaaacaagtcagttgcccatttcaatggcagaatatatcagcttagttggaatataccagcacctttcacttcaggaagtctttgcttttcttcactcttaaacttttaagcatatttactaattagtacatttgatcccttgactatttaagattgacaatttggtcccaaacatttctattctggcatatttggtccttgattattggtctctgaattttcaatttgggctcatttgctaccttgacaatttaagttatgatgatttagtctccataattgttacttatgaaccaaactgatgattagtataaataacttacttcagggaacaaatcatcagtcatcacaaccaaagtcaaaactgaaaaattggagatcaaattgtcaatggaccaagacgattaactacttttaacagactgctaatgataatgtttggattcctctttccttcatgtactaaagcaaacttcctgcatgttacatgctaaagaacaaagacttgtaaaagt

SEQ ID NO: 379270 - DNA, 2098 bp, Cannabis indica
aactaatttgaataaaatcaaacgattaacagaaacaaaatcaaaggtttccatttcattgaacaaaaataaaaatcattaaaagatagaatgattttgttctaataattctaaaatctaagtagaagatggagaagggtgattaagaggaaatatttgagttggccaccatggatggataataggattaacacgtaatttggctagggatatcttaggtggaatatgaacaagagtttcaatgcgattctcattttggctaagtattttacattgaaaaatctttatctcctccttagctttagcaaatttatttgagtgcgagaaaaagaacacatctccgtcatctggatgaagagcatgtatagcaagaagcgacgacgagcttatgcaacactcaaacctcatcatcatttcatcatgatgatgcaccaaattccaactacacatctcaccatcatcaaacaattcccatgccttgaaaacaaacaattgcttcttcttacaccaatagaattgtgctactcgtactcttccccgaaccactccaacatgtaccctagaatttgaataacgacctaactccttaggcaaaccaatcaaacggtgttgttttgaacaaacatctaatgcaaatgcaacaatgccttcagttttgcgtagaccatatggccaatatattactccattgcttcccacgatggctgttcgatcttcgctttcattaaaaatggtcagcatctctggaaaatttaaagttgaatgactccattgtcccgtctcagaagaaaatattgttaaatgaagtaaatgtggtggtatacttattgaatcaactgtccccatactaattttaactactttatattgggtcttactataatcagataccactaatgcatatctacgttgtaaataaaaagatctactatactcatattcatgaaaaggatctggaggtttaggaagcacagcaagctgccttgtaaaaggattgcaaatgcagaatcgttgaccaggaaataattcaaccaacaacaaatcctcaaacgatgaccataaatatgctctgttcttggaggacaataaaaattgtaatgccggtatctgaccatagtcaagaatctttgatctctcagagaaatattccattgacaaattaaattcaggcaagtaagagtgtgtaaatagtagggtaaaaggaagagatggagatgacgactgtgatgagttactaagccttttatgacgatgataataattaaatctgcgactgaaatatgctttggaatgagaaataattgaaaaccaacgcttgcagacataagcacactccactatacatttaaaatcaggaagtcggagtaatatttccaaaagtatgtcatcattgagattagagcatccttgttgattaggaattttgtgtcttttcctacacaactgatcataataaacaatggtttgagagagaataagcagaataaaatgaagagctacttactataaatatatatatatacatatgaattacctgaacatcatcattcctgggtgtttggtccattaatagttcttcagaactctttggtggtcagactgaaagaaatatagatatagaatgtgcactacttagctatcaaaaaaaacgtgatctcaaaagcttattaatacattgaatatatgatatatatagtcaaattgtaacctagctcgtaatgtggaagatatataacaaactttctctctcttttattttttttatataataataataataatgcattagatttatttatttatttgacttaaattttcaagctattatatcattagtagttagatcataacccgtgaatttgtaagctataatgtatatttaatatttgattacaataattaagtttcactttcaaagcacatcaagtcaaactacgtacctatagtttaggatgtagttaattttctacaactatattcagtatatctattttacaccaactcaatagattgattaaagggcattttacataaatgtatacattttttaaaataattacaaaaaatgtgcaaaaaaacacaattttaaaaatataca

SEQ ID NO: 379271 - DNA, 10032 bp, Cannabis indica
cactagttttgttttaactaaattaatattacatcaaattaatgttacaattctgttagatcgataattctattttcttccaactctaattaaaataatttctagttttctttataccaatcacagacctatataaatatatatatatctacacaattctatctgtgtctatatatataatccattgaaaactagtgtgagttaataatagtagtagagcaaggataatttggaagaaaataaggggcaatttgaaaagttgctgagtcagcaaggacggatgtctagtacgcattatacattccacgtcacattttttccgaatcccacgttacttaaatgctttcttccccacacagacctaaatacatacacacttacactcgattaaagagtgagtgatgagaaagagagagagagagagagagttttaaatagcatcaactaggaagaggagcttctagctagttagttactgatcgagtaaatctctctactttgctgccgaaaactttgcgctgctcttcaaaaaaaaatttccatacagagtacttgacaatcatcacaaaatatgggtgaagtaagttgtacagtctagtagttctctcatatatattttaatgataattttagtctcgttcttttttcgttttttttttctttttataataatttataaatacattattcacttgcgaactttgtgcttttagcttgatcttgcttactttatctccgttattatctgaagccttaacaccaatattagaattcttttttttttgttgtgtgtgtgtgtgtgagctgaaactcacactgttttcctctatgtttcgtacaaaatcaggagaacaaggaggaaaaaaaagaggaagaaaagaaagaagaagaaaagaagaagaagagaaaaaggaagaagcccctccagaaattgtgctcaaggttgatatgcattgtgaagcttgcgctaggaaagttgctagatccttgaagggtttcgaaggtaatttttttcccctttctttttctatttataatctcaatataaactgtctcacataaattttgaaagatgaaacatagttaaacataaactagctaggtaggtactggctagtatataaactatataaactctttaaaatattaagacctggttaattaaggcaggccacaagtatatataaaatatacatattcatatgttattaaagtactacaaaagttgcacctaaactttttggactttttatgttatttaagcaagttttttattttaaagttagaaatttgatattatccgctatatatagaaaaagtgggcggtggtaattaaagttattaatggagctgagttggtaaactttggaacaggggttgaggatgtaatgacagatagcaaagctagcaaagtggtggtgaaaggcaaggcagcagaccccataaaggtgtgcgagagattacaaaagaaaagtggccgaaaagtggagttaatctcgcctttgcctaaacctcctgaggaggccgagaaggaggagaagaaagaggagaagaaagaagagaaaaaagaagaggagaaaaaagaggaggtaaagtaataataatgcaatatactaattaaactaaaatttaactttactttagtttagtttattagtccacttagtactactaattaacaacaattgtaagacttttaattagcataaaaagtaacactcctttttccaacacttgctggctagtagtctattattgaccgatttggaagattaattagtgagaaaataagagactaaattggagtgtgagtttgacacatttcccaaaacagtgaattctgagaggactgccatttccaccctgacatgaaagaaacaatacaaaatcagcaaaatgagaccccagccaacagagtacacatttaactaggaggatggacactgtccttaagaaagctttgaccccacgaccacccactagttgtgccgtactgccaaacccttgggttcacgggtacaaccaccagttaattttatgtaaatgtcttaacagtttttttttctattaattaaacaattcttttaatttactcaattatatattccaccaaaaaaagcctgatatctaaaacaaaaaagacccataagggtgcgtttagagaactattataataagataagaacagtgaaaattagtgctctaagacaggtactttgtgtgctgctttgtcgagcaatttttaactatccttttccttttctctttgtacaatctctcatcgagtcattgggagttggggtctgtgggcttcacgtgtccatttctcataaatctatacatgtgtgagttttgaagtagttggttgggttgggttattcatgatctcatatatgtatgtcaaaagtaggcacatgatttttagtgttatataattcatttacataaataaatataataaaaaataatcatgcatgtacatatttaagatgagaaaactgacatgctttgcatgagaggtgatcagacaatgaaatctcatatatttgtacacttcgttaatttgtctttcttcaccgactgtttaattttaacatctgacctacatctattactacatatggaccactcatacatccctttctgacttcatcaatacgacttcgcaaatcattctctaactaacaaaatcatctttttcgatatatattgtctctgatgatccattaattctctctataataagcaaattgtatttttacatatgaaatcctaattagtacgtacgtacgtacgtaatatttaacgaccttatatatatacgattggcagcctccaactcctattacggttatattaaaagttcgaatgcactgtgaagcttgcgctcaaggtttacagaagcgaatcaggaagataaaaggtaattattctaaatcttaattatttacttatttatactatataattacctatatatgcatgtattgtattataataattaatgctatatagcccatttatggtttttctagtactacaataaatatatgtggataagctcggaaataggtaatatttattgagtgaaaaaaataaagttgaaaaaaacaggtaatatactgttaacgactatatatatgacaagtacaatatttttctcgttgaacttgcacaaaacatgcacataataagttttgaagaattaaaaaaaaaaaaactgcaagtggtggtaagaaaaaaaagatttttaccatggtcagttgtaggggctgacagaatttcaatattatttatttgatttggtcggcgataggtagaggcataataacatataatggcaggaacttatcctttctttctattaattcttttcgatcttttctttttttttgaaatttttcttctatcatattactttatgttttctacgatgtgacttaagataacttttctaatagtctttcacttcagaagtataaaactttttttatgttttctgtttttcctccgtgtttatttcttatgctgcagtagtgaattttttattaagaacagggaaaatttacaattccgcattgttttgatgtttataaataaaaataaataaatagatagttgtgaatgacaacttcgcaaaaggacctttaacttggtacaagatgcactggaatcttttcgttgatgcttttgcctataatccaaaaacttatataacaataacattacctttatcaaaactcagaaattccaaacagtatatcttatgctttttgtagtaaccaatagtgtacctaattaaaggtaagatcaactaatatttaattgataattactattttttttatatatgattcactactgcttctgtcttcataattttaaccattaacaatagaaaagtgatgccatttatgtctaaatccagtaaatatattcgggaagctaatctgaaacaaagccttcaaaaatattcaaaattaacggaaaacataatcaggcccataatgaaagaaatgggctttagaggaagcccatataaatccagtggaataaaagaagttttgttttgtacgtgccacgtggtgcaggtgtagaatcagtggaaacggatgtggctaataaccaagtggtagtaaagggtgtggtggaccccgcaaagttggtggatgacgtgtacaagaaaacaaagaaacaggcatcaatagttccggaagagaaaaaggaagaagagaagaaagaagaggaaaagaaagaagagaaaaaagaagaggaaaagaaagaaggagaagaagaggacaaaggagcagaagatgacaagaagagtgatatcaaaagaaatgaatattggccttccaagtattattcggagtacgcttatcctcctcctcagatgtttagtgatgagaacccaaacgcttgctccctcatgtgaccaacaaatagttctaataataaattaatgtgtctacttctcttcttttgtcatttgtttaatttcatgccaactatatatgcaattttctatgtaataataagatatactgacactagaaaaggagtagaactggagatcaagcaagcttggccttatgccatctgggcatcccttagaaagctattctgtctgtggacatatttatatataaatgtacgtctgtgagttccaagtagtattgtatgtgtaggttttttctgaacaaactaagttgtgtcataataattcatatatgtaactgttaagtcattttggcggcagattttgtatctatataaatatatatattattgaaaaatttgacactgtacctggaatgcattgatgcagttcaatctattttgatattctaaataaatttttagttaaattttttctcatactcatttacattatatttatttaagataatttgtaaaatttcaaaaaaatttaaaaaacttaatacaccaaaaataaagtttaaatattgcacgcatgattatttttttatacatttaagaaataaactgttaagattattttttatattgtaaattatttagtagtattttttaaaattttataaaatattttaatatataaatatgtaaaaacaattaaactaaaatattattctaaatgtcaaaacaaataaaaagtatattagtggataaagaagttgcattgtattatatgttttctgaaagtatcacagtacctacacccagctagctagcaaaagaaaggtggttagttgaactaaccaaggcatattattaccagatataaaataaggtcgatctccttttgaaattttaattatttggacatctttttttgagtagtttcttttttttactatccttacaaaaattgctaagatcaaaacttgtagaaaatattaacaaagagaagtggctgtccattatcattttatatttgctttcatatcattttggcaggactcccggtggtgctgttatagattgacaatacttttttatttggcagaaatataacagaaagtggtagaaaagttcgttcatacgcagtgatggtgtgtactcataatataattacatcaataacgacatattagtttgatatatatatatatgtgtgtgcatgaggtaatgcacagtttaattatatgcgcgcgtgcattaccaccgattgtgctaaaatttagtacagcactcaagtatagactgactaaactaccaaaggtttggaacacttaaagtgaaaatgacctgagcaaatataataatttgacttggacgtacgataattaccacactcactgcaccactactaggggccgagcaaaaggcccaattaagcccaatgcatgtttgtgatttgagaattgagatgaccaatcttttcacacacacaaaataaaagaactacttccacagagaaactgaggttgtcattttagttcactttcttcagttgtaagttcggaagtgaccttatcaccatgcctacttttttcaaataagtattgttattttacttttcactttcttcagttacatgttcagaagtaaccatataaccatgtgtacctttttcaaataggtacgaagtaattattgttatatggagcaagtggggaaattttatatacctttttcacaactggttttgtttggaccacaatgccactttggttggaatattagataaaagtgattgcaaaattaagctttggagtttggaagcaacagacttatttggctatatgaaaatgcacgcgtagttgagtggtaccaatgtatatatgtgaaacattactaatccagaattccatagagatatatataactcagtttaaatcaattactggaccttaataaatttgtttgattagccaaaaaagggaccaaattgagagagctagtgccctagtgggcactgggggcacctttgggctgtcgtgtggggatattacttccaaacgttgaaaacaaataatgctcaatttggtgagcggatgtgatttattttatttttcaatttgtggggtcaggagttgagaacactattgataacttaagtatattgataaattatatatatgtccagactaaatttttggcttcattaattttgagaggaataagaaaacacccctttatgcatcagtcaaagactcatagtgtcattcattcttacatatataataatattcaatcacacatatcatatatgccagtcgactgtcatgtaattaatatctatcatatgaagaaattggacaacgtgtagtagtactgtactattcactaaaatgacaggaaaaaagatacatatgatataaacgaactctgtcagtcaatatagagcagatcgttatttactacctattaaacatagttctaataattctacttaagtaccatccgaagataagaaaaaaaaaaagagagattcaagactagctcgatctgacataatgtaccttatatgaaatcattttaactgaaaacttcaaaagcatatgtatgataactctgtttttacgtaccgatcaagtatatagtactagcttccttgcataatgcaaattcaacatatgcttaattatctctgctttggcactattcttaatttgtacacacttattcaaaatccaaacgctttcacgtttagtgttcgcaaaaaacccaatccaccaaattctctacagtcaacttttactatttgagggtaacagcacaattgtatgaattttctctcccgtaaggagcacgaacatgcatattgatcatcttttcttccttgactaattcttgcgtaaagagcaagttagtcctaaagcaatgcgtataattttctcacctcttgtactattaatgtaacgttttaaaatgaaaggacttgatatatattggaatactgtatatacacaatgaaatcgatttgatattttgttaccaagtggggtgagcccagagacaatgagacccaccaatttttgttttggtgcgcggtagatgcaatgtcctttttctctgacaaggtctctagctatatatataattttcttctcaatccaacacatcatatcagtgtgaacgttcagaccgaaacccttataaatatttttgttagcttgattattacaatttcagttctttcagataaaaaaatatatgtatgataacattactgaaatagtagaaggatggcggctaatgtctttttcattatatttttatagctatatatatgctagccaatatacaacaccaatgttgcttggctctatatttgctatttcttgtcgtttcattttgatcaagtgctgattattcatgttatttattgataaaaattacttgaatgttgcagtgtgacagcgttacaagtacattatcgattttaaatcatctcagacattacacacaacacaagtacacgtgtaattattttgcagcaactaataattatgaattcataggacttaatttcatctcattttattgcacaggggacataccatttaatctgtatatatattccataattcctctgtcttaaaacattaattaattgggatttttgatttattctgttccaatacaaatttagcattcgggatccatcttcattgttataataagaactatgcatctttcattagtatatgagtattattagcatgcactatcaaattaattgcatgtaggttcatattaaataaacactattgtttaactaataaaccatgacatttttaattatttgaaaatgtttaaaaaataataaattactgagaatctgagattaagtttttgactaaaaaaaaaaacctactttatgaagctcatgatagaggcatagagtacatacccttgttccacatcatgcataaccatcaaaaatatagatatgttattgtgcgtaatatcgtatcatgttttgtaaaatttcctttcaattatcaaaatacaaatagccaacatattaatcaataacaaccatataatagtcacacattttgcgacaaatataataataaaatacgaaccttttagctgaaatcaattaattttgttgctcatctccgaatatcattctaaaagtacaactaatttatgtaagaaacatagatcatccaaagcccaaaagcatctaaaaagaagtatatctaaagataagctttgacagcacgagaaattaataatagcatagttagaaataccagaaatctgtgtccaaacttaaaaaaccactgtaatattatatactcaaatattctcccagaaaaattatatgcatattgatttttgagagaaaaacttttgataaataaatatatctacaaatgcttctgcatataaatataaaagtataatacacgtgtatctttaaaagggatttaatgggtttgttcaaagtacaatctttatcaattggagaaatacagtaaaattctcaaacttgttcaaatatagttttgatatatttgaagtagggatgatttgtttggattgagttggttgaattgatttggtttagactaaaaactaagcgcactgaactgaatgggggcaaagggcatcacatacacgtgtagggttgtggagtcgtgggtcccgcattactgacactcgaacaaaagcgcatccttttggcatttgtcaacgcttcatcacaggacttcatagaacggaggtcgagtcgtggaaccccccactattgcaaaaccaccggtgcaaaactttccgtctgctattgggcccaccgagtgggcctatttttgggccttgactaacttcttggacccctactatttctaaaattacaaaaaagacactcactcttcttatgtttcacgccaacagtctctccctctaatatcacatcatccaaattttcagaaacttaaagaataatgttgaattctattcacaatgttgcctataaaaaaatttattaacaaagtttataatcatatgatcctaattataattactggttagtatgtgtatgtgtattctgtatcgcaaagtttaaggagttgtaagtctaatcatgatttgatgactattccaattttctttttttatttttgtttgaatcgctttatctctgtctttttttagtatatatttagacgcaccatcttggggtggtgtggaatgaggaggataatgattactcggagattacattgtacatttgtacttaaatgactaaattgaaaagttgactttgtacttttcgtttctggagattttttgttctttctattttcagttaatctattaatcaagcaccattttttattttttattttttttaataatttttatgtataaacattgttattttgttaacttttttttctctatgcattggaaaattttagaaaaaaaacactacttttattcttgcttgtaggaaagtatttagcacttacataaattataaatcaaaatttatatgatatatattaaggagttgtagtgtagccgtatcccaacaaaaattctatatatttttatgggcattttttggtttaacagtttaaaaat

SEQ ID NO: 379272 - DNA, 7844 bp, Cannabis indica
ttacctgaaacggttctcagccacatgaacagatgttttgagataatctacctctcatcatctttgcttacaaatgaagagggtcagacaattatgataagttcagatagaaggcagaaaagccaatttttctcccatttcgccttggaattccagagttatatccaaccgttcagtatttgctgatatgtctctactatgattagaaggagatgctttgtcatcctgttttccactatcaacattatcaagtgcagctgctactaacctagtattaatctttcccataatgatagattttagtctttctccaggttccctatcggaagtatgagaaatctgcttgccagaactgaatttttttccaccagagtagacactattgcgtgatgatgcaaaattctttaagtgaccaacacgagaggtcatcttccagatagtagacagcaatacagtgaagtgtttctgaaggagcaactctccgtcttgctgctcagcagcaatatctaacagcgttcgaatgttttcctgacacaagaggattatagaaacagttagattaaaatagctcaacatgaaatgaacatcattaaatacatatattagacatgaaaattaacaagaaagctcttaaaattactacctcagtaacttttagaagagcctttccagatcctgcattgccgaccttctcatgatttgggttgtctgaagaagacaagacataccgttggatgagttctctaaacctctcgcaacaatggacaggatgtcgatatcttcccctataaaacccaccagcagtcatgctatataggacgtcactaaccaagttccaataagggccatattcatgtaccacagcacataatattgcatcctccacaggcaaccaaacatcaggagaaggaacacaatccctcgtccaaacattccccttcttcagcttttctggttttatcattaaaactcgctttaagggcatgtaagtgatggatatttttcctcccattctgcttctgctaagcggtctctgctcagattcagttatactctcagcaggttttgaatctgtaggtccgtcatgctgcactactggaaaatcagtatctaaatcaagagagcatctctcaacaaaaatcctcttgagtttcttggactttttctttgaagtcttctcttcactaccattcatagtaatttgaacctttttccgttttttggtcatgactgaatgtggagatgctgcatctgagaacgtgagcatctcttgagagaaagtgtcctcatcgatggacatagcatccgctgatggctcttctttcacggattttgatgcagaagctagtgatcctttctttagggatttgaacttggctttctttggtttctttttagacttaggtttcagatcacttggcatttcattcctgccataggtgaataaaataatacgtaattagtcatcgaaaaaatagctcacactaaactagctaaagttagttcacgtaaaataatgcatcaagtctgaaggaaattccagatcttcgttcactgttcagtcttacttcgcagtgtcacaatttccagcttcttcgtcttccctctcccttgcctcacattccagatcctccatcaactgaaaagggttataaaaaaggtcaacaattgacaagattgcataaagtgatttaacaataacaaaggactattcgtgaaacctgatgttgagccagtgcttccacctgctgccgatatgcctcggttgcaaaatcagaatcccatcctacataaacaagcaatggattgatgcaagatatataaatggggctgagaatataaataaataaatatatatataaagatatgtggtaagatatgtccaatggaccaatatcatgcacggctagaatcaagtaaaatataatgtattctactacatggcataaaaacaaaaaaaaaaaataagctacccattaattaatagagttggacacttactctcatacacaagaggttcctcatcttcatcaatttcagcttccatttcctccttgtacttctcaatacggtcgagttcccattcagtttcctcatatccaacttgagtgtccactgttgccttatctataatggggtcccataattctagaaagcgaattgcatatctatctattggacgcaaatgattctcaaaggatgatattgcttgtccagctgccgctgcagcggcagccatttgtttaacatcatccaacatgtcaacatcatcttccttaacaactgtaagagctttttcttcattaatatcactcccattctgcatggatacattttctttgttcgatgtcatccagccactatgatctgcaggttcatcaacctttgcatcatcctcatttactaattcatcatcttccaatctcccaatggcttcttctgtgaactcttcattctcaacttcttcttcctgttcaactttcttcaacgccatgtaatctgcttcatcttctgcatgttttaaagcagcttcaacatcggcattagacagagatatctcatttgcattgtaatttctctccttctgaacattcttgattggaagtgatctatgaccagagaaaagctccataggatcaagctttttgaagaattcagtgttgtagcccccactctgtatcactagatcatccagggcacgcttctgatttgctttcttcaaaatattttcttcaatggtgctctcactaatcaatcggtaaatatgaacttcacgtgtctgtccaatccggtggcatcgatcttgagcttgttggtccatagcaggattccagtcactatcataaaagatgactgtatctgccccaactaggttgatgccgactcctccactacgtgttgataagataaaaaggaatatttttggatttgtattaaaccgttgcatcaaagtttgcctctcctcgggtggtgtggatccatctaaacgcatgtaagtgtagccatacaaatttataaaagcctccaaaacatcaagcatctttgtcatctgagtgaatatcagtgctcggtgacctcctgactttaattttctaagcaaaatcgcaagctcttgtaatttgccacagtcaaattgtatgagccgcctgtcaggaaagtacacctgcctccgaacaatcgcaggtcttaaaggagtcaaaagtggagaaaatatttcggtgcacttctgcttataagtaggttggagaaaggcagaactcccagatttactacaccagcaaacaggtggcggagcccgcgcagctgggattgcaaacaagaaactttcaactaggtcaagcactttatgaaagcgttccacaggtgaaaggattatgtcagcaagctttgtggaatacgtataagcgcgaggattagctttgtgacaatgaatatcatcaacaggatgccttactgtgacaagctcccttagggtagttgagtacataggtcttctttcacacctcaaagaattccaccatgcaatggctgctgcgcgatcctttgcttctttaatcctctcctccattattgatctctgtatatcttcaaaaatatttgatccatacaattttcgattttcagatcctgacacaatctttccaaggttaaacaagtcaccacgtgcttttattgaacttgagggggtagcaagagctttaacttcatcactctcccaagaagtcattctattgctatgatgagtaaacaccaaacccatgtccctgagatcaactctagagaatggtccacacgaaagtactgagcaaacaggagagcatagttgaatgtcaatacctgtcatatcaaaagaactgactattggacggccttcaaataggtcaggatgattgcatactttacgtagctgcattatgatgctaatcatcccaaaaaaatttgcatttgcaagagtagcttgtgtttctgaactagcgatgaagtcttcatacaaattacgctgccttttggagagtctacagtatataacatgctcaagtttcatagggagctgcttctccacatcgcgtttcaaacgacgtagtataaatggacgaagaacattatgtagacgatcaattacttctttgtttactttttcttgtccctcgaccatccctgctattggattacaaaaccagtctttgaattcttggtgagactgaaaaatgtgaggcatcaagaagtgcattagtgaccagagttccatgagatcattctgaagtggagtaccagttaaaagaatacgccgttttgagttaaagttcaaaagtgtttgccatctctgtgatttccaatttttaatcagatgagcttcatctaatatcaagtacttccattttttacgcttgaacactttagaatcttgaataaccagcctgtaagttgttatacatacatgaaatgagttgggcttcaaccagccttgcctcttcaattttcgctcttttgcacttccaaaatatgtcaaaatcttaaaagcaggacaccatttaagaaactcagtttcccaattcaacattacacttgttggaaccacaattagatgtggaccccatattcccttctcacatgctaggtgtgccacaaagcaatagtcataattgtcttcccaagccccatctcatccgcaagaattccattcagccttttttcatacatagcgacaagccaatccaagccaatatgttgatactcccgaagagggaatttaagaagaaaagggaacttggtccgaacttttgttgtggagaaggtatttccagttggctgtgccgatcttgcggcagcagctgcatcagcaattatatcctcactttcctttcctccttcagataaagtatcatgtttggcttgctgttcttccatgggagaatggactggtgggcgttcatcagatacagcatattcacccacagaaaccagttgcttctgttcagtgttttcatccatagtaaccagttgcttctgttcaacatcttcaactgaaagagaatctgcaaagccctctgacaaagcagaggcatactcagatccatcatccacatcctcattgttgatgggatcctgtcaaacagaggtagatgaaggaacagaattataattgattagagctacccaaacataaacagaagtaaacaaggaacctacctttttataccttgaaagcagttcttcaatgggaatttcactctccttttgcagtaaggcaacctgtaaaacagcaaagcagagactataaaccaccatactgggataaaatctgacagtaatcaagtctatgcagattttagtagcttctcacctcatccataggatcatgggaatctgttttagcaaattcctcctcttctgacaaggttgtctcatcatcctgaaaataaacgatccacaccaaaattaatcataaaaatagaagcaaaaagcaatcattaaaattaactctatttggcaattcagtccttgagttttaaaaacagtagcaattaagtactttcagttaatttttcacaaaatgatagtgtaaaagtatttggaaattttcaaaattatccatgaaacagaaagttcagaattttgctaaaaattaactgaaaggacttaattgctactgttttcaaaactaagggattgactcaggagacatttatgctaaaaccccttattaatcgtatacaatcttgagctatcaacagcctatttatgagagtgcatgtaaaagaatttatacctagtaagtataatgattactactaataaactgcagtcaagagattctaatgttaaaaataaaaatcaaatataatagaaatatcacaataaaaggaaacaaaaaaactcttcaaatgctaaaaatctaacaaagtagtgatcgggaaaaacaatctaacaaagtagcattcttcatagtacattgtgtgaggaagctcagatttaacaccataccttttcttctgtaatgccaagaacaaaatcaccatcttcctgcatcatttcagaaaccaagtcaacatatagactacactagaatttatgtataatagaaagcatcagctcacacacttacacaagtaattattgtagcatacctgcagacatacattaataaatagagtaatactgatacacccacacccacacccacacccacacccacacccacacccacacccacacccacacccacacccacacccacacccacatttctaatgtaatgtatcccagtttatgataattaaacatcaattactactagcagattgatcaaaatgaaaaatataaattagataaaaatgaaattagcaacccttacagtaaatcaaatgaatcacatgatagaaccttttatctaaaaataagtcaccctcttcaagaatcaatgaccaccaaatacaaatgaagaaaaaaaatcatcacatgactatatgtctataacttggaaaggatgaaaaataacaataaatttatattaaaaacacaggttttcctacccgttcatcattaaaatcatatggcacctcttcttcctctaactcttcagaagcttctgcaagattattggcttcatgtgtctcaacttctggtatatggttttccaaaagtagaagacttccattactttcccctttctgcaatatggaagaactattatgacaagccctcaacattgtcagcaattcaaaaatggcaaataaacacatacaacttacacaacgacgaccagtggatacagcagagttgcttttctcaatctttatggctgcagaaagcccattttcattgcctgcagcatcacacattcatgccctcatcgattatcaccaaaaaaaataaataaataaataacgcactatcaactgattaaacttactatgattaatattatcctccatcccggctggttcaatcctgtcatcctttactagactatcctccatctgggctggctcatccctgtcatcctttactggagtagccaccatctcagctggttcatccccgtcatcctttactggagtagcctccatctcggctggcttatccccgtcatcctttactggattaccctccatctgggctggttgatccccaccatcctttactggactaccctccatctgggctggttgatccccgtcatcctttaccggaccatctgccatctgggctggttgatccccatcatcctttactggactatcctccatctggagtggtttatccccgttttcctttaccggactaccctccatctgggctggttcatccccactaccctttactggactatcctctgtctgggctggttgatcctcgtcatcctttactggactatcctccatctgggttggttcacccacattatcctccatctgggttggttcatccccattatcctttactttactatcctccctccgggctggctcatcctcgtcatgctttactgaactactctccatgctatgtccacaagcttctgtcaaccagaattaataaatatgcatggatgcaaaataaaatttcccaagccaaaccaaactaaagaaaagcattccattcatgaatttgcataatgaaatacacacatgtaactctgaaaaacagataaaagggtgagaaaagaaagcagttcatataacagtcctatgataaactcaaggtcgttcatggcatggaccaaaatatttggttgccttttattctcttacaaaacaaaaatattaatatgaaaacaaagaggatgatacttagggagatgataaaatcctcaattaacaaaaaaaaaacacacacacaca

SEQ ID NO: 379273 - DNA, 2009 bp, Cannabis indica
aagaatttcaaaaataacaaaatgttatttttaaatatcactaaccaaacgtgactttgtgttctacaagcttcaaaaactatttttttgttctcacttctaaaattaattttttaaaaacaaaaaatagaaaacaatgaaaacaataactctatctatctctataaaatccccatcaattatatgaatatatagcgaaaagcttcataggaatataatatatatcatcatcatcaattatactaaataatttgttaaatcttttaaaaatcttttttaaaatgttgtttgtattatatttgtacttatgaaaactaatcataggaaatctagtatagtacgtacatgaccgtgatcaccaaggttgacaacgaaagctccttcaacaggttcaactgtgatccaggtgttgccgccgtcgcgggtggcctggaggccaccaacctggtcctggagaagaagggtgatggtgccggggtctgtgtggcgcttgaggccgagggtgaggtccggctgaggacatttggggtagtaattgaccaccactttctggtccatctccacacaagctttagtcaaagcctccttctctaaccccatggcttccgacaacacctccaacaacttgcaagccagttccatcaatgagtcactgtatttctctgttacagcaatccaaccctctggcttgtccggccaccgtgtgtagtccctcagccgttttggctgagaaaaataggtcacaatctcacgccagtcttgcactgcctctccctataaatgcaaacaaatatacttaactattatataactgataaaataatttcacaataagagtagatatgcattattgaaaacaaaagtcaccaaacatgtttttttttggacaaaaataagggtaacagataaaatatattatcagatgtatattattttttgacgatgtatttgatattatatttaatcctataagataataatttaaatttgattcaataattcatatcatgaattaaaggatacttttattttaaaaatagtaatattattaaacatacttttatgatattattaattatatttttttgtaacaaatatattaaaaattaatattattattttgtattgaaatatttgaaaaaaatttattgtatttgacttatttttaatattaagagaaaaaaaaaattataacgtaaatgatcgagtagatattaggtagctagtattaaatttacatttataagaaatagtattgatttagtttctaacgtaatatttatgagcaattaattagtataaagattttattcgaattatacgttaatattaaagagagaaatgctaaatggtagcctattaccttaatgcaattaagtatactgtcactaattaattaattataattataaggtgacatgtttaacaggtaataaagtaaatacactagtgtccaaatatctcaatactctattagaaataagaattactaaaactctgtctaacactttcttaaaaatatggttgcaaaaacaatatttacgtttaggaaaaagcaattaatactagtattaaaattagttattttccgacggagaaggtaaacagtttttataaaattataatccaaagaaaaaatatataaataaatattatatatatatatatatatatttaagtgaggttagtttacttgtaaatggctagagacgatgaaaccgccttttttgccgccggacatatcgaaacggagtttttcctgagcaggcagagcgaaaaattcggtggcgaggcgagtcatctgggagatgagtgtagcgtcgacgccgtgatcgaccacctgaaacagtccccaatcttcgcacgcctccacgattttcttccgaatctcgcttcttctattgccttcgttatcatcgattccagccagggaaattaccggaatctcattgctgaattggttgtacgccaccttcggacgctcgtcttcgtcccggacgaacttcgct

SEQ ID NO: 379274 - DNA, 6356 bp, Cannabis indica
tacgttttaatttttttttttttctaaaataaaaaataaatagtatttgaaaactttctattcttatataaatgatgagagaaaaaagtaaacaaacagtgaattgatagaaattagaaaaaaatgagagaaaaaagcaagttaattttgattggaaagaatacaaaattagattatgaataaaaaaaattgtgtagataaattagaaagtaaatgttttttgttaaaaaaaacaagaaagttatgtaacgcactatccacaatatatcctcccacttgtacgggccacgtgtcctaactcccacctctcatgaggaaaaatccaaccaaaaaaaaaagaagcaaaacccaacttaagaatcttcattttcagtatcattttttgcatacaagttttagttgtctctcgttctgtaattttattcagattccaaaaaaaaaaaaggaaaaaccttggccagagctggtccaacttgaagttacgacagaagcctaccaatagaagaagagctcaaaccaagcttcaatggaaaacaacactcaaactcctaaaaagctcatgtttctctctttccagcatctaattgcccttgctgtggttcttctactcttagccagtggcatggttagtccccaagacttgtttttcgtcctcttttccattgtctacatgttcttactatcaaagattgcttttccaaagctccagtcttcactagagccaacagttttcagtccccaaaacaagcttcttctcatctatgttaccattggagcaataattggtcttcttctccctatagcatacatcttggatggaatttttcatggaaacaaagaaggaataaaagcagctgcaccccatcttttcctactctccagccaagttttcatggaaggggtggccttttccggatggttttcaactcctattcgggttttcgtcccggttttctacaactctaggaggatttttagcatcgtagattggctgaggaatgagttttctaaagttaacgaaggatatgatggctcttctcctatgagactttacattggaagaggccttgccattgctaatatggccttttggtgtttcaatctttttggtttcttattgcctttttatcttcctaaagccttcaaaagatattactcggcttacaaagttaaagattaaagaacaaactatgtaatctaaatgtaatgtaataatttgtgatgggtatacgtttcatcccatcacatcagtttacaagttaatgttaagattcagaatccagacaaacacaatttgagataaaacatttttcccccccaattcattacttcacctgcaagtacttacaacttctcgtagaacttaacaaaagccaaatgcggcctataagaactggaaaaaggaaaagagaacatttgcaaaaacaggatgagtaaaaaaaacagtacagtacatgagctaactgccatccatggctgaaaacaacagaacacaaggataaacaaataagcaagcaagcatatttgctctggctatttgtcagtcacccttggaaatgcattttcttttttttttttttggttttataaaactctttcctaacatctttttgtgtctccaacacatcgattcctcggatgaaaaattgcatttggatgatgttaaaacaaacaaatatactcatgagctttgttgcagcaaaaatatttcagacttttccacagcctcggttgctgcaagctgcacgatagcatctttccaattcgctcaacgctgctgctgggtaatctcaacgtaaaatattctaacagtataccactatctccgatccaaacctgtttggtatttgcaagaaaattcaatcaaatttagttaaattaaaactaaaatcttacaatttatctaaagatgttaaagttcgattgttgtaggaacaaatagaacacagaattggaaaaatacatcaaacaaagtactacacaaaatttgtagtgtctttgataaaagaacacactgttaacccaccccaccaagaaatgcagtaccagtgctgaaacaaaagtataaattcttccaaaactgccctttgctcgtacaatcgtaattggttattttatgtacaagaaagccagaatcaaaacaataagacagaaaaacacgtactgttatatctctgggaaccattgccatttgacactggtacaagccttctttcttggcctaaggataatatttcctgcattctttctggccaatctgaattcaacctacgtgcaaagtcctcgacttctctgcatagagaagtaacaatgcattgagctactatcatatcaataaacaatggccaatatgtacccgccatccagtaacgtgaagcatgagcaaactgtatagatattataacactaacagcaaacataaatatattgttgtcttaatttaacgaaatcaatattcaacattttcgccaaaaaccagagtaagaacttaaaaattcaattatgcaacccctgttacctgtcaagctcctccttcatggctggatctaaatcatcatcgatatcaacatcatcaaaatcgagctttggggaataagagactgctgtagaatcttgcaacttggatgttttacttggagatgccatattattaacactgccatcgtgaaaagaaagatcatccaattcctaagtcacagaaaaagacaccattcatgagaaaagcataaagaccttaaatgaaactatgcaagaaatcccatagaaatgttaatacacacaaccacataaaccccttcctcaacaaaagcccagatacagagtaacaaaccttattatggttgccatttatatcatttgaagaattctttatttgatcctttcttctccgatttttcttcttgctcttattgcttctagccccttttgactctgtcaccaaaacaagtataagtttaaaaacttcaaaagatatacacaaacatatttaaaggaatactaatttgaaagattcatcatgttatggttacagattctgtttctgtgatattcagaacctcaacaaaaaggaaacaataagggtagctcaaatgatcgggcaaaagatggaaatgtatttaaaactgtaaaggcagaaaacaatcagcaactgtcaaaaatcaggtctcattccagtaacattagctcatgtagtagcatatacaacataaaattacagcttaaacaattgttgaccattcaactttgcagagtttgaacaagaaagggaatagttcacaatgcagaattattatggatccgtattcatcaaatttatgaatctgaatgtaagatcagttgctaccagttcagtcattaagccatggtggatagaaaggaaagtaccaactgtatttccaaaattgctagtaatatttaaacagcccctctcatgtgtcagatattaaaaacaaaacaggccctgaatccaaccaaaatgggcaaggaatgcaggattatattggaagaaatatatgcattaaagaggctgagcacacggcgtgagtaaaagcatatcgtataattttgttccaagcagttgtgatttctttacaaataacagaatttaacattttgcaaatctgccaaaaacatcttgataaaagaagaaagaagaaaacttcttactggtggctaatacgtctaaataaaagaataaatgaacaatctaaccagcaaaatctattgttaggaaaaaaataacatcaaactaaaatgcacaataaattttttaattaacattcctgtaatgatgtgggaagttcaaatgtgtagcataggagaaaaagacagatatttgcagaaagaatggaagagaacttctcacagatacctccatctccaccatttatgaatgtcaagagatcctcaactgagcgctcatccacacgctcctcttcaacctcaatattctacaataaatatatccattcagtgctggtgcagacaagcatatgcaagctggagtactctaatttcattactgtagctattttgtatgccattccaaattaacatgcttctcaaaatatagatttaccacaaaaaactgcattcaacatatgctaaaggcttcaaactcttcaagtaagagtaagcaccttcaatttctctctttcttttaattcttttctcttccttgcatataatcgatttagaaggcgaatacgaggatcatcggttatgtttcgcagaggctccaacttctcctcctaaaagaaaaaccaatctacataaaaaaaccataaaacccaagccgaaaataaaaataaaagacatcaactttttgcaaaaggaaaaaaaaccaacctccgttaggtcatccggtaaatgaaaggtctcacgtatctcctccggtgtttttccttcaataattcgcgcaagtgctctgcttgtgagatcaaccaacggcttcaattggagactatcagcagctgatgtcagctcacacaatttcttcgtgtccattcggataaatttctcatcatatgttttgcgttcctacaaataagaactaattgctaagtccttcaaaacttaagtgtgactatgtatgtcctatggtaccaaatacgaaatgcagcatgcgtgctgatatgataactgttgccaaataagatatggaaaatattaaaaactgataaccttacaaggaagaaatttcaattttcaagtttacattcctctagcatgcatcaagttcattgcgcaggctacggatggggggaaagaccgaagaaaagcaaaaataacataaaaactatatagataaataaataaaaaggccaaccttatttgaacgacctggtacttgatgaaaccggcaataatcaagtattaatcccaagatagcagggttaacccgttgtggaagtgatattgcataattttttggaagatcccatccccgtattaattacttctcgacatatcatagggcaaaacatagcaacctcctcttctacttgttgaattgaaccatcagcagtctgaagccagatgtaagacttcatctaatgcacagaatataattaaaatttagcaatggatcggtataagaacaagagcggaacaataaaccaacccctatttaaaatcagaaacttttcccaccataatattttatttacaaaattcaatcacactttgaaagtcacaaaattttccaagtgagttaataattctctatcttagcctataaaccaaagaaacccccaacccgtctccctctattttcatgcatataaaccttacttcagccataagccaataatttaacaaattagttctagtgtaatttcggcattaaatttcccatctctaagagagaacctttaaacaatatccatctcaaagaaattgaaaccctaacctcttaagcaaacaaagggaacttataaacttacctaggtcaaaataactaataaagagtacaagaaaattcgcaactttaaatagaaaatggaagttaagctattttgcatacctcaggttttactaccgccataacaccttctgacatttgatgatgacactacaataacttattaggatctttaaaacaacaaatcactatatacaattcccttcaactttcgaaaaaatgaagaaagttaagaagcaagagaataaaaatcctcttctataggcatagattttttaaatagagatgaatagtttaacaacaacttccaaattgatacaatgctgaatcccagaaacagggggattggcattcttattggcgccttcccaggtcgttgccttattcagatggaaagcaacaaagcaaaaaggggataacacaatgaaatgtgcctggaaatttaagataatttcacttattagttgttactttaaaattactaccttcataatgataaaaaaatcaaagcagcagcaaacataacaaggataagaaaaaaaatacaaaaaaaaaaaatgaaaagcatgtcaataacccagtataaaaaccataaatatgtacacataaaatatcttgaaacaaagcaaatattaaaaaaaaaaaaactgaaaacgacaaacaaacctcattaagtttttaaaaagtacgtaataatcttctgctagaagaggagctacatggcagggaaatttacaaagaacctcgtgggtcattggttcttatattcagatcacgatatatgtataaactaacaaaacaaattttcaaatatcttctcacaaatacaaggaccataggcttaagaaacatgtccaacacttgttccttcaaggatgcatatgaagtctgaacccccacctccttttctttgtaaaatttcaaaaaaaaaaaa

SEQ ID NO: 379275 - DNA, 3335 bp, Cannabis indica
tcttaatggtatgttattgataatacctatatataatattcttctctaaaaataaataaataatggggaattatataaaatctgacctcaaaaatgaggtttcacatacctcaaataaaacaaataaaatatcactgtaacaaatatatattttactttgtataatcgattttgtaactggatagtaaatagaaataatattttaataagttttaattttatgtgagaatttaaatttaaattgaaagcttataaatgtaaaaatagctttttgtacatatgttttgttagttaataaaatttggattgttgcaaaagaaaaaaaattgggtagttttactaaaaatatatggatagttttgaagaagatatttttatttggtctcagggtttaatagtttacacctacaacaatgaagatagaatctattatttttttttttgggtaaggaggatgatggtataaatatttttacacactccattaattcgattttcattttatttcgctcattatgcagatcaattacttataattgtaaccctctttttacaggacattattcttgtaaggaagttagtgtcgtaattcaaagggtcgtgaaattgatagatgagcttgtaaaatatattgaaagatgaaagtgaatacttatggatgagaagattagcttcagattcaaatgagtgcttcaaaaaaaatgaggaaaaagaagacagagaagcaatatagagaataaagaagcccataacctttatatatctctctatcaagatatacacaattttataaaattcagtttgctgccattcttcctcaatcaatatctcttcactataaaattgtgtatatcttgataactaagatctactgcattttgaccgcaacctgatccttttttgcttgagttcagattcatctcattctgtttggtaaaagatctactgcccttactcagtttttgtctgaaaaacttggtgatcttaattaagttcacattccttccctttatgatactattagtcccttcatgcctataagaatccttgttgatgttaccaagtctcttcgtaggggtatgaacattaagtttagatccctctaatgcactaaatggctaaaatttatgtatgatcattcataactactgctactattgtggaatgttggatcatacttttaacaagtgtgagaagctcttaaaattctgtgatgattctcctataccacctgctttaaattacaaagatgtacttcatgctcctaccaagtcaatttacaagaaaagcatctttgatctttccaactcaactccgtttgaggagtcgtcctcaaggggactctctcttaatcaaagtcttcaagatgttattaaccaattcttggtcccaaatattgtcaacactacactgtctaaggattctcacgttgtcatgacttagtctgattctcctgctgctgtggtttgccttaactccacacctctaggagcgtttagtgttcctaatctcaattgttcattgccagcagccctaatcttgaccgcatctgttatttctacttctaataaaggtaaggctgttatgtcttctgagttacctagagttgtccattctcccactaacatatctggtgtggagaggtctttcaccaagcaaagtgtcaggtgggaaactctgttagggaaatgctgaaaaagggctcgagctaaaactgatgatgaagatgctgttgtgtttctttctatttcaactcctgatgaacaggcgggtgttgcgatgcaacccccgcctagaaaaatgagtctcatgagttggaatgctcgaggtttagagagtcctcgagcatgtcaaaacctctccctgttagtcaaacaacatcaacctcaaattctttttgtaatggaagccaaattgtgggctggttccagtgatagatttagggtaaaattatcttttgataatgtttttaaaggtgcccaggaagggttttgggggaggactttttcttttttggaatgatgttgtcagtatcaatgttttatctttttctagtaaccatatcgactgttatgtaaatattgatggtaatataaattttcacctttcatgttactatggttccccttatttagctaataaatctgtttgttggactcttcttactcatttatatgatgttgttcctttagccccatggatcataattggagactttaacgattatttaggtcttaatgtcaagtctacttgtactaaacctcctccatatgccatgtccaattttaatctttcattaataaatttaatctctctccattgcctttctttggtaatcgttttacttggaagcatggtaatgtttttgaaaggctcgattggagtattatcaataaagcttggttggacttttttcctaaggctaccctgagacatctttcttattttggttctgaccatagagcttaaaaaataatccttaacgatcctaaaaataaaagtttccacaccaataggttttgttttgaaaatcattggctttccgagcttgacttcttcagcatcgttcaaaattgagaatcttgatgatcatagtaatcctctatcttattttctcaattgtcaacacaactgtgttaataaaataaaagagtgggagggtcaaaaattccatttcaggcacatcattaagaacctatgtcttcaaatttttcataataacaaagatacaggcttccgccgcagatctaatatgggtttagggttttgaagacctatgtcttctaaaaaactaaaggcgtatattatttttctaatagtgttagttcatatgtcctgtacatgcgaacaatttttattggcgtttaataataataactaatgagcgttactttaaatttactaatgtaactgtacattgtgaggtatttgtgcatttttttattaaaaagtttaagattaacttttacaaaatgtaaaaaaagtaaaaatttagccactaataattcttaatttttttaactattttttttaatattaaatcataacactactgaaatattaaatttattttaatttatgaattgggtaagtgctactaacaatattaatttttttcttttagaaaatttaaaaaaagtatatcctaaatattgaaataacttttaatttttgtttagttatccataacttattgttagaaaaaactgttataaaataatataaaatagatgaaaagaaagaagaggaagaagagcataagagaaagtgaatgagaatttctcaattgtttattccaatggggtgaacccctatttatacaaatacaagagtga

SEQ ID NO: 379276 - DNA, 3365 bp, Cannabis indica
gggaatcggaatctgtgagatatgatcacctcatttctttatttgtttggtggaggcagggatggaaggataaaagtgatcggtggtgatggcattgaaggacttcttatatccccaaagcaattacctttcaaaaatatcgaggtgtgtttcttaaatcttaactattgtgctgaaattgtttctttgtggcatatttcttttttctttttggatatactttgtgtaatatttttgaataccttttaaaaatgaaattttaaggactgtgtgaatatgtatgccccttgcatgtgcctgtgtgtatataattatgtttgtgcatgcacatacatgttcatgtatttcaatgcttgtgtgtgtgtttttcaactttttcgtttcacaatctttcctctttcttgggtggtaagagataatgctgagtgttttttcttttcctttttgacagtttctgcaaaaccagggatatttggtcagcattttaaatgacaatgatattcaggtacagttctgtatcaactttgaaatttctgtcttcagctaaacttaattatgccatattatgaatcattaaaaaagattatgagagaacgttgaattttcagacatgttttattttgagtttcttatctttggatcgatacgttgaacaataattctcttaattggttgatttaattcaattgttatgcttagtgtcattggttatttcagggttagattcaaaaacaaaaatagaccagcccacaagtatgagtaataaccaactcatcatttcacattatgataatataccagttgagataattactaacatggatgactctcaagtttgggttggtcgtttcttttcttaattgtatattttagtcttaatttggcaaaaattttgtatctctgttcaaggtaggaagtttgttagcaggtgattgtggacaatgctgtggcttttgattttgtacgctaattgacctgtaaaatttaaccattaggaagggcttaaattcaacacagtctttcaattgttgaagaagtttatgttatactgaatttaaaataataaaactcatttttatacaatttcacagaagttccaacagtttaataattcactttttaatttacaggtttggaatcttgagagaaggtgcttagtttgctgtttacagtgggagaccaacataactgcttttgctgcaatccatggctccaatttcatgtacataactgaccaaatgaaaaatttacgtattcttaattaattgctgattagttgtctagttaacaagtgctggaaaatcaacttcattgcatactataaattgcaggtatgttggtgatgagtatggtttgatgtctgtggtaaagtacaatgttgaagaggaaagtcttttgcagtttccgtatcatgtttcagcaagtactataagtggtaagttctactccaaaatagtgtaagttgttttgctattgtttctattgagttgtcatccttaaggttgcgaaacagctatacgtggttgtgcagccttataatttgaactaaagttctagaaatgatttaaatcatctgtatattgccaatcattagtagtaaagataaaatgatattatatgtttcttaatgttttatttacctgtaacaatctcttttgctgaatttcatgccatcacataaatatttttcttaggggtccaattgacaaattatgattattacactaagaacccacgtatagaatgattttgcttctccttgtgagcaccataatcattcaactctgtacccaatttgaattgcttatggaagaaatttctcataaacaacatttgtatataatcaccatgaattgctaaaacctgtaatattgccataactggaaagtttgatgtctccatagtttataatatgatatactaaggtacaagctgctcatttaaaattttgtcaaatactttttattctccaaatgatcaatagtcatttgatccaatattttatatatttatataatatatatattcagatacgcaatcgttaacattatgaacataattgcaaatgcaatatgcttatttgactctagggtccaaattttgtacagctacttgcagaggcaatggcttgatattgatattgtaaaagataatgtcagcagaaggctaaatgccttttctgtaatgaataaaaacatttcttaatataagttattgaatctgttcacttctatttttcttttaattctttttttcccaatcattttaacagatgtcaccgaatttccatttcttgatgaccaaccaattgttggcgttcttccccaacctcgttcctcaggaaacaggcaagacaaatttccattatattcacattgaacagtaattaacactagatctacttccttctctgtttaagtagctttttaattaaatcattagtagtaagctccaatatttggttagcttgaaaatgcaactttcaatttcagtagcttagtcatattgactattaaacaaaacactcattaattgtgaaacttagtctcttatatgtgtgtaattacaacaactaactcttttatttctgaatcgtttggcagagtactgattgcatatcagaatgggttggtagccctttgggatgttattgaatctcgagttgttttttctggaggtggtaaggatctccagcttaaggatgaatttatagaaccctcaggtgaaaccaatgtagattctctagaacattcatctaagcatcagttggaagagaaagagataagtgctctttgttgggcatcttccagtgggtccattcttgctgtggggtacgtggatggagatattttgttttggaacacatcatcctctgcttcaagtaaaggtcaacaacaggctttgtcatcatctaaaaatgttgttaagttacaattatcatctgccgaaaggagactccctgtcattgtcttacaatggtctgcaagtaataaatcccgtaatgattgtgatggccagctgtttatttatggtggtgatgaaataggatctgaggaagttttaacggtatgtttagcattcaagttttattttgtatagaatcatgagaggtatttatgcttttttaaaatgttaacttttcattgactatgcaatatgtttgacagaataaaggaattatgagtttaatccatctccggtcatcagataacttacaaaaattaaattgttttgtcttgctggttggataatgctatgtatttctcttaagtggcatttggttggaggtaatgaaatgaaatggaatggaaaagaacaattttcattccattcttttgtttagttgcatattaaagtattagaat

SEQ ID NO: 379277 - DNA, 3873 bp, Cannabis indica
gtttgggattattactttttggttagcccaaaaagatgggttctcgtctttctcttttcactcttttgtttcttctttcttgctccactactctcctcctcaccaatgccaaccctttccgccgttcccaccaccctcgggtcaccaggcacaactacaaagatgctctcacaaaaagcatcctctttttcgaaggacagaggtcagggaaactccctcctaaccagagaataacttggaggaaagactctggtctctcagatggttcagccatgaaagtaagcaaggaaggaaaaaaaaacccacattttacttttcgtttaaatgcattatttagtagctgattttaagtttgaagatgttatggtatatgggtttttggttaatattgatttagtccttctgttttgaaaatgcaggttgatttggttggtggatactacgatgcaggtgacaatgtcaagtttgggttccccatggctttcactaccaccatgctttcatggagtgttattgagtttggtggcttaatgaaaggtgagctgcagaatgctagacaggccattcgttggggtactgattatcttctcaaagccacagttcatccagacaccatttacgttcaggtttcaactctttatacttgttcttttttgctctgcattttaattacttgttgagcaaaatgtgggctttgggttgattttcaagtttgtgttttttttttctcataggtgggtgaggctaacaaggaccatgcttgctgggagagacctgaagatatggatactccaagaagtgttttcaaggttgataaaaacaaccctggtactgaagtggcagcggaaactgctgcagctttggcttctgcttctttggtcttcagaagaagtgaccctacctactccaaacttttggccaaaagggctatgagggtaatcacaacttagtaataataataggggtttcttctaatgttattaaatgtcctcagaatttgaacttgactatgcaatgtttgctgtgtttttaggtgtttgcttttgctgataaatacagaggatcttatagcaaggggttgaaaaccattgtgtgccccttttattgctctttctccggctatgaggtaaggatggtacagcttttttggcccccatttttataggttggtgcctaaaaaagtaatgatttatcaaaatatcacaggatgagctattatggggtgctgcttggcttcatagagctaccaagaatccattttaccttaaatacattcaagctaatggacagatccttggggctgcagactacgataacacctttggttgggacaacaaacatgttggagcaagaattcttctctccaaggtttccattcttatttcttcaactctgattaaagttactagaaactatcttaaactctaaactaaaaagaaaaagtggtgtttgtattgtttaggcatttcttgtccaaaaggttcagtccctccatgactacaagggccatgcagataactttatttgctctttggttccaggaatccctaccacttcggctcaatatactcctggtctctctctttttctttttcacttttactttgtcttttctttctctcaagctctttggtttgtggtccctgtaaaaattaatttaataacggctagttttgtctactttgtatggtatggcaggtgggctcctgttcaagatgaacgatagtaatatgcagtatgttacatccacctccttcatgctattgacatacgccaaatacttaacctcagcccgtaaagtggtaacttgcggtggaaccacagtcaccccaaaaacactccgaatcatagccaaaaaacaggtttgtttaatattaaaagcaacgaaagacattaattcctttattcaattataatactaatgaaactgtgcttttttaatattacccaggtggactatttgctaggagacaacccattgagaatgtccttcatggtggggtatggtccacgttacccacaaaggattcaccacaggggatcatcactaccttgtgttgcttcacacccggctaagatccagtgctccgcgggctttagcttcatgaagaccaagtctcctaaccccaacatcttagtaggtgcaatcgttggtgggcccgaccaacatgacaagttccctgatgataggtcagattatgagcaatcagagcctgccacatacatgaatgcaccgcttgtgggggcactgtcttacttggctcactcatttggccagctctaggccacatgtggacccatctttccaacaatttaggtctcttttctttttaattacaaactcttagttatgtgtcgttttagaagtaatgtttttttttctttgtggtattggaattgctgtggaagggcacgtggtttgattgggtcgagactaaaatggctcaagaacccgaaagttcaaagcacagttgccaaggtctaactggcctttggtggttttatatataatatatatattactatataggttagtatgtattaagtttactattgtagcctaggctgtgaaagagagcaaaggctacgtgcctgaaccggtgttgcttttaggctctttttctattctaatagctaaattaaaggtatagaagccaaaggaggggccatatacaaaggccattggtttgatatctactttttctagcatgtaatgttgtttctcatttgaattataaaaggaaaatgttgctattattctattttgggaacttaaattactcgttttttcgtcctattggctataacccttctctgacgagcccttttccttttaaaaagctccaacctaacgccgctagttacaaattgacaaatttgtagtggcagtaaggggaaaaactcagaagagagaataagtttattgagtgaaactttcaataaattaataaagtggaaaaactcaaatgagagaataaataaagagtaatttgcaataaattttttcttatattttaatttttatacacttaattttcttattattatttttttgtggtaaaatttctataagtttattttttatatataaatttgactcgtcagttaaatattaccattaaatatcatctggatgactactgtgtacaccagtatacctcaaagtcgatacaacagtaatccagttaatatttagcggtaatatctaactaatacttaaatttgcaaaggaaagtaaacttggagttttgtcataaaaaaaaaagataaggaggttaagtgtacaaaaattaaaacataaggagattttgtcacaaatttctcataaataaatagcgagaatatattaaaactaattaagttagacatcgtgctcattacaaattaaattaattggtatgaaagccagatctaccataccagtgacatcaccggcaaaagctcattttgctacattacgtgccacaaagttacatagtctggaaatatgtaacggtaattcccttgagcgtgctgatcactgtctctaagtcgctctctatcattacaaacaaatgattcccttgagcattacatcaaaagagaataagttttttgagaagagttatttgcggctaaaccctttcaactatcattctttttttaattaaccctctaattttaaattttggtggtaaaaccttccaaactactaaattgttgacaaatttaaggtaacatctattttccatagttaattgacaacataaattgtttatgtgtacactcttgtacatctgaaacatttatattggtacatctattattatttaaaattataaaaatatttcaaatttataatatatttatttttaaatatttattttattttat

SEQ ID NO: 379278 - DNA, 2107 bp, Cannabis indica
tactttgatccattttttttttaggttggatagtcactagagataagatttactctactcactccgagattttctttaatgaacattaattgattcttgtttatttcttataatttttagttattgacgattctctctatccatttaaagttttgttaatattattcttcagttcgattgggactaatatgcatgatatagttttttcttgatttcttttacaggctcggctctgctctgcagatcaatacatacaatttaattttctggtattaccttctttgtgtattgacatttaaaagtttgtataattgtgatctttaattattagtttaagtgttgtgttttctttttttggcccttgaatcagtgtaaaatggaacaagttaatcaaggtaaccataacgacaatggtgtccacccaacacttaacctccaatgcagcttatgttctttgaaatttgacgatgaagatgacttgaaacaacatcggacttcccatattatagattatattggtctagaaaggtaaacatatattaaattccatgtacgaggcttttcagaatatttaatttgtttctcagccacaactactcaatgaaaattaacaaataaaattttgtaatgtaaacttgacaaaagaaaaaagatggagttaatttatatacaatagagcataattaactttccacaaactatagaatttggttactgttaacatgagtacacaagtttcctcaaagtgaaaaaaccaatccaaattatagacaacctcaaaagacacatgtggacagaaacttggattgatatgcatgcttcagtgatgatggaaccaattttatggatttagtggtgaagaggattatagatttttttttagatctgtgtttgccctgttttctgggtatacttactgcaattggtatagttttatttgttcaatgccttgataggtttagtatgcagtttttgtgtggaacaatatgtgagtttctgttaatttttcaggaccctttcttttgattaaatgagttttttttttattcataagtgattgtagttattgttattgtatttgcataaacccaaagaagcaattatgttgaagtaatttctaatagagagaatcgaggggaagtgatttaactgatgaacgaactaggttcagaagtaaagaaagatccaagcttcataaacttgatgactactgattctttttattctcttctctcagagcttatctcctctccttcactactgatttggaagtaaacatgaaaaatccattatcccaagctgcaactcagataaagagaaagtcagaattgagtaactgttactttagagctataatccaagattaaaataactaagaaattgagagtatataagaacccaatgaggaatactataacaagtctttttaaaactaataaagaatactaataaagaagtcagaagtgagaacaaagcataaataaatgttatgtaatacaaaaatagagaagattcaaacaccattaaaatatttttctggttcaagtcaaatgttatctttacaaaaagaatcttaacaatataaatacataattcagagcacaaatgaaacatcacattcgttcaccaatttcccatgttcagaaggaacaattacaaaaaatgaaaggagttcaaaagtgagaaagaaagtattagccaaatgaaaagacatatagccaaattatctgcaataattttcatacccagatttgaaagagagacttggagatgggagaagccgattccatcggtgctaaataaaacatagcgtttttcatttctcctggagagagatgtgatgtggctggtaactggtaagtggtagtaagtttattttccaaataaataaattcggctaattagtaattttttccttgaactttgacatatattaaatcgtgccctttgaattttgtttgccattaaaaattccccctgaactatcaagatacttttgtctaattttagtaaaaaaatttaacatggatgaaagttcaaggggcatgatttagtacatatcaaagtttgaggggcatgatttggtagatatcaaagtctggggagc

SEQ ID NO: 379279 - DNA, 3141 bp, Cannabis indica
gacctaaaatcgaatccttttatatttactacatatgtaatatattaaaaataacaatatattattaatatagtttggaacttttttagattgactttgtattttagatttgaaatttaatgtttttttttgtttaatctaacgaatatagattctaggtgttataacttatatacttaattaatataatgtaaaaaaaaaaaaaaaaaaaaaaacaaaatagaatttgagtttttaaaaaaaaattgacagagttgatcggatcaactcgttgacccgatcgacctgcgaactcggccaacacgaccatttcacaggccgatctgggtacaattttttgaaaccgaaacccgcgaacccgaaagccaacaaatccgcccgatgttcagccctaaagctaacacctcccattgaatctaatattccttcactcgtcccaatttgcaccaccaatagtagctcctcaaataacaatccaattaaaaccgctcggaaccaaagaagaaccatttgttgagcatcgcccaagacattatgggatgatgttgattctcccactaaaccaagacagagcattgacgccaagtcccacaatagtcgtgtcaagcatcatcttctctctcattctcataagcaaaaagtatcgttcaacacgataaacccagccatcgaggttgtcgccactaaacaagggaatttccattcgtgtaggatggtagtctaagctgttcgattggcagttctgaaatgagccgagtcaaatcgaaggtcctgtcagaatgttcagaggagggaccgtcattttcgcgagaaactttggtgtttgctagtccagacaaattccaatggagttaggttctcaaattgaagaacaaataccgtcgagagctcatcgttgactgtctacacttgcattagctgcgttagatgaggttttcgctggtcgtccgaggatttgtgagatctaactcaacacgaactccttttgtttagcaactatatgctcaattgtggtctgaatttccccttgtaacttctccaacccttgattaactttctgtacatcttggcaaatttctaatacatccattgctaccttttcttctatgatttctaccatagcatcttttttgggtcccatgaacaggagctctgataccaattgataggaatttcctaccaaaccagttcaagcttaaaagactatacgaaaattgaaagaaaagattgaattagatgtgatagtgatagcccatgaatttgagagcctggcctctccttacaagtttctagcaaaatactcaaatatcctcccacaacaacataccacattatttatatctaacccacacaactattgtgtgacttcaccacaccagaacacaactttccccactagattacacagccaaattgtcccttgtggcaatcccactcttagccccctatagacctcttcctagcatacataaatgtaacgggagggctatcatttattgtgtctaattgcctgtgtatgaaaaatattcaaccccatattgtaaagtctgacatttttgcacatcattttcaattattctaagacaacaacatctgcaagcaaaaatacacttaaaatgtaaaatggaaagataaggaaacttagtaattaccagaaatttaacaaatacaagtgatgcatcccaaactgttgttcctaaatgcttggagtttggatccttcacaatgattcagagaaaaaatcaatccattatcaaagaaattattgtgagattcactaggaaaaaaatcgcctaaattcatcatactcagttgaacaaacaaaagcccatcattaaggaaattattgtgagatactctaaggaaaaactcccctaaatgcatcataatttgcaacaggtacatatacatataccagtattttgacagatatatgtgtaggtaactaatagtcatgagttgacatgatacaaaactgaatatgatacatatataaatatgtttctgacgcagattccatattaacagcaatttcactctacctagtaaaatagcttatccaagctttcagaggcaaataataggagttctcgagaaaaatttatattgcattcacaccctcaacctggacttctcggactgactaaaatgccaaaatcaaaatgtaagaaattctagtcctgtaaaattgtatcatgtaacctttttcctggcaaatatgaggaaaatacttgtttgattgacactttacgaactatctatacattcggtacatcatccaacttacttaaattaaaaattctcaaggtttcaattagacccaaaattagcatattcaataaacatcaatgtgcaacaaaaaagcaggaacattcctggagcacaattgcaaatacctgcgaaaactgcaactcatggttcattacttccaaactcattgaaaatgtagtaggcaaatttaacctgatacacataatttatactgctttaacagaatattcttcgaagaaaaatattgtcttgccccaaacactctgcattgaaaaaaatgatttgacaaaggataatggatttgtaaaatctgtaatacctctcagactccatttgatacagcaaaaaggcgttgaggagagtatagtgtagtattatctaggaaacttgatcgcatttaattcactgttacaccacagagataaccgggattattattacgcaaataaaagaaaaaagcaataatcataacgatcagggaagatgggttaattgcttttgcttttacgaaagagtaaataaaagagtttattaagattgcaaaatgaaatgaaaatagaaagaagcttgaacctcagtctcggactgaatcactggttagggcttttgtgcgactgcaaggcaaagctaaacttgtctcactgctccaagcattcgtcaaaatatcgaactatgacttttacccgaaagaaaatttggaaagatagaaaaagtgaagagaagagtactggtaaaagaaagaaaagaattgtattttattttgggatttttacttacatgtaaaatttggcatattttttatatttttatttatgtttagttttttaaatatttttataaaatttatttttcaattttattttcaaaaaa
